United States Patent Application Publication US 2014/0325702 A1 - sequence listing, part 6

SEQ ID NO: 4307 - DNA, 2790 bp, Heterodera glycines
  unsure (1)..(2790): unsure at all n locations
gaaagaccctaaatgtatatttaaatctgaaanaatgagctgatgccaaaattttacaaaaatttttccttattnaagaatttntaatgttctcatcagatatttagaatnttaaaatgttttcaatttaatttatttttaatattgtcatatctaaatctttgatgccgttttctgctcatttgttatttaagcagtaggaataaaatatttctaaaattttaattttcaataaaaatataaattaattttggtcatttgtgactgggaatgatatcaaaaaattaaaaaaaaacaatttcaaaattaaataaaagcaaaacaaagtgacatgtgaaaagataataattcaaaactaaaattaatattaattatcaataaatttaaaataacctatttttcatagaataaattaaaacacaaagaaaaatactaaaatttaacataaaattattaaaatatttataaacacaactctataaaatattaagcaaacatttttaatgtgaataagccatataaaattgaatagaataatttgaattattatatccaattctatatttattacttcggctattattctttcatttatttgacattaaaattagagatcggcattttgagaaaatagggatcaggatcaggattacggactagatacacatacggatttacggacaaaaatctggaaaatccgtactccgtaaaaatccgtatccaggaaaaatacggatccgtatacggatacggattttttaaaaattttttcatattcgaaaacacaactagcaacaaattggcaacaaatggaagtgagggtaaatatttcagtatttgtaattaatttccggaagtgctttgtttaaaaaaattaacatttcggctgtttccgtgcactcagcttttccttcaagtaatttattgaataaacctatttgccaaattagtgaactcatattctaaatttaaatattttatgcaaaaaatagaaaaaataacaatgacattctcttacactttcaattttttaaatataaaaaaaattatttatgttttggcaaaatgactgcaaaaatttaaaaaatttacacatttgtaccttaaaaaacgtcagaaaaaaatccgtaatccgtgtcataatttatacggatcgggatcaggattacggacttgacatcgatacggattacggacttacggattaaaaatccgtaaaatccgtagtccgtaaaaaatccgtatcggccgaaaaaaatacggattacggactacggatccgtaaaaatccgtatacggatcctgtccgtatccgatctctaattatgacaaataaggcagagtgaagtcccaatggaaagcaaatgcaaagaaagaacgaaaaacacaaaatgttttcgcttcaataaaaaatccattttctcattcaaaaaaagcaaaaattttgggacggaaagacattctcaaataatataatagataataatactgcgagggaatgccaaaaggtttctaattttcttcttatcaacctttcattcaaaatccatttttcgcagtgccagtaatttactaattattttgtaaggaatttttcaaaaatgccttaatagggacgataatagggggcgaataccgatgtatggaagcagcacaacgcccgcccaaaaatgaggacaacttttcttccagatggattaactgaagacgaattaatgatcaaattagaatgatggaattatggcttgtgacttcatagttaagcgaaaataaaatttaaacaaaaattggtgggattaaaaattaaaatttaattatagaacataaaacattctgattttttttataaatgctataatatatagctagctagctattaatgatttatatactacaaatgcagctgtcatgacggggacagcagcagacgacggcacaaaaccgtaaaaatttacggcaatttcgaatgaatggcgcctcgatttttctaattatcaaatatactttttgtatggagaaaggaaagtagcaaatcagttacgacggaaaaatttaatttatttgtcaaaaaattaattaaatgtgttttcatattgattgctttaagaattttgcggtaataattaaaattggtggaaaattatttgatgaaacccattaaaatttattgccaattgttttttctaagtcagaaatttttgatgttaaaaattatgaattttagaagtgtttaataatcaaaaaaattttcaggaaacataattagcgaatttccttcctatgaccggattcataagcaaaaaaacatttgaaaaaacgcaaaaaaacgcattaaatttcgtggctaaacgttgcttcctttaaaaattatttataatatcatttatcaacaattttgccgaatattttttaactttttaattgataaaatgaaaatgttcataaaaattattttttccttggccatttttgtcaaaattggtaaaaacaaattaaaaaaaaaattttattttcaattttaaatttacagcttatgccgctccaataaataagcaaagcgaatcatcattaagcaatggagctacgggaaagcagctaatacgaggtgagaatttttcaaatttatttaatgtaaaaaatttttgtttttcgacgaaattccgccaaaattacgcattttgatcatcacatggcgggaatcgttcaccgaatcgcattatttattgcatagaaaattggctgaattgctcgcatccgatgaacaaaatgtggaaaaagtggtaattcaaa

SEQ ID NO: 4308 - DNA, 6475 bp, Heterodera glycines
  unsure (1)..(6475): unsure at all n locations
attttgaaaaatgtattattttacaatttatccaatcaatatttatcaaatatattttttctacctctcattttttattttaaaaagatttttttgcggcgcatttttcaaaaaagcatctttcattttttattttaaaacatattataaaaattaaattttttggccgatccttttatttaaagctgtccttttaaacggtattttactgtatgtattcttttaaacggtattttactgtacgtattcttttaaacggtattttactgtatttatttaatgaccgtatgacgaaggtgtcttatttactttcatttaggtcatttaggtcaggaaacagtctgcagtggcccatttgggaacaggacattgctcatttttttttgccaaatgccaacaatgctatctctttacaacttggtaatgccaaaaaaagtgataaagttgctgttataattagggaaaagaaaacattaaaaatgatttgtttattcgttttccctaaatttggagaaaaaaaagctaaccctaatgccaagaagcttcatttataaaactaatcaaattgcaaaaaaaaaactaataaggaccaaactttttatgattagattttaattgaattttttaaatttaaaaggaattggtggaaagtgcggaaaaattatttttatgcttgttaatagattttgcaaaaaaaatgaatgatttttttttgagtttttttagtaaaacaaataaagaggttaggtaatgcggtgccaggaagaaaatttgggttttttttaattcgggtaattttaacttgaatttttgcagactttttgacaaattgtcacggccttatccaacagttgcttgccttccaattcaatgttggcattatggaaacagttgcatgggacctttcgttgagcatttttcgcgcattgcccacaatcaaaaaatttggcatttcacaaagcgcaacaccgacaatagcgcaatggcacattttgggttatgaaaaaattgttggcgcaatgccaggtgaattaatttggcgtttttttaaatttcggcacctaaaacatttttcattaccaaaatttcgaaaatttccatcttttcttcattaaaaaaatctttagctaaattaaatttaaaaattaattgacattttgaaaaaattttttgggtaattaattaagaatatgttttcttactaagaaaagttttaccgaatttttggtcagaaaaatatataagtcgaataatttcattagcacctcaatttgcccaaataaaaaaatcttttgaataaaataggaaaagatttggcacgaattggtgaccacaaatttgcaactgaaaatgccatcaaagtaaacccgaattattttcgtgaacgcaatgtgaattcgtatataaagctanatgaacaggcaataaaaacagtggtaatttatttttatccttggattttatgggctttgcatcttggacttttcaataaaattcatcaaataatgtgtgatttttggataaatatttttaataaagtaattataatttttaaataattttttatggtatcgaaaatttaaaatttattagcattttcttgaaaattatttttttcaaaaatgccgtttttataatatcataaaatgaacacattttaatcaatttttaattgataaaatatattttaagtactcattttaaatatgtatgctttatttttacaaaaataaaaaattaattgaatttttttttaaattttaggaagaaaagtttttggaagcaattcgccaagaaaaactctcacgaaaaatttttgaggatattcttattcaagaaaatttttctgaatgggaatttaaacatcggatggattttttcataacaaatactcaaccttttctcgattttccaattgttgagcaagaaattgcaaaagaacgatcaattaaacagaaaaatcgtattatttttattggcggaatcacaatgccaaagaatggggcattgccaagtttgagtgaggtaatctcggaaaatcttgtcaaatagtttgaacaacaacctaagaattcataaaaaattaaaagataattggaaaatggattttttggtttcttgaaattgagaaaatggttcctaaattaattgctaaatacattcaaaaaatccaaatagggggaaaaggtaaaaataaaatttccgaaattctctctgatcgaatctgtaaaaatttcaaagtacgcaataccataggcgttgtcggcgaaaatttttgacttttctccagtttttttatcaaatttattaaattgcgggaattggtaaaaaaataggtgcaaaaactctgtaaatttttttaaatattttttttttgagcgtttaatgcaaatcattcacagagttttacacaacaatttcaaaatatttacaattaaaaaaatatttggttcgacggtgccgacagggccctagaaatttttgaaattttcgcttaattattgcaggataacaaacaaatatttgaatctgcgcgcaataaaaatggtggcgttgtgttgctcagttttggctccgtggttccgatgcatgatgacgatgcacatgcagtcgcattcaaaaacattgtggtcaacctgttctccaagcagtacccgcagatgaacatgatcatcaaatggggcgaacggccaccaattggcatgggcgaccaatacaaaaaaatgtcggaaaatatttatgccaaggcttggcttgaacaatcggcaattcttggtattgccaaaatggcatcttgaacaaaatttattaaaaagattttttttttaaatatacaaaaaaaaattttaaaccagctttttcaaaaatatgcaaaaaaaaaattaattcgccaaagatgctttttggcgcctcattatcccaaatcacttttaatgacccataattttttaagtaaactttaaattttacagtcatgtaaaaattaattgtttataatccacagattgtttatttaatataaatttttaaaatttaaaggtaatatgccgaaattgttcattacgcatggcggacaaaacagtataaatgaggcagtgaaatttggcgtgccgcttcttttattcccattttttgccgatcagtttaacaatgccgaagcaatggcggcacgaggggtggcaaaagtgcttggtaaatttataataaaaattatttaaaagatctaaattcgaaatttaagacattcgttccaaaacattggaaaatgagttggctgaagcgctgaatgaaatattcgcaaattattcaatgtacaaacaaaaaattgaagaattgagcaacaagctgagttcaattgatatagctaaagaatttttgggcgcatttcgccaactacgaaaaactctttgacaagaaaatagaagcaaaatttcttgaaaacaattatatttcttagattgaaaaacaaaatttcttgtaatccactatatatctaagattgttcgctagcttatcattattatgttgtaatttgccttacattttctattcatattcataatccaaaataaaaagcaaaacaaatatgaagaaattgactcttaatgatactatttgttgtcgattagaaaaactcaattttaattttgtttttttaaatatattagaaaaatatttaaataatttatttttatattgtttaaatttttttatatattaaaatatttttcattttgtattgtttgataaaaaaaatagttataaaaaattattataaactattttttatggattttataaaatccaataaattaaaaagttatattttaaaaatataactttttggtctttccaaaaataattaatcattcagaatacaatcttaaaaataatgaaaaaaattgtaaaatattacaatggaaaatatttgtaacgcaatgtgttttgaatttttatataatttctaatacaaaaaaaatagaattttccattgtttttggttgataattttacattcaaatcaataaaaaatatacaaattaattgagacaagtttttataaaattttgggacaggtaatggggacaggcaatcccgaaacggaattcttgaaaaattttgaaaaattttaataaaaatattccaaatcgagctggctcaaagttagcaaattaatcaaaatatatgctgtaaaacacaatcccaaatcctaattaccacagttcttttaatattttgaaatgttgatcagtttcattcatcaaatgtttttctggcaaatttcttccgtcaattcgaccaattgtcgggtgttttacattatcattgacgcgattgttacatggaattttcatggaaaatttgttgaaaatttttttcaaaatttgcacggcattttggcgcaagattggatgacgactaaattaaaataaatagaaaatgaaataattactattttaattaccttattatagtgtactcaattaacaaatggtaaaatgataaaaataaataattgaattgcacaaagaaaagaaataaagaataaattattatgtaatacaaaaaattaaagatggaagtccagcctataattgaaaaatgaagtagaaaagttggccataattgatggcctgttcggatgttttcagtcaactaaaaatttcaaatacaaattaactcggaatcaattaatattaattttttttgacctgataacgttcagtcaaattatgcccattgctgtttgaacattttaattttttgttaaacattttttcattgaatttactcagcattgaaaatgtctaaatttaatttaaaaaatttcaaaaataaaaaactaaaattaaataaaaaatgattacaaaaatttcaagaaaactgatgaccaaagataaaaacgttgaaatagtcgtaaatgttgataatgaatttgtattatttgcttgctccaaaccaataatgaagctgtaaacagtctaaaataaaaaataattctttaataaataagtacatcaattaacaattaccaaaatgatgaaccaactggcactgaaccaattgtttttgacactttcatatttattggccataaatgtggccattgtacgctcgacaaacagaatatggccaatgtaaatgatgtatgtatgaacaaaaatcattgtgaactaaattaacaaaattattattattttttatataaaaattattttaccacacaaaaaaatattatattattttcttttcaaatgatagtttgaaacattttgtttgcaagccctttgattgaacttaaaatttatttttgtggctttacggctcaaatggtgcatgcacaaaggatccacggacaaaaggacatacgacaaaagacccacagaggcaaaagtatctacaactaataattttaatttaaaaagaattaaacgaaaaaaaagattacagtcagggtttcaagtcggaaattaatttaaaaaatggatacatctcataatttttgtattttctcttaaaaattctcttattttaaataatatataaaaaatttaaaaaagtggaaattattatgacggattgtgataatccatatttataaaaatattttttaattaataatttacgagtaatggtgtaaaagaggcccattgttgtattccataaaatgcaataatcagaaactgaacgcataatgtcaatgcgaatgtgcagaataaaacactttgaatgaaaagaataaatttcaaattgcgatgcaaaagcgatgttcggcacagaatgccaatgttgagcagagaaagcggaatttggacgacaaaaacgcaaacattcaaacccaaaacaattgggatgccaattttgatgaattgagatgcttctccttggtcatcagcagatgaatttgacattttttcctgaaattattttttggggatacaaattttaggacttatccatttttttagcttcatagcaattagagccgcaaccgaccgggacttctaaaacttagggattttaagtatattatcattgtttttcagtgcaacattctaaattgtttaaaatttccactaaattttcatgctttaaagcataatcacataaaatttcaggaattttgctcttgtatgaacggttttataaaatcaacatgttcaccacgccattcggcttggaccatgtgaagatgtgttttataaatccttaaaattatcaaaaatttgacaaaaataaaaatttaacaaaaatacatgttgaaagatatgaaggtataaaattattctgcttttaagttaacttatagatagagaccgcattttgaggcatatgcctttttttctgcgcactagttccagatttattaagcataaaaaacacattttccgctttgtttgaggcttatgcgttgaattatattgtgcctataatgccttttttggcattttgtaccttttttggccttttttcc

SEQ ID NO: 4309 - DNA, 1485 bp, Heterodera glycines
aaaaaattccataaaaaatgtattaaaattacaaaaaaaaaaaaattttttttcccggtggcgcccgcctatcggcattaccggggacctcaatttagccttattttttttaaattttgattccaaaatggtaaaaaaattagtcatttttggcgaaaaaggctaaatacaaattgctgttttttgctctccggtgctgaaatttcgagaaaaaaacttcgacccgaggaagaattagccctacgaacttttttcaggttgcgttcttggaaataactttgcgagaatttatgctaatttaaagttttggttttaaaaggtcttaaaaaatgtgcgttgaaaattttaaaggcctttttcatgcctttttcgggattttcgtgccttttcatgcatttttttcaattttttggtgcctatttcgcgatttttggcgtgtctttttttgcggtctttacttataattgacgatttttaaaattttaaaaaatgtatatcaaaaaattcactttctcaaaatgaaaaattctcaaataaggcaggcaaaaaatggatatggcgagcgccatccactgacattaacaatgcgcaaatgctaattaatcaaaagccaaaaaaccatggtgcatgccctagacagaattttcattttattaatttataattcaaatgtaaacagaatgaaatgcaaagtggtaattactgacgcagctgaatattccaattttcagaattgagattaaaagaaaattggccggtaaaaacacgttaattaaaatttgaataaatataattattaatttgagatcagtgaactcgattttttttttgagaagaaaacgaataatcgaccaaatcagacaaattactttatttaaaacaatttaaattaaactatttaccaaacaatagaaacaattaaaattattaaatcaataaaatcaaatagggaaataactaaaaaaaaaactattttaatccctgtggcaacaagcttcactaataaatttttaattttctttaaaaaaatttttataaagattagataaattttcgatgcgattgcaatactgaatttttttcattttttataaaaaattaatattttccttttttgtgcaaatctgttaaaaaaatcttgccggcgtgatgacagaagacccagccaaagacaaagatcgacattttttagatttatattttactttaactttttttttgaaaattttgcaaatttttaggattttggaatcctttttacaactagttaaatatttaaatttattctgacagaagaaaaatcaatccgtcagggggtaataaaataaaaaataaaatatataattaaattttttcaaccctataaattgtaatacagcgaaacattcttgttagcattcgataacccttacattagctttttctaataacgcataaaatttcatacagtagaagctctttagattttgtgataagagctttgat

SEQ ID NO: 4310 - DNA, 6421 bp, Heterodera glycines
  unsure (1)..(6421): unsure at all n locations
tgaataaagcactcccaaatataaattacaaatattaattttcattagctcgcaattttattttttttctggtcaaaacttgttaaatgttcgtaataaaatttatagcaaatcttaatttgattacagtaaaaaaagcatgtttttcttgataaaaaatattttcaaaaaaccctgatccgtatacgggtccgtatttttcctgagtacggacttatgcggagtaagggttttatgggtttttagtccgtatgggtgcctagtcctgctggtctgggtccgcattttcgtaaaattctgatctctagtcatgacccaaacagaattggaaaaaataaataaataaactaagatcacatcttattgtttagggaaacccagcgaaaattgttttttcgggattcacattggcattagcataattactgactggtatgtacatatgtgattgacattaatatatgtaattgtgaatacttggagacaagattgttattgaaatcgtttagcgattgatgagatgcaatccgagcatcggcacccatcacggtacttcctttgcttttgggaccacccgccgcagtttagtaggcaaataaccttggtcatcttgaagacttggagttttgtttaactgcagttggagtataagttagggccgctcagaggcaaaaagtaaaaattaatttccaaattttcggggattaaaattcgtataattatctgccaaaattaatttgtaaatggaaaatgatcgttctacgtcgcaatatgtcagaggagcaaatttgtaaaatactgaaagatcggactgatcagtgaactttgaaaccggcgattgactgacggcaattcaaaattccaaatatttttacaattcgggcgacgaaagtgccgggtcggaaaacaaagttttcgacatttggctttcgatttgccgaccaaagtgaatccaaaggatcagcgagagaagtaaaaagccgagcataaggaaaagtacatcaaaaagcgcaaaaggaaacgaaaggcataggcagggaaaggagaaaaagcgaattcaaagagaaaagaaatgtccagaaaagcttgaaggcaattgacactttggccggacggacattccaacggacggtgccgaagaacgaccggtgtgcgcagcggaaagaagaagcgaccggccggagttaattggcaaaggcactctccggcaatggtcggccattatcggctaatttacttgtcccgttgacttgacaaatgcaatgcccaatggcacactctttccctttttctctttggttttccattttgtcataattatgtaattagcatcagcaaatgaatgtgtcgtaatttccgttcttcccaaattacatttgcattttcttcttcccttttccttttctcatttccgcttttttcccttaaattcgtttctttggcatttcatttttgccattcccttaattttccctcaaattcacacactttttgtttgttttttcattttcctctttgcccctcctccatttttgccctttcctctcaattcaatttattcgatgagtttcaccgcactttggcaagcgaacctaacaaatgccatcaaagtcaacggggcaatgattctccccctcttcagttcaacctaattcgatttctcttttagtgcttctgaatcggcttcttctccaatcgcttctcaatttgtccgcttttcctctgccatttcaattttcctgcgaattccttttttgcctccctctgccatcctttgcctgttaagttgtgctctcggcttcttctcctttttggtctttctttcaaaataggagacattccctcttccccctctttccgtgccgtgccgtgagaagcaaaagagggcttcgctcattcttcgcctttttcttttccatttatctttctagtgagtgtttcatccgaatgtttctccgtcccctctctctctctcncctctctctctctctgtctctctctctcgctctctatccgtctctctttctatgctttctctgctacttcatctccacccctctctttttctcgcccattattacctcagtcattccattttttgctcataattgccacttcctttacatcctcttttccttgttaagtccattaaatttccgatttttaatttctttatttttaacgcccaatcttataattgtttaatgcgggaaaagagagagaggcaaataaataatttggtgaaaattggcattggatatgaatgccattggaattacaattttaactcaccggagcgccgtttttaaaagcatttataatggaagccttattccctcccccccccccccccgcttctcctctttttatgttgcttcttcctcttttttatccgttcgggagagcgcaaaagaaaatctgacactgtgaaagtgtgtaaataaaggtgccctttctctttgtcccccattgttttggcctctccccggggggcgcggggactgatcgatgctttcaacaccccccgccggctgagtgttccgtccctcactcttccgggccctcctttctgcccaaaatgtccatccgtcgcgaaactgtcacggccaggacggccttcgctaaaagaatcactcccggcgacagatccaagtccttctcgggcccctccttttctgctcgttcgttacgtcgcaaaatgattgaattggacgatgacctcgtcgtccccggcatgcatccgttcgggcaaacttcgggcggcgccgattgggtcgactcgcccgggcccgcggacgccattcgctgtgaagagccatgttcgcgagtgctgcttaccatcacggccaagtgcttatcttagcctttgtttgtcccgactcgtttggttggcaaactgttggaattaattgatttgcctcaagggatttgctggacttggaccccgacgagtgcatcgacccattttgtaaggtcagtgtgtgcgaggcgtcgtcgatggcaccgcaaaggcaatgggaagtgcttggccagacggaagtgatcggaaacacttgcgatccggaatggagcaccaaaatttgtctgacattcttctttgaggagcaggtaattaagaagaagaagtcgtgtcgaaaatggtcagatgaacgaattcgaaatgaatcagtcgcgcatttacaatttccgtttctgatcagcaaagactgatgttcgaagtgttcgacaagaacagagagggactgaacccggcagtacgaatatacccaaaacgaattggccaatgcacaatgtaacggacagtcaattggccaacattcctttgcttttgttggacaggttactgcacgaaattgtgggcgcacatatgaacagattgaacagccagctgatgtgactggccagttaattaaaaccgaaaaccaaacgcattaagggaggagggaaaagccgtcggatggctaacggtgacggcggaagaattgagcgtaggacggcaagaatcggtgtattttgtggtcagcgggaccaacctggacaagaaggaccttttcgggaagtgcgaccccttcctcaaagtgagccgaatcaacgcggacggcacgtgagcagaacagacggacaaataatgggctcgacagaatggtactgatcaagtttcagaatgcaattggcctaccgaagtcggtaccacgaacagaatctgaaccccaagtggaaaccattcgaaattctcacgcagcaactttgctacggggacagagaccgaccatttctgatcgaagttggtcttctggcattctgacaaggaccaagccaagcactctgagtgcatttcagtgctttgactgggaccaagacggcgaccatgatttggtcggggcatgccaaacgacggtcaaccgactgatgtgcgggatggacaaggaattgccggtaaagatcagttgagggggataagaagaaggagagcaacgaagggggggggtgagcaggggaaggagaagcttagggctatgagaaacggaagagataaatgaggagagggagtaggaaagagggggaatggaacattgaggagaagaaaaccggggaaaggaaggaggggaagagaagcggggggaggcgggggagtcactccgcttgaccacataaaatgaatctttttcagctgatcaacgaaaagaagttgaagaagcacaagaagtacgtcgactctggtcagattcacttccatcgcgtgggtccttcggccgatcactcgtccattggtccggtcacttttcgctgatcactttaggtgttcctttggcaagactacacttttcttgacttcatccgtggcgggtattatcccttttctcatttttgccgttttctcaattcgccgttaggactgagttggatttcaccgtcgccattgacttcactcgttccaatttgcccatgaaggaccaatcgtcgcttcaccgcttcgaccacagcaaccgcccaaaccaatacgaaattgcgatcggagccatcgccgaaatatgccaacattacagcaaaaacaaagtccgatcgctttttggcatttccgctaatcacttttttcagcttttcaatgcttatggcttcggtgcccgaattccttctttggatgacaaagtgcactacaacttcccgctggtaaattatcaaactaatgataacaaaagtgtaataacagacgaacattaacaaataccgaaactgatcgatcaatcacttactttatcagcagtaattacattgttaatccaaattgttggtccatttatcaataagaaactgaccattgatcatttgttgatcaaacaaaaactgatcacccatcaaatccatcttatgtctgtccgttcctcgcctcgtgccaattcgtttcgttcagaacttggaagtcaatgacccgcgctgtcgcggcgtcgacggacttttggaggcgtatgccattgcgctgtcacacgtggagctcaggtggaccaacccacccgcttctgttgcttttcgttttcgcttctcactgccaattgctttcagtgggcccaccgatttcacgccgaccattcgtttggccgctcgccgtgccgcggcattgcccgaaaatggcagtcgctactgcgttttgctgatcgtcaccgatggggcgatcaccgattttgaggagaccaaggaagaaattgtgaaggtatttacaggctgtttacctgcacggtttctcctttcaatcatattcaccgtatcactcatctctgttaccgtattttctgctcagcattcataccgtatgccctttccccacttaccgtgtcctccccccatctttcggcttctgctcttcccctgtccattattgtgatcggcgttggttacgacacctttgaagagatgaaagtgttggactcggacagaagacttctctcctcccacaaaaaattcgcaaaaagagacattgtccaggtgctccccaacttcgatgaccatttttggcatttccctcagtttgtacaaatgcgcaagtttttgccgccccatcgatcgctgactgagcaggaattggccacagcgaaggccaaactggccaaggaagtgctgttcgaggtacccgctcagctgatcggctatatgaaagtgaattggcaaaagggcgacaaaagagacagaaaattggaccatttcagtcaaaaggcatttgtccgcgaccgcccgacgaccctttcactgcggtgaatcaatgcgaaacattggcacaacgatttatgaaatgggaaagtggtgaaagtggcggaacagaggggacggcacaacagcaaaggagaagcagcagtctgaagagcagcaaagagatgctgcgggcaatgcaacagaaaagggcatccgccggtgagtgccccgagggacggaaaaaggaaaagcggagaaaatgccgaaatgagaatggcataaacagtggaggagggagagagagagttgagggagatagtgccgaaatgggattccctttgtttcccatggctttttccatttcaatcccccccccccccctccagcatccaccgtcgattgctcgccacggacttcgccgcgtgttcctcgccgcattttgccgacgcccccggatgaacagcagcagaccgatgagagtgaggaattggcggagggaatgcgcgggacgcgtctcatcggatgaatgatcaaccgatcgatcagtttgatcagccgccattcacacatttcctttccgctttctcatttttactttttttttctttggtacattttgaaaaattttcaatcagaaaatgttcgatattctttcctttcgtctaattggcccattgattttagtgcgtcccatttgcttgttgtgtgcgtcttttgctttatcatgatgctgaag

SEQ ID NO: 4311 - DNA, 2411 bp, Heterodera glycines
ttccgccccttccctccccgatttccttcaaattctcgtcatttctcatagaaatcattccctttgtcgcgtccgtccatttctttgctcttcccatttctatggagtcccgcacctcaaatttgtcagcttccatccatcgccacggcgattatcagctgcgattggcccgctcttcggcctatgtgcgggcgaaagtggcgccaaatttgacgaaaaattttgtaagaaataacaaaaagctgaatatttttagtttagcaaaaatgtccaaaatgtctggtgatggtggacattcgactgcacgccaaatgcccagcggatgcaatttaccaaccgtaccaatgggttttggacccggaaagatggtatgtgtgaagaggaagcggacgaggcaaagccggacggacggaagagggaggtgaaaagaaggggaagaaggagaaggagaagaagcagcagacgatgtttgattactttttgggataatcaataaaaaaacacactgatcactcttggcattatgttttattgccaataataaacattcattcaaattgcacgaggcgttaaaaagccaacgaacggttgttgatcagctgatcaacagcatcgaagcggaagggcagggggaaacatcaacaaatgctaacagaaaagagagagaaagaaagagagtatgacaaaatgagagagaaagtgagagaaagaaagagagagtatgacaaaagagagagaaagtgagagcaagaaagagagagtatgacaaaagagagagaaagtgagagaaagaaagagagagtatgacaaaagagagagaaagtgagagaaagaaagagagagtatgacaaaatgagagagaaagtgagagaatgaaagagagagtatgacaaaatgagagagaaagtgagagaaagaaagagagagtatgacaaaatgagagagaaagtgagagaaagaaagagagagtatgacaaaagagagagaaagtgagccgtgaaagcgtttaaacaaaatgacagagtgatcattgactgaatgattagtgttagacgcttcttcccgaaaatgtgtgggcgtcaaaaaggcgggaaaagagaacagcgattttgtgctccgttggctgatcgctcttccctgggccaccgggtgatttgaacgccctttccgccatctgttcaaaggcatgcattcgattggaatttgaccccggggtcaataagcacaattctttcaccgatcgacaatcaatctcggccaaacttttccttttcggcttttatttcctcaaccattcccgggatatgccaaattcaatttaaataattgtcttttttcgttttgcgttcattttgccctgcctttgtcccatggtcacttcccccctcaccctttaggggtctctccgcgtcctccgaccacaaaatgtgcgattacgcgctcgtccgtacgcgttccgcccttgcgctgtcttcgccctccactttggtccgcacttactccgtgcccaatttgagcgtgtccgttttccctctcctcgctttgtgccgtcattttgctctttcaggactccctactactcctcctactattacccctactacagttggcgcagttattggccctaccgttacagagactactcttacgtacgttttctgttgggttttcctttcctaccgtactggtaccgtttagtctgacctctattcatacgatcgctacagttacttctccccgacgtactaccgttcgctgttcccttaccgtcgatactattacaggtgaggggaaggggggggggcaaaagcaatcggacggcttcatcaaacactgcctttcagcgactacatcagcaacccgtactattggtcgtcttcgtactcctattggggccgctacagaagctatttgtacaattggcggggatatcgtaataaattgcacataccgtacacttaaggtccgactacgattggccctcctattacaatcgctggtcagttccatttgaatttctgttgcttaaaagtgtgttgttctctttcaaaaggtactattattggtaaaggtacgacccctactacgattcgtattcgcgcacctaccgttaccgctcttggcttctagacagtatccaaatttagcggggggggggggcactcgagtgaacgggtgaatttgtcctttcccaaggtatggaggacagcctgtcgaagggattggcacagtatcgtcaaggggtcggtccacaaaattcgaaaatccgccaatcgaagtccgctcaatgttcagaccatcaactacaaccagctgtaccgcaactggataacttccaacgattgggacaagcgaccacaaagactgggggcaattgtacgcgtgggacagagacagccgaaagccggagg

SEQ ID NO: 4312 - DNA, 1648 bp, Heterodera glycines
tgctgatcggataaagaaaataaataaatgcaacggctgtcagctgtgatttgtgctgactgaatgcttcccctgtcttttgctttgcctcttctcttccactcactctctcccctctatttctctccttcactcccctctctctcctttctctcactcccctctatgtctctcttcactcccctctctctctcctttctctctctccccctctctttttctctcttcccaccctcaaaatatgttcgtttctttctccctccctctccattctctcccattttccccgtttatttgttctttcctttttccctcttttcttactacgagttcaatagcatttctgaactgatttgatctgctgattggatctttccgttgattttgttctcttcctccaacatggtgttgatcgccagccgcaatgttttggccggggtcccggaaggcggcgcttccgcggtgatgcgctccgaagttccggcaccgcacgcggtgagtgactgttaccgtagtgcaggtgcctgttttttcgactgtcgcacgccctctctccccttctctctctacttctctctctctctttcccccttctctctctctccccttctctctctctcttgtgctctctctctctctcttgtgctctctcatacgtccgtctgatcagctcggccgttcgcgctcgcttgccgatgtgttccgctccaactcgcgctattccgagtcccaattttctcccaccgttgtgcccatcggaatgccgtcgaagccgatcagtgtccatcgaccgtattggacttactccgcctattggccctatcgataccatcgaaatttcaacacttacgagtcggttaatattattgaccattgctttttgttcaattgggcaacaaattcagcaatcaaatcaccgattccttctattggcattaccctttccgcctttggacatcctacaaacacaattggtggccaatttggccaattagtacaattaaatggcaattttaaggtaccaatacgacagcccctattactatcgccgttaccatgacaattacaacattttctacaacactgaactgatgtcatacggtaacagagggaaacggttacaaaaagaggaaaatgcaagtgactttcaggaaatcggtcaaaactgatggagaatttgtaccaaggaacgccgatcacacaatgaaacgattggaacagagaagaagagacagaagagagagagagagagagagcggaaaaggaaattataagacaaagaaacaaaatgccaacatttttaaaaagattcaattgaaaaatatagcagaatattgaggatgaaaagaaaaaaagaaagagtttatgttaaatgaaaataaccaggaaagtagacagaagaaaacccacagcagagacagagaaaaagaaagagggagagagtagagagatgagagaggaaggagagagagagaaagagcgaagaatttcaatttccacagtgatcaattgagccagtgagagaaaattccctaagacataatcataaagcagaatgaaaagccgagagagatattgcgtatcagaaaagcaaaaaccaacagaatcgacgacggggaacaacccccccccccgtaaaggacacttc

SEQ ID NO: 4313 - DNA, 984 bp, Heterodera glycines
caggctcacaatgcatcgcgttttgatggccattttgtgctaaaatatctaggcgaaacaaaacggcgcccagatgttgttatgaatggactaaaaattttcgaattccgcctacagcattcgcgacgccattcgctgctcacatggcgggactcgtgccttttgatgccaattcgtcttgaggatatgcccaaaaccttcagtttggactgtgatgacaaaccgttttttccctactcattcaatcggcggtccaaatttgtaaagttgattattttaatgatttaatttagagaaaactatggtgtacgcctgcaacatttgccgcaaaaggacgactattgccctgggtcaatgaagctggataaatatgaaaaatttgaaaaatggtatgtgttggttaggtaatttggaactttgtgatatcggcccacacaggtacgatatgaacagaaacactccgttttttttgccgcacgaacttcgtttgtactgccaaaacgatacggaaattctgctctcagcgattgttcaatttcgacgcataatgatggatgaggttacgaatggatttgacgtgctgccgctcagcgccacaatcgccaggttccgtcgttaacctgtttagcgttcagcgaatctgagtttttctgttcagcgtgtgcatgactatcttcaaaggacaatttttgaaagaaaaacagctggccattgtccctgaatgcgggtacgagcgaaacgaccgtgccagcgtcttcgccatcaaatacctcgattggcgctcaaaaaaggacggcattcgaatacaacatgccggaaacgggcttgaaaagcgctggcggcaattcaggctggacggttgggtcgaggaacataataaatgtattgaggttttgggttgctattggcacggttgcgaacattgctttaacccgacgacaagctggccgacggaaaaacgtgcagagaactcaacgaattaac

SEQ ID NO: 4314 - DNA, 2627 bp, Heterodera glycines
  unsure (1)..(2627): unsure at all n locations
caagggacccggagatgtgtgaattttttgccttcttaggaactgaccgagggccgattgaccctcgtcacgcatactacggtggaaggactgggccgctgcagctgattgctgagccgaaagaagacgaaaaaatttctgtttttgatataatctcgttgtatccatgggtcaattattccacagactatccggttggcataccgtctataatctacccaaccggtgcggaaatgatagtcaattggacacggcctgaacagctacagtttcttggaatctaccgcgttcgagtgataccccccgaggacttcgaatacccgttttaccgctcaaaattgacgatcgcctccttttctgctgctgtcaccattgtgcctcaatgtttcggaaggccaacacgcgtctgatccataagtgcaaacatacagatgagcagcgtgcgtttgtcggcaactacacacacattgaactagcacgtgcactggaatcaggctacatagtggacagattctggagagcgtggaattatgaggaatggtgagtgcgtgtgtgcaataatggggtttatattaatgatcaggagcgaccaaatattcaaggactacgtccgactgctgataaaacttaaggtcagtgcttcatcgaccctgaaattatcttaataatgtctgctgaagattgaagccagcggttttcctgacggtgtggttagtgttgaacagcaacagcactacgcagaagagtaccggcggacatatagcgttaatttggagctcgaacgtgttcgaaagaattctggactacggttcatttcgaagcttatgctgaatagcctatggttttctttgcgctctattagctaatttttctttcttcatttaggggcaagttcagcatgagaaatgagctgggtacgaataaagtgttgaccaggccacaagaattttacaacataattttagatcataaaattgtgagcattaataagagatagtttttttctcatagtgtcttagaaagggaaaaatcttttattttatatcttaggaggtgtcagcaatcatccctttatcggatagtgctgtacgtgttctttacaaacacaaaaaaaatttcgtcaccgaacactcatccagcaacatcgtcctaagtttatggactacaagccgcgcccgccttaaactgctcgactttatgactcaaattgagcgaactgaaggcgcaaaattactatacactgtttgttctttatttttcaattctggaaaaacagaaaagttataggataccgacagcgttgttgtgctacacaagcgtgacattgtgccaatacaaaccggagaatatttaggtcaaatgagtgaggagtacctcggctacgacatcaaaagttttgtatgcggaggtaatatttttgatacttcaactttaacagaagcgaatatgttctaggcgctaaacaatatggttttcgcatgaaagacaagcgaactggaacaattgaatacatcataaagattcgaggcataacttttgatgtcaacaacagcaaagctctacagtttgagagctttcagcaaaaggtggccaattacggtaggaatgtcaatattggccacacacaccgttgtaacgatgccgatgacaacgagaatgacgcaaacgtaccttcagtatttcactacaacaaaataatgccgacacgtgatagtcgtgttattacacgagaactgcgcaaaaaatatgtgccgatatgccaaaaagggataataaatgagcagtatgaagtcttgccgtttggatatgaataaaaaacgattatgattttgctcacaatttcttcatttactgtctgacctcagcaaatacattgaacataactcgaaaagttatatctatttttgtttgaaatcacagaagaaatgtccgacaaaaatggcaacgccgggaagagcgacgacggcaatggcagcaagaaaaacgtcggaaaggaatcgaaaagtcgaaaaagaagctacccgcttcctctactttcgtgtcgagcgcggcaaacttggtattggatgtcataaagaatagccaattcttttttttgctgtagggcagaagcactcgacaatatagaaaaaaaatattcaaaaatggaagaggatataggcggtgaggagagcgacaacgacaccatcgacttttttgcggacagcgttgacgaaattatggaaaagtatgtttcaaaaaaataaattggctttgtgataaaaatattgtttcaacccttaaaagaatccatcgatcggaagagaaggtgaaaaaatggatgactacgcacggccgcggtgaagccaaggcgaccaacgctgagcttttgcctgctgcggccccaactgttgagaaaaacgattgggattccagcaatagtgagaaggatgaggatgagccaacatcaacggtttacctagaccgcaaaaaatcttagaaaggaaatggatctagaatctccctgttgttaaccatgaacaagtacagtgtattcaagtaaaatttattctgcaactatcgtatgtatgacaaantggtgtgataaggcaaaaaagatagacaatttatcttttttcgttttgcat

SEQ ID NO: 4315 - DNA, 7269 bp, Heterodera glycines
  unsure (1)..(7269): unsure at all n locations
tatgtcaagtaaaatgttattgctcgcaactactcttatggatgacaaataggtgtgataaggcaaaaaagatagacaatttatcttttttcgttttgcatttcggcattagcgactcgtaacaattcaatgggaaataagtcacggtgatagccaccgccaaattggacaacacagggtaaacccggatactttagcgtgacacgatggcgagaatagagatgttgctgaacagtgattccgaggaatccgcgataggcaaacacccgattagcgccatttggacacaaggcgtccgggataactttgatattcttcctaagatgagcagtttcaatgtccagttgattaagataagtgagattctccatcctccgtttctgtagctgtttagcgagtcggtagggaccacagttgttgaatcggcacagcactctcaccaagttgtagtctcgttttcgcgttcgtcgtcgctccaatagttggatagatccagctcgtcgactatcaggttcatgttgttgttgctgttgttcggtagttcgaaatggcgtgatagacacagcggcgagtcgcccggacaaatcttcaggtccttcagctccacatacagaggttcgctccttaaaaatgcataatgacaaaaaaaataatgtttttttgtttagttaacttaccacactattccctcgaacttcctcttcggataacatgttgagtacagctcaacgtcagcaatcaattcaagcgagccgtcaatatgcacaggttggttcggatagtcttcgtttgaaatgtgtacgcagtccacagcacaaagggggttgggatagagacaattcccaccttcaggcccacttttaatttcctctttcaaacaggtgtacagatcgtctacactgctcagaccgtaactgtcgatcagataacggattgccctttgcatgcaataaccaggtaaatatattgtgacaattatggaaatgaaatagcttttcttaaaatctaggaaacaaatggccaactgaatccaaacaacaaaaatcgttctttaaatactccgagtacgggctccaccactttgatcactcgctgttgcagttacatacggtatattcaacaattgttgatgttgggatgaataagcgtcgtcaatgaacgggctgctgtaataatcggcgctatcggacacgttaagcggactctttcggtccactcgtcgtagctgtttaagtatgtatgtgcacagtactattaggaacagattgaacaggtacgatatcggtatccaggcgtccgacatgcgtagatgagcaaaaacgccgcgactagcattttggtctttgggtttataaattagataattaaagcggacgtcatttgaattggttacaaaagttagcgcacgattcccttttgcatagtcggcaatgtaaaatttatagatgcgctggtctctgatcacaaacacatggttgtccaccatagtaaagtcgcttttatctggtggaagaaaagcgacaaagttgctcttcaagatcgtatgggcggaagattggttttttcgaagccaccaatgctccaggtattcaagctctatttcgctaatccgcctctgatacttatcgatcagaaacaatcgacccgaaaggtgatcaaacacaatccgtccatgtttggacagtcgttgcacaatcttatgctggtgaccacggaagatagtagtctcaccagattcgctgtcttcaaaaaaggtaaaactatgcccattgtattcaaaacaggccaatggtgacattttcaccaatgatttcatttcgaaaaacacactctgatagctgtgtaaagtgtacacattttgaagtgaaacggcccattcgctgtcacgttcacatttctctattcggcacgctgtattccaactataaccaaaatgttgtgctgctgtagcatcttttgaaaaggtacgatatttgccgctatcgaaatagttttgattgtcaaccgtcaaatccacatttatcagctccgattgcaatagtgacggtacacggctgaggactagacctgcgtaaaaaacattcataaaatgaaccatcatttttctcactgttcaggaaacgtgagcttttatagaccgctgatcaagtttctgacaaaccatttcacgaggtaatctgccatgcctcgagtcttacgcaaagtctcaatcacacggcagaaaggaacgccagaacatcggcttgccaaaaaatatacacaaaaatgtccacatgtatcggatatgggaaattgaatttgctccctagtgaccagtacctctttaaatgtgttgaggtaggctgctaaatcggggtttgggggctcaccaagactgtcaaaatattcaacccttctatggcttaaagcatagcaagccacccaatgttcacctcgtgtcccttctttgtccgtattcacgaccatacaatgagggaatttggaaacccgcttcggaattcgatcagatgggaaaacaccaatgaatttgttcttggtagggtgcaatcttttcagaattatttccaattgagctgaattcattgttgcttttcagtgtcaatcagtttcagtcagttacacacttccgtctgtactcagaacccggtctgcgttaatggacaacacagaatcgaattcaccaaggacaagcatctcatatccatccgcttttataggctgctcaaattgtacctttatcgtgcatgtgccttgcctgatcagctcaaaaccaggtgtgtcctccagagtggaagtcagcggaatgacgaaaaaggcccaaccgttaagaaaacgctgcatcccaatcgagaccgtttttgtgtcggagtcatccaaacccaggcctgcgtacatatcgacaaaagcacggacaaagcggggctgtacaccatcgaaggacagcaaatacggggtgctgggaaaggtctgtccgttcgcctcaacactaatcgaacgtacattggcgtgttcaaacttgtagggtgacatttttcggttaccggaatatgcatcggttgaaacgaaagtgcaaattaaacgacgagttaacgtagaagtgaacacattgtgtgccagctcggtccggcctgtgccaagaaaaatggacctcatctcaattttacgcagcggatattttgctgaagtggactctaattgtcggctaatggcaaggttaaggcttggtgttacgtccacagtgcgtacatagagacgcatgtcatgcacacggatgcggtactctttcttattttcctgctgtgtaccatctggttttttgtatggaggtgtaagcaggaggaatgaatcattgttgcggtgaatggtgaatattacatcctgattgttcaacatcaatgcactttgacgtgccaaatcaaaattcagttttaccattgtctcacactgtttaccacctgaaaagcgtgccgcacgtgcggtaaaacctgggtttgttgcgctgttctggtcatcatcgtctgcgtagtagcacgatgcctcatggaaagccttgcgaatttcctgtgaatagcccaactccttcattatgtagtcgcggtagtgataataaattgaactgtcaaacacctcaatgcctgaaatattgaccttcagcgagcggacaaagctgctagcaaagttttgaatgacgccaacatgtttatcgtttgggtccgtgtcactgagtgctacccattctcccgcgtcattcttccgttcaattgagctgagcaggtacatataggttttgctcaagtcacaaaattggctgtccgagaacaggcgaaacaaatagggacctgtctgattaagtgcagacagaggcaacaattcacggacgtttgtcttatttatggccacattggttggcggcaaagagaataatgacagacttccttccagaccctcaacactgtctttgtcaatctttttaattacgctcattttccactgagttttttggttagtatgtttctctcaaaatatttaatgtatgttgctgagagtgtagtcgttagtggaaaaaattaaaattatcctacctatttataggcttcgtgtggtgccgaatgttaatgtgcaagtgttagctgatcgatgatctgtcgtttccctctcaatgtaccagtttttttattttttctatgagtgattgtcttgtgccgttgccgcccaccctttccgcattggttgagcttttcggccagattctcaaatccttgctttgcctgagttttgagagactctttaaacgcctttccctgcgcgagatcgtcaagcatccgtgtccctgcggaaatgccctcttttgaggcagactttagcaggtttgtggctacaggcatcaggaaccgcgaaatattttgtaacagaccgccaccacgctgaaatttattgcctacaaaatactgcagctcaccgcttccctcctgctgctgctgtaacgcaaggaacgcggaccaattcacgttgtccgggttaaaaacaacgtgcgtcataactatcgttttttgttgctaaaatagtttttgtctaaaatgtaatgtgattacggtagttccccaaccaaattttacgtaacgtccaaatgctgtctgaatttcaatgttaatttcagaaatgcgtttattttggagagaatgaaaaatttcattggtatatataacctctggcatgtccaaccctggtgtccctgacacgttgacaactcgcagcaacggtgccatgcggtcacctatgatggaatcctccaccagtttaggcgcgtaaacgtacagctgacggacaccaccagacagatcaggtggatattttgccgactgattgttgtaaatgcgtgttttgcgatcaaaccccaacacataggacagctgtttgctcaaatcaacgtgcattactcctgggcccattctaatgccgaatcgctgagttatttcattgtaagcaaattcagctgccattttcgattcacgctgttgcgacattagctgtccatgctcaccatgtagcacttcttcgatgagtttatatgttgaaatgcggtgttgactctcgttctctttaccttcttcctgtagcatcttctgctgtgcatgtgttccatcgaccattcggtccacttgttcgtcgatcagcttttcaattattttctccttccttctctctgtcgctaccgttgattgtttagcaacaatttttgggttattggaggtcaacgcggctgcttgaggtaaatttcgaccatcttcaacttgagtcactgatgtagcagcagcatcggactgtcctaatccacttgatggcggcggcgtacctgcttcgtctttctcatcaatactattatcttgatctgctaaaatttgctcagctggcgtctcggatgataaagtagcggtggcagtagtagtgatgttttgttgggtggttgtttttactattggtagcattttcttcgtctgggtttgcgggctcatctgctggtgaaaaggagtctggtgnggtggaactagtactatttgacccctcagctacagcactgaggcctgagttagttttccctgtctgcgcatctctttttttagcctcgtattccaaagcggcaaaccgtttacgcctgtagtcaatcagacgttgaatgctctctatttgtcgctgcagcgacttcctttccgttgcgtcagtttcaaattcaagcttttccctcaattccctcttcttggtgtactcaagctgaagcgcttcataatttttctggattgcttgccaataattcacgggattggtttggaagaattcctggacgaaggtcaggttttgttcatggcttgtccgttcaaactcctcttgagaccttttctggtcacgttgcaatgctgcgttgtttaatatttccatctttctttcaaaaacgtgtatggaatttctcattcgttcggtttgcgaattgagctcttcaagccttttcaaatctttaactccttcatactctcccatctttgtttgtagatctagcacatctcggaggtaacttgacctccattcgtccagctgctctctataattgtcggggtatcgggcaaagaaacggtcaatgagtctttgttcattggcttcttgctgctcaccgtcccttctcttcgcctcttcttcaatcaaatgcaaacgttctttcagaaaagtttctcgcccctgaaaaaccccaagttccgttgagagaaatgtttttcgttcaccatccactgttgaattgtactcctttgccattttttcaaccctttctctgagctgatagtgcttttttctcagttctccaatctgttgccagtagtcaaaggggtttcgagtgaagaaattctctacttcgataactccagcgcctgtttctgacaattcggtttgtcgtttggctcttttgttggttgtaccatcatttaatgatgatgagccgccaaactttgtatcgtaagcattctggattatctgattcagtgttttttgtaaactttgtacactttggaattgtacatttggaatcttcactgataaattgataaacttttgcgattcctcgtcagaatttccggcatcttctctgtagttaggattaaccagtttgacagagatagagtcatcctcgtccacactgatcgacgggaatgaatatggatagattaatgccgataatgcgacggaccatttggagtcaagctctaaagtgtgcggaagtctaaccgtaaaatttgaagcagtatttcctggaccaggtgtgttcgagggaagtacaatgtaaaaatcttccattatttagctttattcaaatgctcgacgtttcactaggtctgagtcacggacccagctgttgtatttgtcagacaagccaacccaacggacgaaatgttctttgactccgtttcgtgtacgcgattttagcacttctgcgcgatgggtaccgttttccgttgtctttacaagttcttgatcgtagaaaattccctttatgtcttctccgttcaaatcacgtattctgtacgagtgcgggtctgtgttgtttacacgttggaccctaaaaagttcgtcggtaaaattgggatagtaaccttttgaaaattggcctttctctttgctaattcttacaatatcaccaaatttgaattttgtgtttattttgatttccttttcatcagtgtgttatgtatataggcgttttcttaacgtcggagcattcttaaa

SEQ ID NO: 4316 - DNA, 5350 bp, Heterodera glycines
ttaaatttccacctgaagtgcattgccttcatgcaattttcgcgccccaaattaagcgcaattttggcaacgaaatttcgcgaattttaacattgtaaatgagcaaataaccggtgatctgaaaattaaaataaatttttaattttaaatgaaatgtaagtgatcaaaaatacgataaatattaaatataactttattttttaatagtaataatggcaaaattttccaaaattcccaacctcctccaaatgctccaagaaatgaaatggcgcgcggtcggtgagacgctgcgcgaaagaagcagctccgtctttgtccgacgcgctttggttgttttgtcgctgtacgtctcgtcgtacgtcgtgctcgtcgacgtgcgtcagctccaaattgccaatcacgcgcctgcagcgcgaatacgacttgcgcaatcgctcatagtgtcccatgccacgtgccacgctgattgtattccgaccattttccgagccgagacaaactgtaaaagcaaataaacacaaagcaatgagtcgtgataatgttcgacatatcggtctcggttttcgagctgggaaatttttcggattttcgatgcccttttgtcggtgttttgaagcataagcctgacaatgtcgaacccatcgtcctatgtcaattttgggcaataaacaaagacacgctaaacttttctacgaacaatgtccggagagcaaaactaagattttgtgctcaaaaaataagattttacaaacaaaaggttgacctgttttgcggcacgctttttcaaaattttaaaatcaaaaatttgtctgtgttttcccttcagcgatggtagccaagtgagaaaatgtttgttaaattcgcatttttggaggtcctgtgttcaaatcgacataaattcggctggtttccttgtcagtctcgggctcaactttcattccgactctcgagcatctctaatcacaaaacaaaacctctttatttttttgcctaatttaatttaattgcccacaattgtcgccaatgatttttttaaatatttttgtgccttttttgcttttattagtcgcgcatttatccctgcttggttttttcctaactcaccacattgtttttgcactttttcctcagttttagcatccgataagggggacagatgctgccgattttgttggtcaaaaaaaagcgaccgtaaacggaaaaatgacaattactgtacccccgccccattttgttagtacggtaccgttttgtatcggatcgtatcacagagagacatttaaatgagggtgatgtgattattttgtttgtaaatataaaaagcagaaataatggcacactaattgccataattaatgcatcagaaataaacttgtaaatattctattaaagttgcaaaacgtaaaaaaaaaactttgttgtaagttttttttcgaaaatcgatccgatagtctgacaaagatggcacaaaagataagaaaacattttgagaaaatggctgatggtggccagcaaaattatatttttaaaaatagattttttggattacaattttttcttgggcaacaaaataacatttggtctaaatttaggccaatagcgcagaattgtaaagtttttattgccaattgaacaaaaatgtgctgggcttatcccactcgctgctgtttttaagccccgaaaataataaaaatttaatttttcagaaaaataatttaagaaaatttataaaattaattatctttaaaaactgactaaaaaagataattatcaaaatattcaaattcaaattttcctggaaaaataagaaattttgcattattcgcaatatgtgacccatttcgccctataaaattggacgatggaatgaatgtgggagagtaaatcgtcgccaaatgaaaatgccattctgttcggcactctttaagcccgacccattaactcacaagttctcaattggtgccgttccacttcttccgtgccgcccttccgcgctaccgtacgacttgcgcctccagcaccgtacttctttgttgtgagtttttggttgccttgtttcttccgctgtgttgtgcttccaccgccgcgacgtcgtgccgcatttgatgaccaatcagtgatgatcagaaaaatgattagggaatggacaaagtgtcggtaaaggaccaactgcagaaaatgccgaactctcatgctaaacagaaacctaaaaaacaaacaagtatttcggttttgaaaacttttaaattggagtttgggcaggaattatgagaatggaacgatgagtttggcatgcaaaagccgagtgccgtattccggccagagacgcccgggtaagtccaaattcggagtatgccacggactcttcaggacgctcttagataaatgtaaaaaaatggtgatcgatacacacaaacaaacgataaatttgtgcaacactcacaatgacaaagtgtaataaaatgtttcgagaattggccgatcggctgattgtgtgaggtgactgagtggggaggggagagaagggagggggcagtggctgctccttgctgccgctgctttacgtattcattgttagcggttggttcaccgccgttttccgatggatgagctcatcgttcgcttccgcaaaaggcttttagcccccccccccccccgcccggcaaatttaacggagagcaaagagcgcccgaagataaaagcaaagaaacaaattaaaatatcatcggcttctttttggaatgaatgatccttacaaaagcaaaagaaaaggccgtttgaaatttttgtaaaaagtgccagtaaaatgaaactgaaatataagtagtctttctctgttttggtcagaagtgattaattttctttttattttgggttgaattttttagtttaatttttcgtcctgttactctttccttacgtttgatagttaatttggtttttggtcattgttttaaacttttagttcttttttttttttaacttttttttttcctttttttttttattttaatttttgattttaatttgccgagtaaaaagtgaggcatacattttgaattttaaatttaaacatcgttttacagtgaaacattctccaaaaaaaaaacccccctaaaaaagtgtgttttaaatatgttaatgacggcattacggaccgaatgtttaatgccggtaaatgcagcccatgaaaactgtccattggagtgtcaaatggaccgtgggaagatgggaaggtcgttggagtattatccgcctaaatgggcacaatgggcgcatttaccccccacgggggaggaaatgagatgagtttggcagcattcacctggggcgggggcgggggggggtgatggaatgcaaaataccggaaaacggaacggaattccgacaataagtcagacaccaaacaacgggtacggtaatcgggaaaaaagcgacagtcagcagaatagtacgaatgtgtaaggaaaaatcagtgatattgcgcttggaaacagaaaatgcaatctttacaggagggataaattaagaaaaaataaaatattttattaaagatatttatcgacaaataaaaaaaaattgtccattgatttaaaaaaaaaccccattaagcccatcggccaaatgaaggcggtggcataaaaaaggggcggaagatctggcccgaaaaaagtgaatttaaatggggaagaagaaaagtcgcccgcggggagaggcgggcggggaatgacatgggaaaggccaaatttatttgttttgtttggggaggggggaaatatgcaaatttatagcaaattaatctcagagtccgtttcattttgcttttgttttcagaaaaataatttaatttaatttttcaaatttgtgggaaaatttattttaaaaaaattgaattttattttttttttaatcaaattttcgctatttttctcaatcggttggcatccaaaaatgaagctatgttctgctgctgctgccgatgatcatttttgttgaacagttttctcagggtgacttttggaagtgatgaatgatgaatgacggacgaccgatgttttttgttttgtttttcccccaatgtttcccatccgcagcggcggtggcgttgaaaaatcatcggaaatttttcgttttcatttgcgatgggtccattcactcgtccgtccattcattgcgtccattttcgaactttttggacggcgaggagagggaataattagggagaataattagggaccccactctaagccaaggacaattgggcggggggggggaggacattgacaccaatgctgctaacacaaattgtctttggttttggacgatttggacggagaaagatggacggacaacgaactgtttttggagggggggggggagaatgaagaaaattaagaattaatacggcacagaaacaaattcggacaacacagaatagaatttgtggggacattctgcgaaagggaggccaaagacaatttgtggccaaatcaccgagcatcggtcaagaaaccgtttaataaacttaaaatcccatcccaaaaatgagcatgctgaaaaatttcaacaatttgtagtgcagagctaaaactatttgaaaattatttatattcaaatatcgcatttaattttaaagttaaaaaaatcgtaaaaatatttgaaaaaaaaatccgtgcaaatccaatcattataaataactgctcgctcctccgccgtcacatgacaccaaaagcgaaaaattgttcatttcctccacttttatgggcttatttatttatgacgcactgaccaacaaaaagtggatgaaaagcagaaaatccattcaatattattgataaataattaattcaatttttgattaattcatgggtaataaaaaaatgattattaagactcaattatgtgatgagaggatgaaaaaaatgaacttaaaaaattcgtttgtcaagtgcactgaacaaatgattttttcaaccaaattgcaagttccttaattaagtaattgaccttttcgagtttttatatgtacgaattcgtatggaatatggagcgaacacatgtagaaatattgggtcaaaaaatggaactatttgtaacaatactgaaaaatcaaacagagaggaaaagcaacaagcaaaatgggataaattcaaatatttttgactgaaacaaaattaaatagattttcattgattttacatattattcataatttgacgatttttattagagaaggattaaaaatataattaatgagaatatattattgactccaaaaagcaccgttgaaatacctttgaaagcatagttgtacgattgtgccaagagagtcgctggaagcaattttgct

SEQ ID NO: 4317 - DNA, 2956 bp, Heterodera glycines
  unsure (1)..(2956): unsure at all n locations
tttcacgaggacgtcaaagtgattagtcctcctcccctactagcggattgtcacgctgatgaaaatggnaattattcttacgaatatgctgttgccgatgattcaccgccgggcgttgaattcattggacaaaaatttgatgaaaacgaggcaaagttagatgagaaaaatgaagaggagaaggaaaagcattggatgcgcgagaaaggttgggatgggactagagcggaggaatcggaagaagatgaagcggaggcatttggccaatcgagaatgattgggtgtggacaaacgatgtttcacagggtaagctgttttctaagagtcagtaatagtgagtggtttatttcatttgaaattataagcatgttccttgatttttaaggtaatttcatttccgcttatttgaatgcaggttgagtatggtcagcaatcgccaactgctgattggccatgggcagcgtccgtacggatagcttgcgaaacaaaaggctcgaacaaatctgaagttcaacaggtgtgtaccggcgttttggttgataagcagcacattgtgacagcggcgcattgcttttaccttccgattcatgaggcaaccaaatgcaaagggaatgaaattggcggagcagtgcccgagggcaggtagagttaattttatcataattcaattgccgtggcaaaagctgtggttgcattttgttggccaaaattaaaccatggtaatatatggtttaattttaatcaaggttttaaattataaattagaattgtataattattaatgtgtaaatattttatatttttcttattcagctggcaggtcccgtttgaatatgtgaaggtgaccctcggcggcaaagattggcagcactcatccggactaagcataaagtcattctcaaaaattaaaagctttcactcacatgcgctgaacgacgacataggcgtaattgaggtgcttaaaaattcaattaaattttaataatattttttctttttaaattcatttgaaataatttaatataatttggtttcaaaatgaaaatttttatttttaaaataatatttacttaaaaaaggaataaattgttaatttaggctcctattacatttagttggctgatccggtcgtgttcgatcaccgagtgaatcgcatctgctttccggcggcgtacactgcgcgaactggacatttggcctatgtgttaggctatgggaacacgttcgggggtaattttaaagaaaaatttctaaatgggaatgtttcttttgaattaagcacgtgaaaatcacggcactaagcttaaagagacgagctctcttcgggaagagctaattcagctccaaattaaacatccgtgcccaaagaaattgttttgcactcaacatgcgacacgccaaacggtgccggttttataaaatcactaaattataattaatgaaataattcaaaaaattttgtacattctgattaatattttagggtgattcgggcggacctttgatgcgcgagtacaggggtcgcttctatttgatcggcattgtaaaaggacatcggacggaatgccaaagccgaagtgagcatcgaaacatcaaataatgcaaaggactaatatattcatagtctttttagcttgtttcactcgtgtgatcccgcattgtctttggatcaacaaagttacgaagggccaaaccatttgccaaggcatcatccgctaaatggagggacggaaacggaaaaaacactgatcaaagaccgaaaataaataaaaataaatttgattataaacaaaataattggctataattttgagatagtgcttaatgtcctttaattgaattcaaactatcaaattaactttgtaaaaaaagcagaaaaatatttaatcaaataaatcgaaaatgagcctaaaataaatttattttcatttttactgagttcaacaacggagcagaagttggaactggtttaaacctaaaatgtggtgaatgcgtgcggccgatctattgggctccgctctgctgaccatgccaaatatgatttataaccctagaatatgtttcctcatcataattattcttattatattattactggtatgatgaatgctctgattcaaaatgcatattgtccataaatccggtcccagcaaaaaataaataatgcgccngaggcaataagcaaagaaagaaaggcggcttactacngatcaagcacacattgcagaaatattttgggtgtttcggcgattaacaaaaagcccatcactaagccatccaccccaaaacaggaccacccccgggggcgtgaggggggaggggaagaaagggttcgttgtgtccattccatcgcccattttaagccataaaaagtggcgcgcgacgggcgggacggacgccttttgctgcttctcttgcttgttttattagcagcgaatggatggataaagcagcagccgaagcagcacaactgatggacttttacgggtgctcacataaaatccgccgccgtcgcacgaatacaacaaaaatcccttcgcccgtcgcccgttgcactttacgagtggcgcgggtccaaagactcccgacgacggtgagccaacggccgacgacgcaacggttaatgacggaattttgggtgcgtttattgtcccgcctccggcggccctccctttaaaagggacggagtggcgacgcaaaggacgggcaacaaaacaaaacgccaaataatgctgcacaactaaccacaaaagaaatgcgacgatttttccgttataacttttcccgaataaaccgcacaaactcggaaattaatgaataacggctaattgctgtcggaaacatttcaaaaattaaattaaaatgttctatcaattttttttctctttgcttttaaattttagggcttttgttcagatgtatccagtggattaatcatttaactttaggctaatat

SEQ ID NO: 4318 - DNA, 6601 bp, Heterodera glycines
  unsure (1)..(6601): unsure at all n locations
ctttttaatgcttttgttgaggggcccaagccaaattgttttttttatggggccgaatggacagctccacccgtcaaggatgtcgacgggctttatggccgtatctacagtctcatgggttctctatctggaatttataaaaaaatggttagcctctctggtcctggttgttaagcaaaaatgtgtggattaagagcaaaccgcctgaggacgctttcgtgatccgcggcatctgcgctccaatcggcacgtccgctttctgtatgcatagggaggaagagcactcttaccacctgaattttaattttggtccctccccaaaggtgaatttttgagttcttttgtttctcctgcatttttggcttcccaattagttgtggttttttgtggcggccgagctcgagggcaaagtgcgcgagctgggtcagcggttgtttggtgctcagtgggcgaagtgtgccaatccacttggacacatttcgtatcttttctcgcctgcccaatttcgagatgccggaattccgttcgaaatgcagttgcagaagccaggggaggctattctcaccgtggggctccattccggaatcaaccttggcccttctgtttgccttgtggctgaatttcaaagtccacgttcagtggcacgtttcaagggtccgattttgtaaaagatagagaaaatgttaactgcctaattcagaggtgggaagatggactcggtgcagttgcaaggatcgcgaggcttatcggttcaccaagcagcaggagaccgagtacttgcagttaactcagtaaatctcatgttttgtgtgccataaatagataggaaaaaaaaattgcaggtccttggtcgcttccgaacgtgccaccatggcctggcgaaagcatgatggttccggaaaacggcaaaaacccgatgccaaccgtctcgcagagctcgcggcacggaagcgggaacaaagagcgagacaaaagaaagaggggcatgtgccacaaaagaaaataaaagaaaaggataccattattaatttggatgacattgattttgattgagtaaagggaagagaggaaaaacaaagtgaaaaaataaaaattgaaaataatcaattaagtttcaataatttactaaatgtttccaagttctcgtcctttttctaaggtcatactttcttggttccatatccgttttttcattgattttctccgcctcggcttcaatttctggtcttttttccggccctcgggcttggatttggtctaagttctcatcttttcgggactcggggtccatttcattcctaatttcagacctttccgaactaacatcctccacgctttgtgtatgttcaaggcacttttgctcttcaattggttgcattggcgtagtgcacggggggcccaaaatttcgaagcactttttgatttgatttaaatgaagtctttttgggttcgaatttggcgaagtgcaactgatcacagtaacataaatgccctcaattttgataacccgaaaaattccgcgccacggtaattgaaattttttggatgttcctacccgtccgtcgtagtttctgatcagcactcgatcaccaattgtgatttgttgtggccttgcctttctgtcatattgttccttcatttttcgctgagcttttgcatattcatcagctgcagcgtgccacgcatgtcttattgcgacgaccagcttctgtttaaattcattacggtccgaaatggctatcggatcacgaactttcggatcaatgatctgatcaacacaaaaaattgggtcacgcccaaatattagaaagaatggagtctcacccgttgaagcatgcactgacgtgttgtagcaaaaattagcagcatccaaaaattcatcgaagtcgggctgagtcttagaaatgtatttggccaagatgttgtgaaatgtgcgaaaagttgcgtcagttgacgcattgccttgactccaatgaggacaggcatactttttgtcaatgtaaagcatggagcaaaattccctgaaaaattcggaagtaaaggcagaggcattatcggtgattaattcaacacaaccaccgtattttaagtaacaattggtaagaaaagagtgggcaattgtttgtgcttttgtgtcggggaccgggacagaaatcacgtatttggtgaaccaacaaacgatatttaaaatgtgtttattccctttttgagtgattggaaaggggccggccaagtccagcccaactttggcaaaaagtgtgttggctggcaccatgagcatctcttcacggtacgcgggtgttggattgtgtctgaattggcaagtgacacataatttgacccaagttaaaacgtcagagtacattttaggccaaaaatattttttgcatttggcaattgttttcctgtaatttaaatgaccaccacccaatagagaggagtgaaacgattcgaaaatgagcccacgtaatgaaattgggacataaattcttgggggggaacccttgtcctcaaaataaagaattcccgaaattaatttgtaattggcagtgcctacagcaaataattctttttctttttcatccaaatcagctggaaattccccatccctgacaaacgcaatgtaggctgcggcttctggatctcctgcctgctcttccaacaaattaatttcgtaagtgtttccatcctcgtgtcggatggtcaaagtatgcaaaaatgggtccgcgaccaccctggaatgtgctgccaaagcgagacagaccggaaatgcgataatgtcctcgagttcatccacattgtatatttccgacaagggcttgtcctcagcggcacgagaaagtgcatcagccaaagtgttggcttttcctgccacgtggacaatcttaacttggtagttttgcaattcaatgagccaccgtgccaattgctgattggtttcggattttttcagcaaaaacgcgaggggtttgtgatctgtgtgaagttcaatgtccgacatgaaaatgaatggtctgaattcccttaaagcataaataatggcactcatttcaatttgaactgccggccacttcctctcagcagcagagagggttctgctgcaataggaaatggcagaaaatgtgcccgtcacgtcatccttttgcattaaaactcctccttgtccagtcgatgatgcatcagtgaaaatgtgaaatgctttgtcgtaatctggaaaaattaaactcggggcttgcgtaagtaattcttttatcttgtcgaaagacttttgttgttccctgccccattcgaatctattgccttgcctcgtaagtttcagtaatggctctacgaccattgcaaagttctcaatgtgccgtctgtaaaagcctgcctgtcctagcactctttttacctctttaacatttaaaggcactggcatttctttgagaatttcgattcgacttaagcttggcttaaaaccttcagctgttaaaacaaatccaagaaaattcatctcatttgaggcaaaaatgcattttttcgggctaagtttcagattatagagccgaaaacgctccaaaactttccttaccgccgttaggtgttctgaaaagtttgggcttttcgtgaaaataagcacatcatcaacgtaggccaaggaagtatcctccaatccagacaaaacgatagccatggcccttgaaaatgctgcagttgcatttttcagcccaaatggcatcgtaatcatttggtacactttgtcttcagttataattccacattttcttgacgtttcttcactcaatttaatttgaaaatagccactggccaagtcaagagagctgtaaaattggcaatttccaaccctttccatgatgctgtcaaggcgtgggagagggtacttgtcgggcaccgtaacttcgttaagtttgcgaaagtctaaacaaggacgaattccaccgtctttcttctgtacaatgacaattggagttacccatggggtatcggactcaaccatgactccggcttctaaaagctgattaatgtgcttcttcagttcctctttgtatttgtacggcattcgccttggcgcagatgcgattggttcctcagttgtggttgtaatgtgatgttcagcagctgtgaaaagcccaagatcatacctanacttactaaaaacgtctgaaaattcttcaattaatgccttcagcttttccaaatttttgccttcaaccattgccttagaaaagtcgactacaaatgtgggtcaatttccattttctttcgttcagaatttaacgtaagaatttcttttgtgctattttccttcaaaagtccatttcggtcacataacagttcgttggcaaatgccaaatgtgttcctttccaaatccattttggttccatggttgggttgaccaccgccacttttatttgtttctggcccgcaggcgagacgctattaatgactgacagtccctttttaataagacttatgtcagggcgatcaatgcaaaatgaattttttgggtttggggttgattcgattgaagcatcgaccaatatttgggagtcggccggaatgagtgtgtttttctctgctgacacgcgcaaatcgttcagtaaaagaatcgaacgatagcacaatttggattcgttgtccccaacaaaaaatttcccgtttaaatgatcgaattttactgggggcaatttttcaaagacatcccaaccgacaattacactgtaatcccgggccacagtaaattcggaatcatccacaaaataaattaatgaacggactgtgtacccagcaatgttcaaattcacctgagcatattctttgaggcgaatgacatggcctgaggcactcattgcctccagatcagatgaaaatgttcgacaattgagttcatccgcaactgatcgtggtgcaacagtcaaactggcgccagtgtccattaagcagcggacgggtgtggaattaatcaatgtctgtaccacggcgtgatgcagcaaaatcgcattcagatttgggagcattggaaggtctgaattccgttttgagcagagcagtactgaaatagtgataaaaatcagaaatggaatgataagcagataaatcattgatggagaagtgaattgaattgaaatttggttattcacatcgggatttgcaaaagcattgggaagacaaactactaaaaacccaatgagtacttttggcgcccgaaaactgaagcgagccctttttaccggtctctttcgttttcctgcaattttgtatgcctgggtttgggcgggttcaatgagcttaacgggactgagctcaatttcgttaccaaattctacagatgcattcagatccatcatattgaggcgtgctggagatttcacaattttctgcgttttatttccaccaaaagtcatgcgtcgtgttgttcctctgccaacgtattcatctctaatcattaatccaaaccggatcaaaaagtctgtaaaaacaatgattatcattatagacaggacgattttgccaatttgttcccaattcccaaacattttgctgcgaatggactcactcacctgctcccattgttcagacagagtctttgttataaccgtgtcctcacttttaagttggaatgtgagttcactttctcttgcgaaattggcgtcgtaaaactggccaataaagtcagacacattcacaagggcaagatgaagaaaagaatggcgagcataagtcggtgccaatgatagatttaggctaaaaccgtcaatgcgattggcattcacctgcttgacctgagcatcaatttgatcaacttcatgaagagaaccacgcacaaaaatgagctgtttgcggtattctgagcatggtgccagtctcgcatcagagctcaaaatcattgttcttgggtcaataaatgccattcttttgttgtccttcactcggaatataattggaatttttgtcaaagcattcgaattcggagtccgctgagtttccaattttggcaaattcgtaatcgtgcgcttgcaattcgatgcatggccacactttaatcaattcaggcccagccacttttgccaccagcttaccggattggaataattttctggcaaaagttgttggatctgagagaagtgccgtcgctgtccatcttctcgtctccaacatataatcacaaatcgatttgattgtctgagaaaaggaaagagtcagcatttctcttacttgttcatccaaatagcccaatttggagttcatttccgattcagtgacccagctctcaagtgatctcgtccttctgcttttctttgaggattcattgctatcggcggatggcaagtcctgtacagcaaatccttcctctgattttattaaattcaggccacatgagttgactttctttgtgttgttcaaaaatgtcaatcgaaaactgacttcatccgaaatccaaatattgtcaagttgtagtcctttccatgtgccaatttttgaaaattcacaggcacgggtagtgttggtatcccacatgagcaatgttttgtcttccatctcacattggcctgccttgaattggcaattgttcactgacccgaggggactttgcat

SEQ ID NO: 4319 - DNA, 3215 bp, Heterodera glycines
aggtgctttcgaatgattaattgacagcttggagcagcccgtcacttccggcaattgccaaactctccccccattttgggtttgacagacaaggggatgcattggcagatggggcatatttccagcagtaaagggcaaagtcattcccatcagcattaatgagatgagcattagtgaagcgactttcgatcgcacacttggccgttcccaatttgacgttttaagagcgtttgtttttgtttccggcccacaggctggggattcactagaggattcttttggtaattcagtttctacctgacaatcccttgctgttgtttcgggtttgatgcgtgtgagcgcattcattgctcccgatctcggctcttcgtttttgtaattgcgattgtcctggattttgaggtcaagcaacgactgggccaagttctcgaaaaatcctggtgaagcgttgtaagaacttgtagcatccatcacgttaacaggattctgccgattttgccattgtccctgagattggcgtggttgctgatttgaccatcttccttgacggaacgattggttggaatttcctctaaaattggcgcggcgttgatggcaattgtacgcaaaatgtccagcacggtcacaataatggcatcgagggttgcttgaccagtttctttggctaaattgctcctggcggcctcctccccaattgcgagagcggcctcgtcctcctcttcctctttgttgttgtctcgtcgcatttgatccagaaaaaggtctaaacccacgtacattgttgcctgacgaccattgtccagcacggtcattgttcgggttcgctcctgtagaccaattcgactgtggtgactgattgctcagcgcatggactgcctgagagaggcgtgatgcttcatcacctttgttcatcaacagtaaagcttccagctcctctgcctgtgctcttaccaagtccaaatcttttgcccgtgacagtcccaccagacggataagaaaactaatgtttggcttcaatctatccagaaattcttcgcaaattttctcttttcgaatttcacctgtcaatgacgaatttgttgcatccaccaaaggcgtcaggcgtctcagaaattgcgccactgtcttatcctccctttgtttgcacagcgataaagttcgttttgcaatttcccgacgctgaggggagtccaatttctgtcgaagttcactcaatgctgagtcaagagtgtccatttgtgcgggcaataactccttaaacagtgcccgaggagtgtccctcagagccaatttaagtcttgtgactttttcttgttcagtgtaagccttgcctgacacggacaggtaatccttgaaacgttcagcccaatcgtcaaatgcaaaaacagactcctcacaaaacatttccaaacctgaccccactgtgggtccgctcgagagcatgttcaggccaaaaagagtcggcccgtcatcttcgtcttcgcttgacaattgatgaattggctcttggttcggtacgacttggttgggctgtgcattgcccattggcgtcacaaacggcgcacgcgacgctctattcaaattagtaatgctaacagtcccacctgaattcgtcccatcactgtcttgttccaacatatcaactctttcggttagggtctcgaattggactttcagagtctcaaaattggcatttgtattggccacgacatctttcacccaattgactttttggttcaaggaacgattcaggtagcgaaaagctctgttcactccatcttctaatttccccatatcattttgagctttttctaaatcagagatttttatcgtggtctttccttgccaaagtttcctatcaatagccgaaatcgaggactcatcatcctttccactcaaaaacatctttgtttcctgcccgaaggcttgggatgtaccaaaggggaactcatttgatgagccccctgatgtagacattcgaagtcgttcagttcgtaataagattttgttttattttgctaaaaaaaaaaaaaattatttggtaatcccattatgcattaattgagagagaaaaaaaaattaatgaatgatagcgggtaatcgaatggatgcgaacgccttccaggaatgggcttatctgctccatctccgtttaaacttcgcctaacaagaacaattaacaattctcaggcgccgcaaaaatgtgtaaagtggatgatctcgcccaatgaaaaatgcggcggcacgtgattacgtgaatattcttatggcgtgaaaacgagagaaaacaaagagataaaatgaactttggaacttgtaatgatctcgcccaatgaaaaatgcggcggcacgtgattacgtgaatattcttatggcgtgaaaaccgagagaaaacaaagagataaaatgaactttggaacttgtaaaaactgtaactcatactgtaagcaaaatgatagggcctaattttcattttttaattggtccctctttttaattagctaaaataatgtccctttgattggttatcagcccgggcctttttgctctcctcaaaaaaaaattgttctattttttttgtctcacttcttctctctctctctcttttttttgcttctcaatcgttgatatttttataaattggtccttattcgtttgctaccaggacttttttttggttatttttggcttctttcactctcttttcttattctctctctctcctacaaataattgtcaaatttgtcaattttcgatgcagtcagcccctttagcatttagactagcccgggcaaatttcgttcttcttttttttgcatttttaaaatccctttagcttttcactagcccggacaaatgttctcacctcttttctcttcgtttttaatgtccctttagttttcgactagcccggacaaattttctcacctcttttctctttttttttaagtccctttagtcttcgactagcccggacagaaatttaaaatgtcagacttctttacttgcgtgtacacgtctttgtttctagccctcaggccagggagatctcccacaaacttctgccggcttacccaattctcagcttcgtcgtcaatgatgggtcgtttctcaaaatgggaaccatttagtgctaccagtgagtgatgcgcactgtgccctaagaccaactatgcaccgtaatcccggatggagtttgggaggaaatggggaaa

SEQ ID NO: 4320 - DNA, 7801 bp, Heterodera glycines
aagatggaagtggggcagcagcaccaaaggcggtaaaatgggcaaaaaacaaagggagacaaaaaaaagaaagggaaagggggcgggagagagcggcgccttttgggacccatcgaacgatcgtaaaaacaaaacacaactaatctatcttatcaacaacactttttatcaattgaatttgaagaataatattttatccgttcccttttccgttcgaaattccaaattttaattgcccttttccctttccaatttttcttttcctcgtctcgtttattttaatttattaaattattccgaatttcatcatttccattgcgaattctctcaccttcacacagaatgctgttacaattgcccgctttaatgccaacatttcgtccgtcaatggacagaaggccagagaaaaggtggggtaaaagattgcaaaaatatcaagtaaatatagtggatgagagaatggaaatgatttgttcagggatttctacgaaaaaatggcgcgcagaataagacgggtcggactgattcggcatcaccaggtgtggacactgtcccacgggatcaagctgtacaaggactcgttcaagggggaggactttgtgctgtggataatgcgctcacagaatttgagtgaggcaaatcatcagtgaaatataataaatatatattaattttgggttaaccgccaaatgaaaatgggtttttgttttcacaatcagatggaatataatacatataagcaagtcattcattcactcgtctttgatgatcagacaagtcatattaaaaaacggaaaactttcattttagcttacacacatcccttatgtgtttattatacaaaacatgtgaattatttaacaccttccgtccgcccaatcacttccccccaccattcgcccactaacattttcatttgtgtatgtatataaatgatgagcatgatgatgactcatattgctttttgtacgttggaatcgctctcttctctctctctctctccctcctttcacggagaagaagccgcgttaaatgagggggggggggggggggtggtgtggagggaatggttgatcggtgaagaatcccaccccgtcccaatggcttccagtgggaaaacaaacacacagaggaagcggaagatgctgctttattgttgttgtattgtggtgtcatttttcaacatttaaattcacatgtatttcccccatttactgtcacagtaaatggcgaaacattataggatagagacggatttgtattaattggtggtccaattagctgttacattttctcctaggccgccctgaagcgttggagacgggccagtgtttgatggagcatcgactgatcgagcaaactgggtggaccgacggaggcggacgacaggcggacgccggcgcactctcgccaatgtcaccgccaatcaatggcaacaacaacagtccggcaaactcaatctcgcgatcattcagctcagatcggtaagaaaagccaaacatgtgacactgttggatttttcaagagatgtttctgtctctgatcagcagaagcgatcagctgatatgaaattgttattaaaagactgatcaactgatttggttgtctcatttgacagtaatgatgaaggagaaaatgtgatcagtgatcaaacttacaaaagtgatcagtaagttattggtgaattctggtcagacaagtgccgagtgatccgaaattataaaaggacaagacaggattagctcaatggttaaggaaactgattagtggcctgatcatgatcagcaattagactgaatgactgacaattgtttgtccagattctaccggcttgtggatgacgaagaccaaagggccccgctgaacgcattgaacagcagcagcaacagcgaggaagaaagcagtgcctccaaccagcaacaacaacaacaacacaccggcggcaatttcagtttggccaacagcagacaaacgtcgatcacgatgcccgttgagggcaacggcacaaccgcggccaaattgacggtgggcgtgcgcgacttcaacacgcgactttgcgcagtgttggagcgcctttatgcactggcattgtccgaggacagacgagtaagcaattgaaaagcctattaaaccataattgtcgcggtttcatcgcgcccatttggacttgctggacgactgcgacacgttcaactgcgactaccgcgagctgtcgctggaggctaactttgtggacattggcgccgcaacggcacaggaaaggctggcgctgttcatcaacctgcacaacatgatgctggtgcacatcacgcacaaatttggcctgccgggcacaatttggcaacgccgaaaggtgcaatgggacgggcacataaatgccccattatccatttggaaatatgccaaaataacacactcacacacaccaatggatttacagtacctgtacagcacatactacaaaattggcggccatctatactcgttgcagtccattttcaatggcattttacgcggaaatcggaaaggcattggcatgctgtggaagccgttcggcgaccatgatcccagaaaagaggtgatggcattttagtacaatttaatattttgaaaaatgtcacaaatgttgtaagttcgtcatcgaaggcggcgagccgctcgttcatttcggcctgaacaattacacccggtcgaccgtgccgatccgagtgtattcaaccgaggtaagtaatactgttacagtaaaccggggactaatctccaacaaatcaactattacaatttccccaacagaatgtgtacgaagaactgaaagcaaacgcgcgggaatgcctctcgtccaaggagtttcttcaaattgaccccaaaacgggcaacattcggctggccaaactgttcaagcagtactcggaagactttggaccgtatacggaagacgtgagtttcttctcaaagcaaacaattcattaaatccctttatccgtggtttctgatttaaaacaaccctcaaaatggggattaaaattcggtatgcttatgttagcttgaacatgatcatggaatttgtgattgattgaatgggtaaatgtttggggcaatgatcaatgtgatcggaatattacatgacaaatgaccaggatgatcattacgcaatgcttttcaggtgctttgttggattgtgcgtctgctgttggacacgtccgaggatcggatgcatttggccaaacttttaaccaattcgtccgcctcgttggccaaccttagccaaacagtgtcctatctgccgatggacatggacctgaacatgagctacggggtggcgcccccgtcctccccatcgttgaggacatcgacagaaaatggagacgaaggaaacggtagggttgtgacggggtttgttgaggaagggtgccattcaaatggcaaacaattcaattgcattcagacaatggccgtggactggacggagtcgtcggcggagacatcgacatcgacggcaccaaagccatggcgaaagaacagcggggggaggaggaaaaggaggagtacaaaaatgtcagcaacaacaatgacaatgaggacggaagaaatgggaggcggcggcgggaagaaattgcggaccgggcaaacaacggcaacaacaacaaagacaatggcacgaatgaaatgccgggaaaattgatgctaatgccaacggatgcaatcgaagcagaaatgccaaatggacaactgacaatgaacacatagcaccagcagaagacagaagaaaagagtgaaaacaatgaacatgaccaaaaaaagtgcgggtttcacacaaacgacagaaaaaaaacatagaaaaaccgatgaaaatggaggaaaaggtttttatttgtattatttgaccggggcgtaaccaaaagcatcgagaaaattgtagaaaatccgacccaaaaaatttgggcctgaatctccaagttacgcccctggtgatcagtagcaaaacagcagcagagaacacatcgcaaacacatcacacataaactttcaacacatttttcaacatttccgataatttttaaaagataaaatggatggaaattcgaattcagacaattgccgaacatttcggtccaaggtgtccaccttcaccaattcacaatgtcccataattattaaattttttttgaaaaatggaaatgccgaactcctccgtccctcccacctgtacgcctcggtccgttgccgcgcctccaagtcgcgcttcacaaatgacatgctccgcttggccctcttttgcgggtcctccagcagaaatttggtgcgcaacgccgcgtcctcgctgaagcccttctcctctataagctgcttcatcgcaaagttggccaactgagtgcagtgtttgaagctgaaaacaacggaaataatttcaaaaaaaaacataaattttatttttcgtgggaagacagcccacccactcctttgggtataatgcaaataatacctttcatagtttccaaaattgaatgaatttcatatcatctacaaacaaaagtttctctattagcccaaaaaatttccaaaatttcactaaaaaagctaaaatattcgtatacattttaacccacacttacgcatcggaaaagttcataaacatggagaaaatgtgcgtttggccatcccgtgttgaaacagtcagcccattggacagaaacaacgagctgttgtgctccattttctgtgatgagaattggtcattatgaaattttttgtaaactttaaccaaattaatttaaatattttttaaaatgttttaattggcaatattcaatttattgaattctcccgagaagaaaatgattcatctgtcatcgagaaacggaatttgaattcataaagttgaagcagtacaacaattaaatgatcacaccgcctcggcttttccgcaattgttagcattttttaatttgaattttaccaaaatgtccgtccatcgaattttgatgcgcgtttgactaccgacaatgaatgcgtagaagcacagaaagttgacggacaagtacagtttgccctggaacggcttgttgcccctccaataagtgcaggaataatctgaaacattgaaaattcatgtgtaattgggggaaatttttatttacaattgacgagtttttcacagggcggcaagtcgaacagtttgagaaacttacgcagaattgcggcatttgatacatgttcaagcactgggaaaacagaataatttgttagtaattaataattaacgtttatttaatcttttatgcttttttatgataaatgatacgcattttatgcatttaattattcaacacaaataaatgtgtcgtctcaattgaagcaaaagacgaaaagaattcatgggaccaatataagcaaacattgtattttaaaacaaacattaataatgctaatttttaaaaaatccgaaaattttaaactagtaccaaaaagcctaagattccactttactaaattcattggcgaagttattttttcaaaaaaaatatgtgcgtgatcaataacattatggaattttgaatttaatttgtaaaatttcaccggcagccgactcggcgccatcgtcctcctccccaccgtcggccaccaaatgttcacggcgttccatttcatcgcgcagcgccaaaaacccgtcaatttttgtcagcacaaatttctccaattcgttctcatcggtgcccaatgactaaaaaaagaaaatttaaacaatttattattttttctattattttgaaaatacctccaaaattggcaacagcgaagtctctaaacattgccaattgtccaacacatcgcgccaatcgacggcaattgcaatcactggaaaatattgggagagatgaaaaacggaagaaaaatttggatgaatttttgtaaaatttaaaaatcgcattaatatgattaacaaaattcccagtttggcccatccccaaattttggagtcattagcctcggatgactgaccccacgcaatttggccctcgtccaattctcgctggtaaatgatgcgatagggtggcggacgagtgtcaaaaattgagtcgatggtggacacaaacaaagccgacagtcctccgctgagcactgaaatttggaatttaatttataatttagcaaaatttaaaaaattcattttcaacccttcgatgaggaggacacgtcgctgtgctgtttttgctgatacgaaaaccgttgctgctcatcttcacgatggccttttcgacgttgaagcacaaaatacgggttggcacgttcagaatgcctaataaaagaaaagtttacgatttttgcaatttgtttttttttttaccaaaaactgtgtccaaataacaaccgttcaggcttaatccaaaccattgaccaaacagtgacagctgcctacagaggaattgttgagagaattaaagaaaggcaggattaaacatgtacaatggcttaacatggaaggaattagcagaggaacaccgaaaaaacgaaatgttgccttttggtaattcaaaattccaaaaatattattttggcataatgtttattttatatttggcataatgttttaaattttttaaatttcgtcatgtgactttaactttggctttcttttaaagtcctgaaacccccgccgaattcctacgtcacagcggttcaaatatgtaaactcatatatttctcttgtttcttacgattcttaataaatttcaaaaattttgggttgtaacacatgctgtctattttcttgcagaatatggcacgaaccaagcaaacagcccgcaaaacccaatcccaaaaaggcttttcgtcgagcagtggcagccaacacatgcagagtcaactgcacaacttgagaaaacagttggctacgaagcgtcccaacccaaaacgagggatcggatacaaagaattgcctcctgtcaaaatagcccaaaaacgtcatcataagaaaggtaatttggctctactgcattttacgcgtccaatcgacttttacgcgtccaatcacagttttcgcgtccaatcaaaagtttatgtgtccaatcaattattagaaattatttaaaatattggcattaaatgctttgtgtgctttttctataaaatttaattgaaaaaatggaatatagatggttttgagatggtgtttattcatcaaactaatgtttttccattttcaggagcattggcacttaaagagatccgcaagtaccagaagagtgtgaatctgctcatcccgcgccgtcctttcatgcgtttggtccgcgaagtcacccaggacatgtcgcagtcgaccgacctgcgctggcagggcttggcactgctggcgattcaggtttttgctaatccgagctcattgtcagttgttacccaaaccgggcaatcatgttttattagtaccgaaaatttttttgaaaccagaaaattctaaaaatatatttctaggggtattcgaggctttggtacgaatccggcctcctttttggccaatccgaacccgaattcgaacaaaaactcaaattttctttttttaaatttcatatgctatattcgtgatcagcggtttttgaaaacaaaaaatgaattcgggttcggtattaccccaagaatcggattgagcatttaaatctttggaaggtttcaggaggccgccgaactgtacttggtctcattgttcgacgacaccaatctttgcgcaaaccatgccagccgagtgaccataatgccgaagggtggaaaagggacatgaacatttggctctagtgcactttatgag

SEQ ID NO: 4321 - DNA, 4262 bp, Heterodera glycines
actgttgttgcattgtgttcgcgaatttcgtggcgatgagaagatccgtgaatacgtgtgggcactgatcactccgtcgcatcgcacacaaaaaaaatcggcaacaacaaaaattgatccggatcaaaagcagcagcaggatgaaaaaaagacagcagcggcaactggggactcaaacagccgctaccaccagggatgggccgctttgcctgaatacaatgtatgtcgtctaatgctcatctggaatcatatactttcacgtcaaatctaatgatttttatgctcacatttcccgggtcatctatgttacaaaatctatgatttttccaaccggtccctcttaatgatttttccactgtcactttccctggtcatctatgttactaagtctatgatttttccaaccggtcccttttcccgtttcatctggaatcatatactttcacgtcaaacctaatgatttttccactgtcactttccctggtcatcgatgtcacgtgaaatctcatgattttccaaccggtccccgtttcccatgtaatctggaaatcatataattccgcgtcaaatctaatgatttttccatggtcccatttcccgtgacatcgatgtcacgtgaaaactcatggttttaccaaccggtcccgtgtcatctttttgatgaaatcatatactatttcacgtcaaatctaatgattttcacaactggtccttttttccgcgtcatctatgttaaatgaaatctcatggtttctcaaaccggtgtcatctatgcttattttagccgccttttatctgcgtggacgcgtccttccaacggcatttgcatcggcactccaacaaaatattgaacagaatccaacaattacatttcctgcacacaattatcgtcacgtcgacgccgacttcggcgacgccaactgagtccaaggaggctcggcgccgaactgtcacataaagacgacaaaaaagagtcagcaaaaggtgctcgccagcaacagcagcagtagcagtggctacgagttgaaagtggaatcgcccgacgcgttggacaaacggcaaattatcgccgaatcgggacagggatcgtgatcgcgatctgttgatcggtgtacacaaacacggtaaataatgccaaatcaataaattaattcaatccatttttagtcttagtatcaattttccgttaaaattatcggaaatcggaatcagacggcccaaaaaatttcggcaatcaaaaatcggatttttttttttttgtaaaaacaacaaaatggttaaatacttaattaattgcttcaaaatgatatttttcaaatgcgttttttgttctaaaggaatggaaaattgggagcaattgcgcgcggatgaaaagctttgttttacccaaaaaagcatccaatttccgaacacgatggacctgaacaatcgctttaaacacctaattaatgtgctgcaaagagttgccgtcgagtcatcagcaaaagcaacggcaaaagccccaccgcccgaaacaccaccatcagtggtgtaagtgttgctggggtgtcgttagagcccggacgggattggaattttgtgggattttcccgtggtccccgtcccgatttttttttttgaagaagtgcctggattggaatcatgaaaaattggggtttgaattagggttaagccccgactccgagccccccgacccgacccgagacgttttttggacctattccccgacccgacccccgacatgtcgtcccccgaggtccccgacccccgactttttgccccccgacactaattcgggggattatggactcggagcgttttaaaaaattcatctacgaaggcggaaaaatattgaaaatttttgagattttgaacaaattttcttaataaaattcattaaaaattacaaaaaactttccggcggcgcctatcggcacccggcggcccctcaaaaccatggttccgatcggtaatttttcaaaatatgaacaccaaggccgaaaaataagattttagggtcaaaaataataacattagcaacattttttcaaatcagtaaatttttacaatttatttgatcaaaattcccattataaactaaggacaaaacgaggttaaaacgaagattttggacccaaaaataagattaaaaaaacggctttttacattgtaaaaacagggctgctaactgaaaattttcaaaacctgcatttagccaacaagattcatcatttggggtcaaaatcagcactttggaaattttagtcaaaaaggaaaaacatgcttttttgtgacgcgctttttccgaaaaaaaatttttgtacacaggtgccggcgggagaattttttgaaaatttgagttcattttgctcacagattttcaccaaaaatgaccaatttttgcgcgattttgagaaaatttttaagaacaattttgcggactggcggtgccgataggtgccgccggaaaaaaaaaaattgaaaattgggagtttttgatagcattttttacataaaaaaattttaaaactataaatatatttaagaaatctgaacaattttcgtcgctaccccaaaatcagaacattcttataaataacgtactcttgttggcgctaaatcagatgattaaagtgaaaaaaggaagatttacgagctttaaaaataaaaattgagttttttgttaaataatttcgttgatcactacccgatcggggtccccgacccccgacaattgagctcccccccgacccgacccccgacatgtcgccccccgaggtccccggcccccgacattttgccccccgagggctcggggcttaaccctaaatgttacaattgaaaaattgttttgcaatttattaatggtacggaaaatagcatttatttcgagcagaaatcttttaagaaaaagattgaagaacatttgaatggaaattgtatttagttatttgaaaatttttaaaattattattaatattaaataaaacatattgcttaaaatcattaaatttaaatatttttattgacactgagaccattttcggttcgaccgaacacctacaaaagactttttggaccataactttgttctttctcaaccaaattaaacatacttattgttcgaaaacatttgaaaaaacttttcaaacatttttttatttatgtacaaaaaaatcagggcaaaaaaaaattcgaaaaactaggtttttgagttccttttgcccataacttttaaaatacagtagtacaaatcgaggtacaactagactcgagaccaagaccaaaaaaatccgagacttttctcgagtcgagactcgagaccgagagtcgcgaacagcactaatccatacccatcttaccggtgccgggtcgttactcaaaaaccatgctcaccttgctgaccataatgtacaaagtgagccgttctcgtgccaacttgaccatgggaaaagcacaaattatgagaaaaatgacaaaaaatagcaaaaaagtgttctgaaagcaatcgcgcactttccccaatgacgacttcacatcataacaagcggacaccattttatggtgcaaaagaaattagaaaaaaattggtgaataaaattaaattagatggtcaaacaaaaattatgagattatgtagcagataaataattttaaccatctaaattgtaaaaattttccagtgatttctatgtaaaaatcgtctaacaaggaaactcgcgaactgtgactcggaaattgcatatgttttatataccattgggtagagaatggtcgacttctatagtgaattttaatattacgggccgatagcaagaaaaaaaaagttatggggcctcaaaagttggaattttaacgccaaagagcccatttccagctctgccaactttctattaatttcccaacctttaaattgactgctatttgcttattttcactaaagaaaaaataccatatcttttttttagtctaaagatgattttaaaattatttaattatattatacattaattaaaatttatttatttttatgggtgctgggacgtttcttaaaaaccgccactttgggcgtttcttaaaaccgccaactcatatgattatgtatataaataaatatatatatatatatatatattaaagtttacataacaataaaaaatttaaaatacatatgcatatctagtgacggtaaaataaaataattatttttatccttctttaaaacgttctccaaaaatatgaactgaccagcataatatatt

SEQ ID NO: 4322 - DNA, 3521 bp, Heterodera glycines
ggaggtcgatctccaccgtttaccaactgattgttagactgggccgtagcccccgcggaaaggctccgtcccatcggtaggccccgggatgggcgttccaatggggagtagcctcaacctccaatcaccattccaatcggcagaaaaaaatttttaaaaattaaaggaaacaaaaaaataaaattttttccttcaggaaatcagcaaattttgttttcagtatcacctaggttttcaaaaaaatttaaaataatccttttttaaatttttgcggcaacgttttgagttgtaccccaacaaattaatgccattttcacatcccctatatgggatattattactagagaccggaattttgaaattgccgggaccgggagcgggaccgagacttggaaaatggacccgtacggtatccccgggaccgggactcccgtttttccgggactcccggtcccggtcccaatttagggccggggccccgtcgggacggactttttcaaaatttttgaaattttgataaaaattcgaaaaaatttttacaattttatattttagcttagaattatatcaagcctgtaaattgactttttttcgcttttaaaaagcacttttttgcggcgtgtttttctaaaaaatttagggtacaaaagggggggggggtccggcggtgcggataggcaccgacgtggaaattttgaaaatttgtgtgtgatttgttaacagatttacaccaaaaaaatgacaaagttttgcgatttcaactcaatttttaagaaaataaggatttttatgggcccggcgtaagaatttttatagatttttacattcatattaagtaattttccccaaaaatgctatgttagatctaattttgaatattttaggtggattttatgatctttttaacagtttaaatcgtagaaaatcccaaattccatcttcaaaattttaaataaaagacatttcgccaaaaataattattaaatttttcaaatttggggaagtttcactggtgaaatttagtcccgtttttccgacccaaatggccgggaccgggaccggggccgggacttggaaaatggacccgggcggggccccgggaccgggactcccgttttaaacgggactcccggtcccggtggtttgcccaaaaaacccgggaccgggggtcccggcaaaatcccggcggggccccggtcccgttcggtctctattatttactcgtaaaaagagaattatcagaaaaaacaaattaggtaaatttttcaatttaaattaactacactcaacagatcatcaataaaaaataacttaggtaactcaactcattttttttttattacaaaacactcagaaaactacctaaataatttgttaattggttttttttttataaatatattgaaaaaggatttagtgttttattcgtgctgggacgtttcttaaaaactgccaagtgggcgagaattaaactacaaatataaaacaactatagagaaatatttttatcaaaattttattgatataagtttttatatatccgtatttcttttttaatttcttattctttaaagtgttcaccaaaaacatgaactgacaagcataacaaattctaaaaaataaactagagtgccacgggaccgggaattttgggcaaaccaggtcccggtcccgtgggcactctaaaataaactatttaaaatacaaataaaacagacttttgttaatgaacattcagcacttcctaccttttttaaagttgcaaaaccatattactggtgctataaagcatgagtcaaaaaatgaagtgccacaataagtgctacaatatttctttgcaactttcaaagggaaattttaattataataagcttatcagaaaaaaataaaaataattaatttatcttttgtggttttcttattagttcataatgaccgtcgtgaaagtacaaaaaacttggcagtttttaagaaacgcccatggtggcagtttttaagaaacgacctagcaccgtttttttacgtaactttttgaagccgaatgatataactttttgatgttggtcccggcaaatgccggatttttgagcaaaatagaatccatgaatatgctatgaatttggaggtccacgaaaaaacaggcagtcaaaattttccaggacctagctgggtacagaaaataccaggcccaggtcgaccgaccctagtctttcgacccacggttggaccacacggtcgggcacgccgttgcaaaggtcggcccggcagcagtacaaattagtgcaagtcacaaatgcatcttcatagtagccacgggcacaagccgaccttgtgggtacacaactcattgaagtgaatcgcactttatcaactgaaaaaattcattcaaatttaaaatccatcttttttttaagtgcatatatttatatttaattttgataagacttgtaacatgggaaggaaggccaaaaaattcggtgtcatttaaatgcgtacaattaattagcaacttgtatcataataattttttattttcaatatggtatattttgaacgaatttccataaacccgaaaatttacatttcccacgaaattagggcggtaccagtgcctgtaccgataccgtaccagctagtaattaccgttttgtaccggtaccgatttttccaagtaccgtcattaccaataatagccggtaaaaatttgcactggtaagaatgagaatccgaggtgaaattattcatgaaactttgcgaacaaaaatgcaaatttttcttcgacgagcattctttttttaaaattattattgaaatttattttatcttacgagtaggaatgcgatttataggtgctaaaaaatgccaaaatagttaggttttaggttctaaaaaactcaccctaaaaatgggaaaatagggccaaaaagtccgaatttaggggtgtaaaatcaaaaattctcatcaagaaaataactataaaaatttttgagatgattttttgagatatttttaattcttaggggtatattttaaaagtttaggatcaagatcaattcttaggggtgcattttttgtttttatttcggcaaaacgccagaataggtgaaaataaattttaaaaaaaaaattttaggttttttaggtgctaaaataaaaacctagaaaataggtgctaataactcgaaaactagcttaacaacagcccaaaaaaacatgtttttcgtgcgtttcaggccacggagagctcagcaaaaaaataggtaaaaacctaaaaatcgcatccctatttacgagctttaaaaatgctttaaattttttggcgaaatgtgcattatacaaaaacactaccttttctcaagcagttggccctgtagcaaaagttgaaccctgctcggcatacagttttgttcttgttaaacaaattcttgctgccgctgtccacccaacatttaagtgctaaaaaatacaatggtcaatctctgacccataattttgaaatttaatagaaaaaaagtcttaat

SEQ ID NO: 4323 - DNA, 1196 bp, Heterodera glycines
tggaagagttgaaaaaacgaagcgcaatttgcgaagattaaagcatcaaagtccactttttgtgtgcaattttttcaacattttgctgttgttcattttattatctatttccatccctttttctccttttctttctctttatctctgactgcccgatttcgcttttcttttaaaaaatcaccaacatttttaatgtttggacattttcatatcaattcattagaatcttgactttttgttttttttccaaaagacattcgacagaaatttgggaagtgtgccgggcccgaaaaaaagaaaatcccaaaatatgaatacttccggtacggacggaattttgggtttagttagccctccatatttattttattacgctaattctcttttgctgtttcccttctcccctcttcgttatttttgtcccctttcttccatgtctaatggaaagttgtcgaaaatgaagaaaagttctaaggagtggcaggtggtcggtcctttgtagagcccggagcaggaccggatcctgcgcaggattttgcaggatcccagtccgcaatcctgcattttttggaaaatgcaggatttgcaggatttgcaggattaatccggccggatccggtccggcaaaaaattttgaattccaatcctgcaacaggatcccaaatttgatttttgtgcggaatccggcaggatccgcatacattctttgaaaattttaaaagacggaatgccaaaatttttgaataaatttttaataaaatcaacaaaataaattcaattttcatctcaaatttcacctagaatttgcaaaaaaatttcctggcggcgcttatcaacaccactggatcgacattaatcctgtagaattgagtcaaaaggtgtgacatttggtcattttttggtcaaaatcagttaattaattgataaaattttcaaaaaaaaaaattcagacggcgcctatctgcataggcggacccctttgttcctagtttttgaaaaaataggcgccgaaaaaaaagcatttttgaaaagcaaaaaatagtcaaatttattgaccattaacagatttgatttccgatctctttttaccgtctgacccattcgaaacatcttagtcgcccttaatgcatcccgccagcccctaaaatttcttgtcaggtttttttttttttggaaatttcattgaaatttttcaa

SEQ ID NO: 4324 - DNA, 869 bp, Heterodera glycines
cgaaggacgtcaagacgcacatgaactgctccgtctctatttcgttgtgctgatactgctcgactttctgttcatttgttacatggctttggcactttgtgccaccaaaaaatattacaaagaattgcgaattgaacagacgcgcggcgtttttcaggtggacattcgacattttgtggggaggacaaagcatttgttcggtatttagcggatcggccaaaatgaccccacggcgccgtctttccaaccgccgacaaacccaaattataaaggatcgatcagctaaagcgaacgaagggcaaaagaaaagcgaacggaagaacaaaaactctgctgctgatctctctatcccttttctctcctccatttccctcataaagtcagggaaggccattaagaaattcctaattcggtgaattaattaataatgagtgattccctccagcggatgtcactaattatcccattcttttaatgttcttctttctcacatttcaacattttttagtcttgtcattgtttagctttattcattttttgatttaacacctcatcttagtaaatgattgacaaaatacaaatattttccatcgcttctctaataatccgtgccctttgctaattacccccctcccattttcccccgtttcttttttatccccccccccctcgaatttgtcagggatgaattatcccaccgatgattcgctcgcaatttgtcccctcccacccgggcagacatttgcattcaaatcgacccaattgcaacggaatacaatacgcgccatttcagcacggatgctcacttttgcctgtgtcggcaatctctgagcaatctgatgcgcgtaaagccggtcctttattttgtt

SEQ ID NO: 4325 - DNA, 1915 bp, Heterodera glycines
  unsure (1)..(1915): unsure at all n locations
ggtaattgtcgtagttttggctgaattggattttctttaaagttgcattttggtcacatggcccgccagtcggccattgcccgccacgccggacaatcgcaacgtggtcaatgtgtaaaccctttgcaggtccaccgccaggaagatgaacgcatctttggaaccgcaccaacccgttgaggacatgcgagctttgtgtggctaaagaggcgagggaatggcacgcgatgggatcgaatggaaaagcatggcacggaatggggaatgagggtagaagagggtttagcttgaatccgagttccgagatttttttataatcccaaacccagacccgaaaaactttggccgtcccggtccgattcctgatttttttcttatccagcggcaaccctggtatataatggcacggaatgggattgggatggcatggattgcgtttgatcagtgccaaccaagtcaaagtgaaagttccagagcttgcctcgtagccccaaatggttttgtctgagttgtcagagaaggccccgtccggaatgaatccagtggaaatgccgacatcttcgctcaacacacaggcggtgccaagggcacagctcagcgtgtcgctcgggaagggcaaatagccgggccgattgcaagtgaagcgggcgactgcgccctcttcgattgagtcgagatgcgtttgtccgtcgtcgggatgccccgggtcaactgcgaaattggcattaccaattattacatccaattaggcaacaaatgagcttcttcagcccattcactcaccacagaccggtccttcgcatcgcaaatctgagaatggcaatccaattttgggttggtatcgttcgcttaccgcccaaatcccaagtgccgtccacgttgcaacggatcattcggtcgtcgtacgacgacttcccaacgacggaatagggcagtcggcattggaagaggaacgcactgccaactttgaaggtgcccggcccattgttctcactctcgaaatacgctcccgaaagtgccgggggcgacccacaatcgatcaacggacaaatcacctgtgatcagacaatgggaaaaacatgactgggactgagatggcgcgaaaagcttattgtccagcaaaagttgggactcgagctcacttctgatccgctgagccaatactcagtgccatcagtgcgcgggtcgtaaatgcactgccgcgtttcgcccaaggggctgtgcttcgacggacggttggcttgggagcagacaaagctcagattgtgtcggtacggaattgagatggagtcgggacggacgaacagtccgatggccgtgttgtttttgatgccttggcaagtggcggggacacaaattggcacagtgccattccaattgccatcggaaagacatttcaggtgggaaggaccgcgcatttgatggccaaaatcacagcggaactcgaccacaattggaaaggcaaaggacgaattgtcggaggcgatcagctgaccattttcgggggcacgaagcggcgaacaatgctaaagggcgaaaagggagccaaatagtgagcaattaggggaaccaattaattaatgagtcaatatcattaggaacatttgttttaactcaattaatgaataacccaccctcggaatgcaacttttgttcagtctcaatgaatccatcggtccgttgcccgtctcgccctcgcgcagccgcactccgttctgtgttgccgaggtgaacaggtcgaagccctcgtcgcagctgcaccaatgactgccctgggctgttgtggcatcgatgctcacagccgccgttttgcccatccgaacattncgttgatgtctgaacggacggacactgactactgactgatcacccattggtcgaatctgatcagattaagctacacttttgatcattt

SEQ ID NO: 4326 - DNA, 5840 bp, Heterodera glycines
  unsure (1)..(5840): unsure at all n locations
tcagattaagctacacttttgatcatttcgaatccctttcccctgatcagtttatttattctgctgtttatcactgaatattcctttatgatcaatctttctttatgaccagtggtcgctgttaccttcacaagacgatcgttgacagccaagaaattccatttttaagcaggcattttccccattgaattccaacacatccattcgaacagtgcgcgcttcaatcggacgagccaatttaagtgtttcagtgctaacagaagcacctaaacattttgtgaagtaagaaagcttcgaatcgaatgatcaatattttttcttaatctcaggccaaagggagagaagctctctgatcactttaggctggttttatcaaacagctaatctttccactttgactctttcaaatgactaactcagatggccactctccaatttcattcgtcccaatgatcggactctgatcactcttctttttttattcgtacccaatgatcgggctctgatcactctctgctgccgttccgccccttcgccctcggaatgactttcgtttgcaaccgtttgttcattgtccgctaatccttctttgtacggaaccattgggacgccctcttccatggaatagaaaagcacaaatcgaattggaaaaacgccgccggcactcaaatcggacggaatgccaagcgaagggtcaaacactttttcaattcgcaacttttcaattatctttaaagggatattggtgattattaatattagcactttcagttgttctttcactttgggtgctgggaaattgaaagtgaatgatgccgcatttgttgtgccattattatcattttcgctgatctgtgtctccattaagctccgatcatcgcaccatccgcttttggaggcgatcagatggatggggatgggcactccgagggcattgtgtgcggaataaggctgaaccggcaccactccactttccgggcacacttaaattggaaatgctttgctattgaatggcagcatagtgattacttaattggggcgtgaatcccttcagacattggcactgatagcccccgggagtgttcacacattggctcgactttgaagcgcagttagccatcttttcggcacattcgtcgacatcacggcactgtggcacctcaaataacaattggttggtttgcctgatcattaaatattgcggccaatttattcaaattttaccccgcttagtgactgattggccaaacatttaactgtctccgcgcccactgatcgaaacccatttcggcactccacccgaagcgattcgccgtacaacatatccattatctgcccagttaatgccgtcctcttccgattgtccggcacttttttgtcctccatcgaatgccaatgcaattcgccattctccacagacggaagatttgcgcattgtaattctaaaaatgaccaattatggcaatagaatgctccctgcacattgtactgtacttttacattgcggctgggccgctgaccattgtccgttggattggcatacaatattttgtgctccgtctcgtctgtacccggcagaacattggaaactgtagacactaccgtatccgatgccgtcgccaaattgaagcgatcgctcgccaaagttaaacacaggcaacatgggacagatgggtgctgattgggatttaaaggaagaaaataagcaacaaattggcattcgaaagtgccaacttttgcatttcggcgtttgggtccatcggccttcgtcggtgcaaaagatttcctccatttctttgccggaaggaaagccgaagccgtcgtagcagcgaaagcgggcgatgccggcgaaggaaacatttgaggccatcacagcgaaaccattagcaatttgcgggatgggggagcagtaaatggctgaaaaaggcaatgggagaattgctaaatcgacgcttttgacatggctttacgttgacagtccgggatgggctccgactcggaccagcgaccgcccaactcgcacacagtctcaaagtgccgaccacgacccgaaacaaactcggcaccgcgttcgcagctgaccgtcacacgcgtgccgtaggcggtgttccgcgtggagagcaacacgcgccgcgagggaagtgacagtcggggacaacctgcggggattggccaaagaggacgatcaatggacaaatgccggggctgggggggctgacttgtggagaaggaaatgttccatccgacgccctggcgaagttcgtcggcacgccaaaccaattccacgcgactttgacgagcgaatatctgaacaaaaagatccacattcattcactgtctgttttttcgctggttcgctagccgttttggggggcggcgactccgcgccgaatcccttttcgatgggatgcaacggacgcccctcctcggcttgtccatcggcggaatactcaaaaatgcgcagggaatcacccgaatcggacacatcccacgaattgacggccaaagtcagcgaaatcgcttctaaaagcattatcaaattgtgttataaattgcaaatcaaattgtgccggtttgttgcgtcctttttccttaccctccgccgccgtccgttcccacattttttcctccgtttgtgccattggcaattcgatggtccaacgacaaatttgtgccggcgcataaggaaaatgggcgttgccggggcttgtcaaaatgccatgcgaacgacggatcacattgtcacaacctgagaaaggacggagtagtgaaattgggcaatttatcacgagagggaatggcactgattattaccgaattttattggcactttccgtttcggtcaaaataaaagaaaaacactgaccctttttgtatgaaattgaaaagccttttctgttgccaaattgactgctgaagaagtacaaatagaggcgagactgagtggacacaatcagctgggggtccgactgaatgaaaaagtttgcacttttattgcttttcccatggcttttggctcactttgccgctgagtttggccaataacggcgccgaaggatgggccccgtcgtaaatcatcagaaaatctttgtcctgctccaagtcaaattcttcaaccttaatggcaattccgtctttatgccgttgattttccgctttcccaacgcactgccaaagagatgagttgtccctcgggtgcgttcatatgccaaacgcattccatgccatttgggtaaggacggggccaatccggactgatcagctgctgaggctgcgactgaacactcagaagacctccgcatgaagcagacactgaaagaaaagcaaaagcagtacccaacggctcggccaacgaaaaactcgcgaaagagtcgactgaccggctctccacgacgcttggaacccacgcgcttgaattgcgtggtcggaacggaaacggacgaccatccgattggaagcggattcaaatgttagcgattggggaggacgcggttggccagacaaagtgaccaactgaacgggcacaaaataaaatgatggcactgattgcccgcgagtattccctccctccgccctcaccgaaatgctggcattttcggccgggcctccgtccacgacgctgaccaagtcctgatgctgttccgtttcaaatgagtcaaagttaagctgaatgagtagtgtcaaatagagtaatgttgtgtgctttgcctgaatgcgcgaattgagaggtccctccaccacccaacggcaattggctcccgcggggtacggcgacggaaaattgggcgtttcgattcggcccgactcgcccttttcataacgttgacaagaagcatcaccatgaactgttgcaaaatatggtcgcattcagtaggcaaattcttacaggggcaattaagctcatcactgaagtcgccgcagtcgtcgatgccgtcgcaacgaaagcgatcagacaaacatttgccattttggcagaaaaaggagcctaattggtaatgagaggggaggggggggggtaattaaaaagggacatttgctgaattaaaaaaacaatttctgattcggtaaaggtcaaagaaaagtatttaatattaaattgaaataataaaagtgcaatgaaaagataaagaattaagagcatttttattggaataataatttatttattttaccattaaaatttaccttttagacaagcatttctctcgcacacaaaaggcaacaaaaggttacaaacgtccaagctccagctcaattcctccgtgggctgttgatggtccgcaaatacctttttttcgattggttttttcttttttattatttttatttcctttttattatttttatttcctttttattatttttatttccttttatatattttttaatccccctccctctcgtcttttttctcccctcccccacctttgtgcagcttcccttcgtctgattgggctgtccctttgcccacgtgccaacgtaacgtgaagtcggcgtgccatcgctccacagaaaaacgttttccgtgccaattgaattttcaccggggcgatggagcaaaccgatccaatgttcggtcggagaagaaattctttaaatattatttagtttttaaattacatttattgacacccggcagaacgttgagggcgagcgaccaattgggagagaaaggcattctcagccgaagactcaacacgggccaacacggcaccaaaacgggcacagaatgacaacgcttggggccacgaccgttcggtgggcaccgctctaaggcatttagcaccgaattggtcccatccctcggcacagcccaattttacgtcggccaacacaaaaagagggcgctgaaatggcaaagtgaaaattggcaattctttcattttttggcactttgttttcctttcccttcagctgttttgcatcaactttgctaagttttgacggttttgaggtggccaaactattcgccactgcttccaaaaaccgctgtttgcccgcctgagagataaacgattcgtcatcagaggaagaggagggaatctcgacggaagaagcagggacctttgggggagagagactttcatcaaaaatggaatttatttataaaacgaaaagaaatgccaaaattaaaaatggccaaaaatttcatttttttatttttaccgcctcatcggacaacgatttgacaacagagacaaatggtaacagaagaagaagcaaaaaggaaaaacaaattattggccaaaggcatcggaagattctcctcacgtggccgaccatccgaagaaaaggacggaaaacgctgaaaatgccaaaaagtgaaaagagaaaaatggcgcagattttgggcagtgaaagaacggaagagagcgaatgcgaattaaattaaatgtttatgggttctttcttctgtgttatgatcagtcgagcaaagtttgcgcgaaatttgtgttgagacatttcaaagaatgcaaaaggaaatgggaacatttggggtgactgaaggaagagtgatctcgatcgaatttgatgctgcaaattgtttgatgcgtgtgggcagcttgatcgccgcggatcgaccacttcgagagtggtcggccttgggcgacagaatgtggcggagaatggcgggggggggggggaggaattcggcagaatgagagggaaatcgggtggatgagccaaatgccaatttggacgggggggaggtgagcaggacaggaagaacggaagagctgatcagtataacaaatcagccgatatatgcccctaatctccaaactttgccaactattcgtatttgtgccggaatatgnttaattgaactaagggaacca

SEQ ID NO: 4327 - DNA, 1666 bp, Heterodera glycines
  unsure (1)..(1666): unsure at all n locations
atagaaagaaatctagatttctatcaaacagacttaaatttctccagtgaaactgcctcaaatttgaaaatataataattattttggcgaaatgcctttaatccaaagtttgcggttcgagatgttgcacaagcgtcagattgaaaaagaaaagcttcacaacaaatataccaaaatttaattttactttcacatataaatttgctatcgaaatttataaagttaacaaaaaatgtatacagtttagaattttttacattcctttttcaccttgtaagttgaaaacataccgttattagattttcagggtcgctggtctcgaatccggcatccatttcaaacaatttgcgaccctggacccgatctcgagtaaaacccagaaattcacttttcactataattcagagcaacgactggtgaactcgattataggcatttgcgtacgcacgcttgttatattacacaaattttgaaaaaagtccggttccggcgggtgcccggcaaaattttgaaccgggacgcccggtaaatgggcgtttcttgaacgggcggcccggctccggtcaattgtctgatcccggttccggtcccgctacttcggtctctgcttactatataagcatttatgaaaattangttttcaaccaaatatttattcaaatatatagtttcaaaatctaaatcacgttagcaattatttaattgaaccgttaaaaaataccgaatccctaaaactctaaattgatcactgcccacatcaaagcattgttcaaggtcgacgccatgttcgatgagaaaatccactgaaaattaggggggggggggaacacggggattaaatttttggcatttttgccacaattttttccaccgatggccaaatgtcctcggctttcagcgcaaatcagtgcagtggctcgctcttggatggtttgttggttgacatctgcggcccactcctccaccagcagatggcacacctccaaatggccctcactgacagcgtccttaagtgtgaaacggaatcctgaaatttagagacaaaatcgtggcatggcatttttgagtactgtaaaatccaccaccgtaatccatctgttcgacatttgcaccatgtgacagcaacaagcgcacaatgtccatctgaattcaaatggaaatgttggaaaatatttcgccaatgaaccgggatgggatcccgggaccgggactcccgtttttacgggactcccggtcccggccccagtttttgggctgggatcccgccgggaccgggactttttcaaaatttgtgcaactttgattataaatttaaaaaatattggtaatcttctattttagcttgggaataggccaagcaatgcaacgaccttttttgtctgtttttaaagcacattttagggcgcgctttttccaaaaaattttgggcaattaacggtgagggtccggcggtgccgataggcgccgacggggaaattttttgtaatttttaatgagttttattaatagattttattcaaaaagaccaaattttgggattctgcgtcaattttttaagagaataaggatttgagggatcggtggggaattttgcagattttacattcatttaagacatttttaacaaaaattgcaatttttgaatagggattctgggatcttttta

SEQ ID NO: 4328 - DNA, 1460 bp, Heterodera glycines
cgaccgggacgaatcccgggactcccggtcccggtggtttgtccaaaataaccgggaccgggagtcccggcaaaatcccgtatcccggtcccgtccggtctctagtcggcaccattctcgatgagaaatgagactgttgtgaaaaagaaaaatgacggataaaaattataattcaaaaattgaaaattttggtctaccaatttccatttgcgatcttttgcaagcgtgcatcagcggcgttgtggcagagtccgttcccaagtccacgttggcaccacgggcgaccagcagacggcagagtggcaaaagtgcattgtagacagcaaaaaagaggcgtaatatctgcacacaaaaaagggaaaacaacattatgtccaaggcagacaacagatatttaatctcctgcattttttagttcaaatttgttaaattcgaaaatttgaactttcgactttttgttcgaattcgtccgggtttcggaatttttcgaaatgggcgaaagggtgccgccggattcatgatccaaaaactgtatggtaaatatttcatcaacaaccacccactctggtgtgcgtcgttggccaccggctcattcggatctgtccccctctccaactgaaatgacatacaaaattagtgtcgaagtattattaaatttctttgatcactaccaagagatcaacaattccgatgtgttttcgaaaaaaggcactccaaagagctgatcgtgatcgggtgtccattggatcaatcgtccaccacagcaaaatgttcagctcgtcggcgtccagcgaatcgatcagcacacgaagttgttggatgttgccatcgttgatcaagtcgaagaagcggcgagcgcgcgtcccgaagttgtccacaacagcagcatatcagcagtgggatgttcagcatctgccttaaatgtggggggaaaatcagttattaaaaaagaattctgggttgaaaccggggagtgggttcgtgatcattgatcagcgaccttgaaaatcccaggtggaaagatgatttttaaaaacaaaaaattggaaaatagaaaggaggcactgaactttttgtaagatattgcaatcacaaccaaaaaatcactgttaaatgatttcatgaaaaaaaactttaccatgcgaatcagcgccgttgaataacgacgacgaatatgcaatgggaataatagtgaaaatggaagaaaagaaacgaatgaaatggcggaaaagggaaatgtcgcaacgcttttatatgcccatcactatgggtcaagcccagtgttagacaaaatggggtcgggctcgttttcgtacgggccgttttcgtacgagcacaagtttttggttataacttttttctttgccaaccaaatccaacattgttggtgtcattcgatagccctatgtatcctctattagcctgcgaaatttcgaaatatttcgttaaggttcataaaa

SEQ ID NO: 4329 - DNA, 2298 bp, Heterodera glycines
ggctcgaactttttttgaacttgacgccttttttggaattttgcaggctaatagagcatctaaagagctttcgaatgatacctacaatgttggatttggttggcaaagaaaaaagttatagttcaaaaacttgtgttcgtacgaaaacggcctggccccgacaaaatgaattgaaacgccaaaaacgatataatttgcgcgctaattcaaaatttactctgatcactgcgttttcgtattgtttatttgctcagtcataactcgcatcattccacactaaacctaacaaatttggtatcattcaaaaggttttgaaaaggagaatcgttttctaagcaagtgctaagcaattttaaatcacagaaaagaagttgtgagactttcaaatttgcattacgttataactcaagtcctaggccactgttttttttttaatcaaaatgcaaaattggttctttttatattctaaaagatcaaattaatagtgacaatggaagacaaagacggaatgaaatgacgaaaatttaaagtgtcaaaatgctttttatgccgcccaatcaagcactcccaaaaaaaggtgcaggatatagtccgaaacttggctaaaattcaaaatcggtcccaaatttttttcgagcgacccggagtatgaaagtgcgaacttgacatttttgcatgccacccatttttattatatgtacgtctgacaatttcatagttgctctataaagtcaattttcgtggtccatttgcgctgacaaagctatcggcgccgccgaaccctaaaaatcttatgttttcttaaaaaataactcaaaaaaccacaaaattttgacagtttttctacaatgttatgggagttgaaaaatacaaaattgggtgtattttgaaaaacggtaatactggagaatctgggctccatcgcgtaaaaatttatgatcgtctcttaataaagttcaaaatgcataaaacaaggagagtattttattgagcattatacatacatacagagtacatataaaaaacacacattccattgtacaaatacataagcatatacagaaaacagccgaacaatgggatacaaatatgatcacaacaataaagaattttttataaatttgaaaaaatttttatttggggcccaaacgtggggggtccaatcgtgagggccgaactgacgtagaccgggacaaatcactatttatcctacggatcatgattcgggcgcccattcgccaaacttcttgaaagatctgatttaaaattgttgatttctttctttgccacctcggctaaaaagtgaccaattgtttgtttatttcatattatttctttattttcggcgtcaagcttttgcgtataaatgattgattcattaaatttataaacattatattattctgtttacatacataattcaattccgtgaaattgcatccaaatgccaacaatcaaaacatacaataatgacgtctaaactgataaaattggcggaagaaattcgaaaacaacggaaatgggtaattaaataaaaattgttttattgattaaacattttatttaaaagcccctttatgatggctgccatattatttctgcccattgattgccttttatgaataatttagcctaaatttacaatttttatttttaaaataaaaatatttaaattatataatagaaaattttcatttttaaaaattcattttatttaatcttctaactaaggctaaaagcataattaatttgaaaggtgctatgacgttagtcaaaaaccatcataatgggcgttagtcaaaaacccatcaaatcagacatttgacattttaatgtcatttactgatttttttttataaaatcaattaagtaataaatttaaatatttgcctttaccgatttcaaatatatttatataaatatattttatattgcagctatataaattccttttggaatctccatcatattagaataaattaattttaataattatttattgtaaataatatattataaaaattatattaaaaatgaaagccaaaaataatatatgcataattagaaattccatttaggagcggatactatttcacttgatgagagcaccaaagtgtagaaaattataactttcgtaagcgtggaccacaatgagaatttttcatgaagatctgtgcaagtatgtactgtattagccattataaatcaaataggtagattgattcaagtggagatacattaggaactttcttttttaaggcggacattatcttttttacttaattgcttagcattagc

SEQ ID NO: 4330 - DNA, 2811 bp, Heterodera glycines
  unsure (1)..(2811): unsure at all n locations
acaccatttgaaacatatcaaagggaactaaaaaaagaaatnttgtaaaaattgaaaaatatgtacatagatttgtacaaaaaaggaggaattatatatgaaaaattatataaaattgaactaattgtgccaaaatatgtggaaattgtttttttcttttttttaaatttttataagaaattctaaaagttctaaaaaccataatttatcggggaaattttaattaaaagttcggttgcacaattgtaaatcaaacacatttcatgcttttcaggcgttaaaatattttaattgtttatcctcctaatcattgccagggcttttactttttgaaaaatcgattgttcgggggtggggcgtattatttgaaattaagtagtttcttagagttgcattttattttattgcatttttcaaaataattttttattcccaaagtgaaattgcaagttctcgagcaaatcacaacttaattaaaaaatattaggagaagtttcaaataaaaaaataaaaaataatctttaaatcattaaaaattgtgaaaacaaattggtttcaagcattttttgattttgagaacgacataaaaattttagaattttattgtaaaaaaatttttaatgtttgtatttgattttgattttttttcgtatttcgtattttatttttcgattttcaacaaccctgttttatagccattagttttgcctgagcgcatcagtatgtcacagaaattatttgaataattctgtcgaattggttttgtgtatttatgaatagataaaatttcgtttttctttttttgttttagttacattttttagtattttattttacgaagtgtgtgttataaaggagggcgatcattgggacggaataaaatcggttaaaaaatttttctgcgtccgtaatttttgcgtgagctgtgaggttacgtatcagacaaaagaacggcacagaatggaatgtaaggaaagatgcaagaagtgctgtagaatggggttcgggtttccatgtgcggatgtgtgtgctgggatttattgcgcggagtgtaatcgcaacttctacaatacggaatgttttgagtctcacaagaagactgcttgtagggagtacaaaaatgcgaaaagtgtggagagacacacaacacaaggaacaaacacacatgtggggagaaattctgccgaatttgtaaaatttatcatccaaagcggggctgtttcatccagaagttaaaaattcgttcagcgaggaaatacagaattgttgcatatgatcttgagacaacattgtataacggagtccatgcaccgaatctcgtttgcgcggcgttgacatgcagtgagtgcgttggagagaaaaggaaatgtgagatttgtgaggaacagaggatgttgacttggtcggcagcaaatgtggaggaccctattggcggatttatcgattggattatgggcttcaaacaatttgaaacggttgctttttctcattatgctggacggttcgactcacatttcgtccttcgtgtgctgacagaaagggggcttaacaccgaactgatgatggcagatctgaaaatctatcagataaaggctaagggtgtgtactttcgggatttctggttgctcagccaaaaaaaattagcggatcttccaaagaccttggggctgagcaacccggcaaagttgtactttcctcataagtacaaccaaaatgagaactttgggaagagattgtcacacctgccgccttttgatgattacaatccgaatgctatgaaggaggaggactatgagaagtttgaaggatggtataacgagaattttgagaccgaatttgagctaggttagagaaataaaattttatattttaaacacgaattttttaggagaacagctcaaggtttactgtcaaaatgatgtggaaattttgatggaggcaattttgaaattccggcaattgtttttggatattactgacgggatggatgtgttgaaggacagtgtcacaattgcgggggtcgtgatgaggatattcaggacgaaattcttgaaggacaggcacattccgatcatgccggagggaggatatgagagagccgagaatcagagcaaaattgccgtgaagtattttgaatggttggcgcactgggaaggcctaagagtcagacatgcggaaaatggtggggagattaaattcggggacctcaaagttgattgcgtcattggtgggcagaaaagaataattgagtttcaggttttttaaatagtagtcattcgtttaatgtcagttcattaaggggtgtgcgtaccatgggtgcaaaaattgttttttgccctgggctgttggaccgaacgggctgtgcatggaagagaattacagaaggacagagatgcggatggaagcattgagagatatgtgtaaaaatttcagagtggatgaagttttggtttgtcaatttccaaatttattgataactgaacaaatttaggaatgtgaggtgaaagcggaactgaagagaaaccgagagatgaagaggttctttgaaagtgtgccggataaggggccgatcaatccgagggatgcttacgccggaggacgaacaatgcctttttgtttgtacgcaaaggctacggaagaagttgagatatcaatgtttgatatcatcagtttgtaccccttcgtgaattatggtaaaaaatctgcttaatttttgttaaagtttcctttcgcttagacactccttatcccgttggtgtcccaaaaattgaggtggagcaggaattcaatgtgaattggacggcgcccgac

SEQ ID NO: 4331 - DNA, 1042 bp, Heterodera glycines
atttgtgcgagaaaggccaagaacgaatttgttacgacgaaggatgtgaaaaaatgcaaccatcgaccagagcaaagagcatttttggggacgttcacttcgattgaactgcggaaggccttggagttaggatatagggttgttggcttctatcgggcatattactttgagcaatttgacaatcaattgttcaaaggatatgtgcggatgttcttaaagataaaggtggaggcgtcggggtggccagcggaggtgaagagtgaggaggaaaagagagcattcatcgagatgtataaggcgaagtacgacatctgcctcgattatgacaagattctctttaacccaggtcttcgtatgatagcgaaattggtacgaaatacataaataatcttttaatcagcaatgaaaatttaaggggttgaacagcttgtgggggaagttttcgatgcgcaacacgctttctacaagtgaggtttttaacagcatggaacggtgggtcgcattgtcacaagacaatacgcttgatgtttcgacgccaatacaaatatgtgaaggagtagagcgtgttgtatatcgtaaaaaggaggagttcataaaggagaataaggtgtcgaatatagttttatctttgtggactacgagcgctgcaaggataaagttgtacgagtatatggagcaggtctacagggaggagggatgtaaaccactgtattgtgatacaggtgtttcattagaaaaaatttccataaaattttatatttagattcactggcctttgctcatcggaagggtcggtgtccattgaaggaggggaaatttttggggtaaaataaaaatttttgaaactctttaaattggttttaagggagatgactcgagaatattccgatagcgagattttggaatatgtgtcagctggtccgaagcagtacgccctgaagctcagaaggaagaaagatggggagatttgggaaaagaccaaaattcggggattcacgttgaataggtccaacaagatgcggtatgaagaattcaaggagat

SEQ ID NO: 4332 - DNA, 3300 bp, Heterodera glycines
  unsure (1)..(3300): unsure at all n locations
ccgcncatagggtcaagtatatacaactgtgcaaaagacggagcgaattttccaggtaataacccaatttttcgtgtgaattctccattcaacaaataacatttgtcaccatcaagagacgactcatgatagccaacagaaattgatgcaaaggccaacaatgaattataaacattttgatgggatagaaattcctttgattcggaatcttgacctgacaaaaatcttttcagtgttggtggaagctccccatacggcggtaaaacaacagatccatgattacagcaaaaacttgaagaaaattttccttttcttttttcagcttcactattaagtaaaagagcgttacaatattcacatattttgtcgccaagatttcctgagtcataatattcggttgtgtgctttactcgcacatcagcacaaggatttcctttgtgttttaaatgacatcgccgagtaatttcatttaatttggctttcggaaaatttttctctatttcagaagactcggaactttgtcttttttgaagtcggattgatcgacgtgttgctatgctcgaaacacttgtggaacgcggtaacaataccacctctggagcagtgtcgaattcaggctctacacaaataaaagctgcatttccatcccttgggcatgtttcatcaacaactgactccacattatacaaaggtaacgacggattttgaaccaattgatgggtaatcaaattgttacgtccaacatgtgccacatcattactatataataacttcattaaatgccaaaggatccggtgcctttcaacattaatgttcaaatttggtaaaaacaatgaaccgctcagcaaatataattcggaatataaaattacaaagacgccgcaattaatgccgtcattctgacgtgtgaattcattatgatttaaggttcgaatattaatatcagtttgtgaaagcccaggcgttaactcgcagattccctttttaattatttctgttttgcggaaatcataaagtggatattgtgtatcagtaaggcgatcgtaatctggcagagaatcgataaacaaacattgaatattttcacgatcagatctatcaaatattataagtgcaaagtgccctgggaaaattattgtcataagcaaaatatcataatcattcgaataattataacagttgtctaaagcattgtaatcaaatatatgcatgccaaaatgcatgtttaagtctgtataaaggggatttacaacaaccacttttttgtttgtaatcactctcgtgagatatcgttgaaaagcaaagatcaaatcctcagtaaacatttccttattgtctttccacatgcttgagattacttccttattgacaccagcaactgtcacacggtcaatatcaatcattggttgactaattggaaattgaatagattcagaagcgaataaattcaacaaatcattagcttgtggatgattaataacttccatattagctttcgaagtcgtagcaatttcagatggagaaattaatagttttttcggtcggcccgatccgctgtgcatgccatgcttttttttgggacgacctcgccgaatctggccacatgaagaagagatgctgctcgaatcggaaaattttgttcgatttgaactcacagaaaccgaagagtcacgagaacattccatattttccgcgtcatttatttttgggtaacgggaatggaaaacgattttatcattactgtataattcgtttatgtgccataaaatttcttttcttttcttttaccaaatctattggctcaagaatcaatgatcgattattgaagagccatgcctcagaaaataaacaaataaagtagccgcaactgtttaaatcggactgctgtgaaatattttcactgatggcaaaaatttcatttatttctgtaccagataaataagaaattgcaaatttaatcaaattaattctttcaggattggaatgtttacttgaatgatccaaccttgatggattttcgcgcaaggaatcgacaaaaaaagccccagcttctttatcaaatattacaagtgcccaatgattttggaaaaacaatggaagaaggaccagctcgggagatttttttggatcataattatagcagccattttttaatgtcgtttcagtccttgtcatacgtacatttggatctgtgaaaactgaatccaccacgactgtttgtttctcagactttgacgcaatcatacagagaaaggcaaatgtgaactcatgattcagccaacaattaagattttggaataatttttcgattaatttggtgcttgtctcagtttcatcttcgtaaacccttaagccagcccatttagcaattttagcagaaaaatgaatgttttcagcataatgaagggaactcaaagtaacaaaatcaattgggttttgattttttgtgaaaaaatgatccatcttttgttttttcgtaagaggcagacgggaaattgtagcccttgaagttcgaggtgtactcaaaccaattttttgaaatggattgatcattattgtctgaaaattttctgacactgttcgttttcttgaatttaagttttgtgatgcactcaaatttaaaaattcagtgaacgcggaagcttcactaagggacgagtgccctaaggaggacagtggtcgatcctcagtttgcgtcttcctcgcatcacgtcttcttcgttcttttgagggcattttttaactaaattcaaaaagataaatatatcaatgaatgcatcaaaaataaaaatggataataaccatgaaatgatgcaaaagagagatttattaatgaattaaaatagacataaacaaaactattatgccttagtgaagcttccatgtacttaacataaactggataaattcaaccaacaatatatgtaaaagaaatgtttatgagtacacctcgaacttaaatagtcccttcaatgaactgaaaacattcattttcaaactaaattttttaaaagagctgttttgggagtaacacatgaattgaattttttttacttttgaatttagtgtgcggcacatccgcgtcactgggttcatctcactgagggggaggggtgttgcggtacatccgcgtcaccgggttcatcgcactgagagggaggggtgttgcggtacatccgcgtcaccgggttcatcgcactgagagggaggggtggtgcggtacgtccgcgtcaccgggttcatcgcactgagagggagggtgttgcggtacatccgcgtcaacgggttcatcgcactgag

SEQ ID NO: 4333 - DNA, 985 bp, Heterodera glycines
ataaactcacaatcagcgcaagtagtgcttcttgagaatgtcgacgattacgcaggcgaacattgtgaggccctcgggaaattgcaaagcaactgaaaaaatttaaaattttcaaaagaataagccaaatttccagatgtgtgttatcaaaattttggtttaaaacaacccctaattttttaaagtaaccttcagaacctaaaacaaaccgaaatccaaaaaaaacaaattttttttttaatcgatattttagctaattattttgaattttgacacaaattttgaccaaaaatggctcaaattttttaagattaaattatccatcttctcacagtttcgattatttttaaaattccgaaaatgaggaaacctgcaaataattgttaaaaaattatgttttgtgtttcaaaccaataaattaataagctcagaatccaacatcaacaggaattttgataaaattaaacattttctagctaaaaaattacaaacacatgacataaattttgaggtgaaaatgggccaaaagaatttttttttttaattgtaaaggaaccaaagccttcagaataattttctggcaagatttagaaataaaacgaagtttttagaaattttacggtgaaaaaaaatggaatttctataaaaaattttgcaacatcggtaaccaaattttcggtaaagagtttttttgtgaaaaactgaatagcccgtcttatttgatggatttttttgtaaattttataaaaacgtaatattcgatttaaaggcccattagaaaatgaacaatttttgtaaaagagagggggggggtggcgtgtaccaactcaaacaaattgagcgtaaaatgacttaaaaatgtaaatagaacccaaaaaatttcacaaaaattgatattccgttggctggcctccttgttcaaattctattttgggtgggcacgcattttttaattaaaaacaaaacaatttgtttttcgcagacc

SEQ ID NO: 4334 - DNA, 1462 bp, Heterodera glycines
aaaccgaaatccaaaaaaaacaattttttttttaatcgatattttagctaattattttgaaattttgacacaaattttgaccaaaaatggctcaaattttttaagattaaattatccatcttctcacagtttcgattatttttaaaattccgaaaatgaggaaacctgcaaataattgttaaaaaattatgttttgtgtttcaaaccaataaattaataagctcagaatccaacatcaacaggaattttgataaaattaaacattttctagctaaaaaattacaaacacatgacataaattttgaggtgaaaatgggccaaaagaatttttttttttaattgtaaaggaaccaaagccttcagaatagaaataaaacgaagtttttagaaattttacggtgaaaaaaaatggaatttctataaaaaattttgcaacatcggtaaccaaattttcggtaaagagtttttttgtgaaaaactgaatagcccgtcttatttgatggattttttttgtaaattttataaaaacgtaatattcgatttaaaggcccattagaaaatgaacaatttttgtaaaagagaggggggggggtggcgtgtaccaactcaaacaaattgagcgtaaaatgacttaaaaatgtaaatagaacccaaaaaatttcacaaaaattgatattccgttggctggcctccttgttcaaattctattttgggtgggcacgcattttttaattaaaaacaaaacaatttgtttttcgcagacccgtgaaaatttctaaaataaaaaacggccttcatttttttcaacgaaaaattggattagtaaattatattttttaaatgcgggggttcaaattccgtttggatggtcccgtatttattttatgaaagcaaaacagtaggatttttataaaaaatggtcattttttcaggaaattttttgttaatttgtaattttgggatggaaaaagaaattcgttccggccgtcaatttttgtgtgtaaactcctcgcctggaattgctggttgatggactgcgtgttcacgtcaatgctgctcagccagtagccgtagcccgggttggagtggtaccagtcgaccacctgtgccaaaaattttaacatacgacaaaaaagccgttttttcaaaaaaaaaaaattttttttttgtttcttttttttgttcgagttttcgccgggcttaaaatttagtaaaaataggtcatgggttagtgatatacaacccacaaaccataataaattgttagaaaaatttctcaaaactattacccttttttcagtgaccaaaaaaccggcaattaatgacctttttaaactcgaattttttgagaaaagggattcagaagcttagctattgcttaaaaaatttccattttcatccccaaacccaaccggcatcgcaaaagcgtccagcgcaataattgtgttggcgtccacccggc

SEQ ID NO: 4335 - DNA, 1935 bp, Heterodera glycines
  unsure (1)..(1935): unsure at all n locations
aaaagtcaactaaactttttgcatttttggggttttccgaaggcattgattgtacgaaccgccgcccgaaaaaaatatatgaaaatccgcaataaaaccttaaaatagtgcgggtcctgctcccattgcttcacattgcgtatcatccgttgctcttcttggtcaaacttgaacatggagtcggccatttttaaacgtgaaaaattgcaaaaaatctaaaaatcataagtgaaatttgtgaagtacccaatctgaaattcagctattttcgactatagtcttgaataatcctttattaattgcttaaagcagagaatatagtttgataaaaatttctatagacttcaaatttggtctgatatggtgaatatatgtattataggacctaataaactgagaatgatcattaaactgggcgcgtaaagtggaacagagcccaaaaacccgaatttcaacagttttttaattgaggataaattgactgttgtagtgtgttacgtttttgttacacaacaactcctaaaatgtatccgattaatgtcttgaatgttttgaatgtaagataaaaatggtattgattcagtccccgtccatttttgaaaaataaataaatcagaatatgaatcagtgtgttttttggggttgatgatcacaaatacgaatccattttgagtttattttaaacgcggacccgaatttgaacgataaaacttgaccaaaaattttttcataaggtattaatcaggcgttgggctgagcatagcgaagacaattttcagaaaaaacaaattttgcgattttgagctttttcttttgcgcattttttggaaaatttttcgaaattaaaaacaatcggacttattaaagggaattagagtcaaaaacctaaatgtcaataacaaaaatagtgaacagggattaattatgcaaattagaaaagatatgaaatcaaaagaaatcttgaaaaattttgttaattagtttgttgaaatttgaaattaaagtgaatgaattactgataaaaaatattttgtgggggggggggggactgttgcttatgtatgcgatacggcacgcaaacgcattcggcttttgtctgcgatgtgcacgcgcgcggagatcaccagatcaccacttcgctgctacgaatgggcgtgtcatccaaaaaaggcaataaaaggcggcaaatctgcgcatttggcacatttcggatttccgcaaaattttacatttttttcgaattccccctatcgtgactgcttgtttagtcttgaatttagcaatttttgatcaaatgcctctaattgtcaaatcaacaaaaatatcccgaaagggtggccgtttgccttcgccaaaattgctgaccgaagccgaactttgggagcaaatccgagacgttcgtcgacatttcgtcctgccttcacaggaaattgccaatgccaacactcaaaatgccgatgaatttacctcccccaattccgttgccaatattcagaaccccggcaacagttctcaaagccaagtcagcctggcgccgaagaccaaataccctccgcttcacccgcgctacttttcgccaaatttccgccgtgatcgccgttcgtttcaccgccactcgtcgccacgccgtgctcctccatatcgtcggcgtatttcgccaaaccgtccgtctcctcgtcgccaaccaaaccgtgtttccctttcgaattccgaattgcgccgctttccttccggtcgtttttttccgcctcctccgatgccattgcccgtggaccgttctttgtcaatgatgcctaattctacccctttccaaccaccacatcagtatcatcgttttgaaatgaatttcaacaattgtaccttgactcaaaatttttcaaaaatgtgattcacttatttttcgaanttgtttatttcattttctgttgctttaaa

SEQ ID NO: 4336 - DNA, 3952 bp, Heterodera glycines
attttcgataattgtattttaatatgtaaaaaatgaatatatttgtgccattcttttctttgattaattttagcaaaaaatcattaaaaagaaatcttttataaaattggcaatttatttactaataaaaaatttatttcaattttttttactgatatttaagtaaaaatataattagaaagattttttataaatattaaataaattgcataataaattttatatttttgtcactttcttaatcgatgatatattaattgattgaatggcattcattcacattacaatctatggcataaaaatgttattatttgattattatgcatttattttattgaaataggcatattaaataatccactaaataatttttaattacatttttataataattcctataaaaatgaatgctttatgtaagtacacttttatttatcacaattattttgcattcaattttaatttaaacaattaaaattatattaattaacatgggtttaattgcgttaaattttattcaaaaatatattttgtctacacaactttgcccgaggggcaattcaaaaatcgtcgttttgatcattgatcacttggcggctccattcttattaccgtatccgaacacagtttttgtgccgtgccaatgttttctgagcccgtgccgcgccattttgacacaaaatccattaggaaaacatacacacacatgctcttcaccagagcaatgacatcatattccatgccaatcccagctctatctatcatatcatgccaaaaactgaaaaattttattccaaaatgccatttaatcccttccagagtcaaaatcccagttgagagcggagacttcggcactctgagagtgttagtcacgtgccccgttttaatgagtggcctcaatgttcgggacggccctcaattagtcattttttgactaattaaattttttatttaatttgtgccattggcggcaatttgttgttgttgtcacgtggcggcacggatttttagttgattaattttttcttcagcagaggataaaacatttaaatttttatttgtccattcgtttttttggagagactcattttatctgactttttttaaatggatttttcggcacaaaatgccattcagatttcgatctaagtctaagtaattttccggataaaaaaattcttgagaatacttcttttaaaaaaaaactccgtttattgttttttcattatttcattttaacagtacagagggacatttttgaatatccctccgctgggagccgaacccaaaccctcttttttctcaaaatggtcgaacccactgagccacagataaaccctcttttagatctttcgaatccgatcaagagaattttgatcatcttattccaagaaaaaagccacctgaattttaatgaaaatggcacacattttcacgcatcaaaaattttttcatgccaaagtgtcggattattaattagaaaattcgacgaaaatgatttttccttataaatgacgtcacgtcatcttactcacatttttattaatggcacattgcttttatcacacaatgccaaatttgtttctctgttttttctttaaattttcatgttttccccgtgccaaattttgtttctctgttttttctttaaattttcatgcattatccaaatgccaaatttgtgtctctaattttatttaaattttccatttttaaatttaaatcaatacactttttttccgccattcagacggttcagacatggattgtggcaacaaacggcctaggacaacaatttcggcaaaaagcctggagacgctgaagctggcctaccaggacagcaagaagccggcacgccatgtgcgcgagcagttggcctcccagaccgggctggacatgcgtgtagtgcaagtgtggttccaggtgggtgtgcggcacggcacggcattgaaaattcattttttgcgctttcttaagaatcgacgggccaaggacaaacgcttaaaggtaaaagcaatccatccatccatccattcatcaatttgcctaattaacctagttttgggactaatgaactaattggctttacggactaattgatcaattaattgattggggcggttgggcggtttttgacttttaagccgccaacaccaaaaaatattggcaagaccatgccaaaaaattattgcctccgattgtttcaacaattttttttttctatcatcgaggcccctttttttgcctggaaacccaagcatttgtcgtgtttttggagtcatcatccgtgtcagggatttttccggttttgaaaaatttgtgccggattttttgggatttggcgatagaagcattttttttcttatcatcgagacttttctttttacccagacatttgcaagggtttttggagtcaccgtgccagatttttgacagatttttcccgattctgaaaaattcgtgccgcaatttttttttggattttaacgattttctatcagtttcattgcccccagaaggacaacgagcgtcggttggctgccgcccatcaccagcaccaacatggcggcggtggcgcgggcgtcggtgccgacccgcaccaccggtccggcagcggttcgaccgtcagcagttctggcggcggcggctgcggtggcggtcccggctccgtgtccgggagcagtgggatgccaatgggcactggcgccatgctgtttggacgcagcgggggctccggcggcggcgcgctcggtgattccgactcgggcgcgtccaacgaagcggaaagtccattttacggtacgcggtaggcgagtttttacatggcattgcctactgtaatcgccctgtttgtaccagaatcccgagaattttggcaaaacccggtcctgtgtaccccagtacaaatcccctcatcagggatgccaatttaaaattttggccagacagaaactctgacaatattccctatccggcgttttttttagttcccattctcgaacccatgccacggcaccaattcccaaccctgcggagttctctgatcccggtcctaattgtcgtgccacggcacatattctgatcccggtccttattgcgtgccacggcacggcacatattttgatcccggtcctaattgtgtgccacggcacatattctgatcccggtcctaattgcgtgccacggcacatattctgatcctgattctacggggagtaaatcccgttaacaaatccccgggggcattttccggtcccgagcatcacaagtgacctgaggcgtctaaatcatcatcttattggggtggccaaaactaatttgttttttctgcccttggaccaaaaagtgatcagaattaaaaacaatttgtaacgaataattacttttctttttaaattattttttgtacgatttttttttaattaaaattttttttttacatttttttagcctacacaaaccccgaagcttcctccgatgttgatggtcattcgatgagcgaattttatggtaattaattaaaacaaacatttaatttaatgtaattaatttaattttatccgcaaaaaattccgcattttttttttaaatttttcgttaacattttttttctggctttccgtttccgccaaaaaaaggtggtgacgacgacaacgaaatttcaatcttttaattaaatttgtggtctccccaccgccttttggtgcttctccgccgtccgtcatagtgttattaatccctttggcttaatcgctttaagccatttattttttatttttttagtaattaatccctttggcgatatttttattggacgaaacgccacataattgtcaaacgttgggcggtggcgtaatttttaaattgaaaaacaacgaacattttttttgctgataaaccaatccactctgatcactgatctctaagctaagctgttaaagaatttaattag

SEQ ID NO: 4337 - DNA, 2519 bp, Heterodera glycines
cgaccagcagcagcaacagctcactgcagcaactgtccgcaatgatggcaccgctggtccaccaacagcagcagcaacatgcaaaacaggtagcacagtgtgataagagtgacaaacataatgatcagtgatcatagtgatcagtgatcagagtgacaccagcagcagttatccgagtaaccattagtgataacatggtgatttattgatagcagtgatctgtgatgacaaaaagattagcgattagagtgatgccagccgttatcagattgatccattactgatagacggagatcattggtatcattgatgagtgtgataaacatagtggtgatcagtgattagactgataactttatgtgtgaatagagtgagaccagcagagtgattaattataaagtgattttgataccatatcagtgatccgacacaatgccaagaaaatttttgaaaaatgccaatttaaacgagtgccaatttttcattcagtcccctctccaacaacagctgcacaacggttcaccaccagcagttggccaccaacagtcatcgttgtttttgctggaacagctgagcgggcccaggacgccgttgggcggtggcgccggaggcgcaggaggaggaggtgaaaacaatggcacaaaaatgccgaaaattggcgcttagtggtgcactaagccatcgcaaaatgccaatgccaattttgaatgccaaagtcttaaagtcacacaattaactatttatgtattaaaaaacccatcaggcatgaacggcactggtgccatgccgtcgtccgcgccgccgatgtccagtggcaccaccaccgtttcgccggcaaacggatgtcatgccggtgcgcaaattatgccgtccgccgatggcggcatcattggcacagtgggacaatcgatcggtgccggtgccaccgtcacaaccaccgctggtgtcagtgttgttgatcaccaacagcaacaatatttgatggctgctgcagcaatgaacggatttggtgggtttttgagaagtgatcaggaaaattttggtttcttgatcaataaatttacaaagcaaaaagtgatcggaccgtaaaaacttatgatcattaaaatagaaaaggtgatcagaaatgttttattagtcggcaaatatttaaaaaagtgatcgaaaatgataggtatattttgcgcataaaaactgatcggaaatgttttttgaccaattcaaaatattgcccaaaaatataagaattaaatttttggtcttttttctggccttattacaaaccaatgtttcttcgtttttcaatttatttcatgaaataaatgcattttcaagtgaatatttaacaaaattttcagccaaatttaaatttaaatcattttaaatcattaattaatttatttatttattaattattattctccaccaatttttagccccaccccatcctcatcttggccaatttatgctgaatggtggcggcgcgccgccgaccgccatgccgccaatgcctgccgacttttatggcttccccgggtcggcggcggcggtgaaccacgggccaatgatggcatcagcatttgccggcggtgccatcgtcggcgccggaggcgctgccggtggcggtggcccaccattttcgccatcatttcaccaccaaaatcagcatcatcataatctcctaaatcagcatcaaatgcaagcagtagttgcagaacaacaacaacaacaacagcagttggagcagtacatgccacaccaccaacaccacctgcaccaccaccaccagcagcaacaacaacagctgcaacagcagtaccagcagaataaccatgcggcggcgaccattcttcaatgaaaatttcgcaaaaaaaaaaatgggaaaaaatgaaaattcctaattttaattagacgtcacaattgaatggcatggcatacatatatgtatttgcttatttcatcataaattacctgatcaaaacatcatgaaattatttgaatgtagcgatttcggaaacataaaaaaaaagttacggtccaaaaaatattaatggttaaataaatatacttacatacttagttgattgaactcataaaattttgtcttggactcataaaaggccattggatttctcgaacctacgtttatcgtaatattcttacggtaatttctcatatcaccagtggatgatagataccgtgttgaacaaaaaatcactgttttgatcagcgccacccgaaactatttgtgttgtgtattgattttatcgatcgcgctagtccattgtaatatcacacattaacgatccaatcattcatccatccatccacatcaatccatcatcaatcagcgcaacaataaattgtgattttttgattatttttttttttgtaattctttttttttgcattttttggcattttgtacatttttctaatcaattcaaattttgtgttgcttcactcaccattttccctgatgattattcttttttttgccgtcattatctctattacag

SEQ ID NO: 4338 - DNA, 3253 bp, Heterodera glycines
atggaaaaactcaaaaaaaaaaattattacattttttgatcttgatcagagatctcgagctatacaaataatgcgatctgaacccaaatagtgaaatttttgtatcattttttttcatttaaatgttataacccaaaaaaatgaattattttttttaaattattttttttttgattttaaaaatttgaaaataaaaattttatttaaaagtattaataaattttttaaataaggctttttgggaattcattcctgctgctcattgctgttgtcctccatgtatggcatttcttcgaccaccaattttacggggtccgctctctgaattttttttttttgaattttaaaatatttaactttggggttagttagaattgggaattgtttgtgtttccagttaattagctggggttaattagcatgggtttggttaattaataactaatcatcttttgttaaaaatatttataatatcttttgacttttgctattcatcttatttgtttgtttttttggttaacttttggatttagaattgatttatatatacgaaattaattggattaggctgtttggttaatgatagttaattgagcgcgaccttttgaaaaagcctggacctgtaagtgggcttgggtttctgaaaaaaaaccaggaaaatcaaaggtccaggaaaacccaggttgccaaatttattaaattctttttaaaaaatgctttaaaaaaacttccacaaggaaaggggtttcaaaaatggaaatgccaagaaaattatgtaaaatttatggattttttaaaattttttaatgtgcggatgccatgaaatatttcgttaagatttgtaaagaaatgccaaacaattatttataacccgttaaatatggcataaaaatttgttattaagcatgtgtgtgaaataagcaagcataaagacaattttgccggtaaataattataagcacaccgcaaccaaaaaatgatgccatcgccaaagtgccaattttgagcaaagcggcatcattttattgatcaatgtttttttggtaaatgcaattgctctgatcactctctgattaatccattgaatttttgttatttgcgtttaaaaaattttcagttttttttttgaaaaacggcaatatttcgttaatttttttttttggcgaatgccctaattacgtgagtccaaaaacgccgcccgcataatttccgtaattaagaagcctagccctgatcagtagtgatcagagtttttgttttgctcccagcaattaatcagcatgttatcactgttatcgtcattaatcagagtatccgcatcaacaacaaccaccttcagttgcccattagcgacggcgccggacgatgtcgccggactaattggcgtgggcggagactgttgctgcaggtggttgttgttgccgggttccgatgacgcgtcgtcgcgcgttgcgctcgcggaataatgatgttgttgctgttgcggattatgatgcggatattgacgatttggagtgtcataatgatgctgatgatagcccccatcgtgttccggtgacggcatcgcggcaacaaacattccgctgcctttcaccggtgtgccgccgcgtccgccgctgctgttcatctgaatttggtaatgcaaatcaaatggcacaccaattaggggctaattaataaatagcccctcttcattagaacaatgtaaatacctgtctcagataattgccataattaggcttaattactacaagcaaaagtggatattatactaataagatgaccatgtgaaaaaaaaagttttaagaaaaagctcttttatcgaaaaaaacagaaaacaaaaattggcacttttacaataaaaagaaaaaaaatcggaaaatttttggcacaatttcacttttctttattattcattcactgctcggacttctgtgccggccaacacaatttttatggaaaggaagtgacgccatccggcacaacggtttggcacaattctttcggtgatccgaaaaataaaattttgaaaaacatttaaaattttttgaaatttttgccatctacaaatttgatcaagacagccaccattacagatcacaaatttcctgatcagtcagtgtcttgggtgttgctcagatttggtcatcaggcccaaaaacgatacagtgggtgccgttacggtatttctacagtaccaagtacgaacaagggcacaaaacaagaaaaattctttttctggaggcttgcttgcctactgaaaaaattcaaaatataatttctgcaccgatctatccaaccaatcaataatatacagtacctatcatgccgtagcaactacgccttttatgcaacattttccccgattttttttggttttgctcaccatcagcggtgccgtcgttgacgcagccatgccaccgccgccaccatgcaacggcgtgccaacatgcgtgtgccgcgttgatgttgagtcgaccatgacgcgtggcggtgcattgtccgcgccaccgcctccgttcagcgcggccgcgtgcgctgcccatccgtccaccggccgtgccgcttggtaatggcgatagccgctggtgcttccggcaccgccaggcgccgcagcaatcattggcctgccaaggctcagcgaggactgctccgagtcgtcggaccggtgctgaacacgcgggaggggaggggaaaacggagacgttttgcggtgccatcggcttatgtgtgggctttacccaacggccggtatggtgaggctcgagaatcttgactctatatcccagatcaaaaaccttactgatcctttgattgggcccgaaatttttggcgttttgttcgagagttgaaaaattttagggtgagctgacgaacctctatttacaaatacaatcaaaattgagttatataaaaaaaatatttttatgggaaagtgaacgaatgaactaagtattttgaatttttttttgcattatgccataaacctagtctcattagtgagtggaatttaaatttttgaattttaaacaaaatgccgaaattttacatttagaaaatcttcaattttcgaattttttttttttcacaattctcgagcctcatttttttggttcaatctcttggcaaaatgtgtttacctttttataacttaaaaggatcacctaaattagggaatagtacatttttttgcattcaaatttgaaaaatgttttttaatttaaaattgaaatattaaaaatgccattttttg

SEQ ID NO: 4339 - DNA, 3175 bp, Heterodera glycines
tctagagtcggaaataattagtgacagtttgataaaattaaagaagcatctttctaaaaatttaaattcaaaataacaaaagaaatagcgaataaaattgcacgaaaatttggtatttccgcaaaaacaattcgagcgtggaaaaataaattccgaagttataattaattattttttaataaataatttatttattttttatttgaattgaagggaaacattacggcattgtcgaaaaaaattggcataattaaaagaaaaatgcaccaatgctaaacgagccgattaagaagaatgaatgaaggattgagacagaagaataaatagtctatatttatttagtttttagtatataaaatactttcgctcttaaaatagaaattttatgaaaataaactttttttttaaaagcgaacattttttcggggtttttatacttaatgtgcctattttcagttaaaaaatgcaataaaaacgaaaaatgcacccccaagaaagacccgaaaaatttcctaaaatacacccctaagaattgaatttccaaaatttgatcccaaaaatttaatatttttttcttattaaaaatttttggttaaaaatgttccttattcgaaaaaaaactttaaaatatttaattaaaatttacaattgaagtgtttaaattcttacgtgttttgctacctaaaaattgttaataaaaattattatttgccttttttttttgcctatttgaagattttgtgtctatttaatgcctattttacgactttttgtgcctaaaaaaggaagcactccctactctttaattaattaatttgaatcctaatgtaagccaaatattttgaaaaaatttccccttttttaaattaacaaaatttttgcgaaatcaattgccttaattggaatttacgtggaatttgcaggaaatacgcacgcacattaaggcatatttccttcgctatttaaatcgttaccaattcatacgtcaattaattgcaaaaataataattttttagcttcatcaataaatgccttttttaaatatttattttctgctcctttttcttctcgtcaatcgcacattttgcgatgaaataggtcattaaaaatgccgaaatttatgaaaatatttttaaataaattaataaactttttttttagctcactggattgaatcgtgtaaaaaaattgcacaaaatatacattcattggccacggaattggaccaaattccggatagtctcgagacagaaaaaataattgaaaaaataaacaaattaaagaatttcgcagtgcaattgagtgaattcagaaatgacgaaccaattttgttggaatcgttggtgattgagcatgggcaaaaaattggccaattttgtcacaatttgctgatctgtgatgcgaaggatggtgaagtgatccgtgaaaggttacggcacggaattgaccaacaaatggcacgtgcagtgcaaatccggcaactgatcgacaccatgctaattgattgggaaatttggccaattcttcacaattttgaactcgccgaagacccgtccaatgcggtagcttatctgattgacgagttgggccagaaaatcgggaaaatgcacaagctgttggccaactgcggctcatattacaacactgacccatttgatgaagcgctgcgacggctgctgatggtggccatggacgaggagcaaagtccgatcaaaaagctggaccaatgccgtgccattgtgccaaaacttatggccaaatccgtgcaggaaatgctggagaatttgctaatggatctgttagagccgacaagtccatttttcggcatgacctttttggcagaaattgcaaatgaattaaatgttgcggaaaatatttgtgccggaattttgcgcagttcgaaactttcgccgatggcacagtttacggtcaatgagaaacttcaaaaattgagagcaatggcaaaagcaatgtttttggaacaatacagaacaacaattgaggaacaaataaaaaacattggaacacaattgaaggacggaatgggccgccttatccatattggtatgtaaatggatatttaccagtttaaatgaattagtctcttatttaatgctaatgataattcttttctgtgctcaatttagtttaatgatgtaccaaaaatttacaacagacaaatacattttaggtgggggggggagtcaatctctcccctcctcgatcacaaatgagcttagcaagtcaaggagggggtcgcaaattttgaaattttcacaacaaattcattaaaaagtccaaaaaattttcccggcggtgcctatcggcaccaccggaccccaaagaacccaaaaaattggctaaaaatcgcaaaaagtggctattttggtgaaaatctgctaaccaattcggcaccgccggccctcggttcctgaaattctttttggaaaagcgcgccgcaaaaaaaacagtttttaaatgaaaaaaaggccatcggcggcggaccccttttctcaaaaatcccgaccccgccccctttttaacgtatgacagacagacaagcaagggcattccgacactcagatttttgataaaacccaaataaatctagaatctggcatgtttcataaaacccaaataaatctagaatctggcatgtttcataaaacccaaataaatctagaatctggcatgtttcataaaacccaaataaacctagaatctggcatgtgtttttcggcaccgtgggttctaaactattatttttttagcaaaaaatttcctgttatattgaaatttagtataattcctcaaattaaaaattaaaccacgcattctttagaaaaaggaacaatgaaacgagtgcaattaattgaaacacttaaaaatgttcaaaatttgttcgtaattactcataatgagttggcaatgattgaaatgttggaaacaaaaaaagtaatggagcaaaagttggacgaattggggcaaataatggcacaattgcaggacaatgaaaagaatggaaatggcacaccgaacgacgaagacgaccaagtggcaataactgaacgaattctgagctgtctgaatgtcgaacccatcgaaaaaggcatgaaaaagaaatggccaatttcgcgaccaaacatttgttctaattcctttgatttattgccaa

SEQ ID NO: 4340 - DNA, 5477 bp, Heterodera glycines
  unsure (1)..(5477): unsure at all n locations
ccaaagaacccaaaaaattgggctaaaaatcgcaaaaagtggctatttntggtgaaaatctgctaaccaattcggcaccgccggccctcggttcctgaaattctttttggaaaagcgcgccgcaaaaaaaaacagttttgaaatgaaaaaaaggccatcggcggcggaccccttttctcaaaaatcccgaccccccccccccctttttaacgtatgacagacagacaagcaagggcattccgacactcagatttttgataaaacccaaataaatctagaatctggcatgtttcataaaacccaaataaacctagaatctggcatgtttcataaaacccaaataaacctagaatctggcatgtgtttttcggcaccgtgggttctaaactattatttttttagcaaaaaatttcctgttatattgaaatttagtataattcctcaaattaaaaattaaaccacgcattctttagaaaaaggaacaatgaaacgagtgcaattaattgaaacacttaaaaatgttcaaaatttgttcgtaattactcataatgagttggcaatgattgaaatgttggaaacaaaaaaagtaatggagcaaaagttggacgaattggggcaaataatggcacaattgcaggacaatgaaaagaatggaaatggcacaccgaacgacgaagacgaccaagtggcaataactgaacgaattctgagctgtctgaatgtcgaacccatcgaaaaaggcattgaaaaagaaatgaccaatttcgcgaccaaacatttgttctaattgcctttgatttatttgccaattctgttgacttattctttcttcatcgtcaaactttcttcattatgtacaagtttagtgtttatagtaaaatactgttgcttataaaaaatatataatggattttaataaaaaaaaatatatatataattnggtttcaattcaaaaaatttgattttaatttattagggtcaacaaatccattttgagacatcccacttttctaaaaattagggatgtttaaatctcctagcgtgaaacagaccagcaatggctggagacaaaggatcgcgatcagcatttcacgtatcgaacctgcgcaattttattttgcgcgaatcgcgttttcattgaaatttagaccacgacctacatttactaaggagtatcatttgaacgataataaattaataatcggagcgaaggattttcccgaattttaatttgaaaattcatttctacccaaaaaactgtttctcctttttctctttctttggagtccaattaaatttgtgccattatgaccacttttttggtctatttgcagaaattaaaaaatgccttattaaaaccttcgaatgatattaattttgttttagtttggaagaataagtaagaaaaaaattgtggggcaaaacaaattttggtccatgaaaaataaaattaaaattattctaaaaatcaactgtttaatgaatcattagcgctaacaataaaaaaataggcaaacagaaattgaactatgaataaatatacgaatttaaaaaaacaaatatccttggtcatcatttatacatattagagcccggagcaggaccggatcctgcgcaggattttgcaggatcccagtccgaaatcctgcattttttggaaaatgcaggatttgcaggattaatccggccggatccggtccggcaaaaaattttgaattccaatcctgcaacaggatccgcaaatttgatttttgtgcgggatccggcaggatccgcatacattctttgaaaattttaaaaaacggaatgccaaaatttttgaataaatttataataaaatcaatcaaaataaattcaattttcatctcaaatttcaccagaatttgcaaaaaaaatttcccggcggcgcctatcgacaccactggatagacattaatcctgtagaattgagtcaaaaggtgtgacatttggtcaaaatcagttaattaattgataaaattttcaaaaaaaaattttcagacggcgcctatcggcatagacggacccttttgttcctagtttttgaaaaaattgcgccgaaaaaaagcatttttgaaaagcaaaaaatagtcaaatttattgacaattaacagatttgatttccgatctctttttaccgtctgacccattcgaaaaatcttagtaaccttttaatgcatcccgccagcccctaaaatttctttttcaaaatgtcaggtattttttcttttttggaaatttaattgaaattttttcaaaatttctaagaatccgcaattctgcgcgggatcctgcaaatttaaaatgcaggattaatccggtcgggtccggtcctgcaaaaatttttgaattccaatcctgcaacaggatccgcaaatttgaaatttctgggctctaatacatatgtattaaagattgtaagacaaaatggattaaaagttttattatttggtcattttttgctaatttatcaaattttaaaagtttaaaatcactttttttataatttttgaaattaaataccaaaaataggatctttcggatagacaagcgcctccgggcaaatttcttttggaattatttttagagtgcaattttaaatcacaaaatatgcttgaatgtggcgaaaattgaaaaatctcaccaataaaaatgccattttgagcccttcttcctagcaaaaaaatatggaaacgatggcccttacgtatcatttatattttaatagctgatttcaattcgtccaagtcaataataacattttcattcttcaatgtgcggaacagctgaataaaacttttgttaaaatttggtacacctaactaaaaacagcagaaagggcataaacattattattattcagtattttaattttaattaaatttatttcatttgcagcaaatcgagcaattgcaacaaattgggcggacaccctttttaattggttttggcacttgaagtgattttgatcgtaaaacttgccgtataatccttgatcgccatgcacatcacatatttattggagcaaacgtgcagcacggctttgcacagcacagccccgtcactttcaatgctctcaacatggcatttttgttcatttcgtatttcttggattagcctcacatcgtcaaggctcataatcttttcgaatggatcttcgaccacgcccgtctcataagtgaccacgggggtgccgtactttccatgttttgccaacgcgtattcaatgcgtaattcgtgcactttgagagaacactcattgaactgtcctagaaaagtaaacggatcaaagcaaaattataagtgcattttgaattgaaccatgtaaaattacggcattggcaaaaaattcattatcatttttgtacaattaaagcagagatgcccttccttatttggaggggtcggaactttgaaacttaaaatccttccttctatgaatcgtccttatttcagcctaacattcattttttttctttaattttttgcattcggtaaggattcttttaaaatttaattattttgacaaaaaagaaaaattattaaaaaaaatcatccggtttttttgagcaaagcctttgatttttggacaaaaaaagaaaaaaaaatactaaaatttataaaataggaagtggcacggtgatgccgataggcgcggcaggaaggcattgataattttggactgatttttaacagtttttgtacaaaattttctgttacacaggtcgcccaactgaaaattttcaaaatcagcatttggccgacaaacaatcagcattttggaaaattttactccaaatgaaaaaaatcaataaaaaacgttcattttttgtggcgcgtttttttacaaaaactttttgggcagggggcaggcagtgccaataggctaaaaatggccaattttaagagatttttcccaaaatcagcataatcagcaaacgttctcaaaaagcatcaaaaaccattaaattagaaactaaaaaaacaatcatcattgaccccttgaaaagcatcaaaatgatgattagggttataagttgtatgcactaaaaaatgccaaatatgcactaaaaatcccccaaatatgccctaaaaacccgaaaatccctgaatatgtattaaaatatgtttttaaaaactgccaaaaatgtcttttaaccctcaaaaaatgccaaaaattgtatataaattaaaaattgactttaaaccacaaaacaagggctaaggagcattttttagcgattgtaaaaatattgaatttccaaatttataaatttttattatatgctaaaacaaaattacctttttatataaatttttttccaaaagtttttacaaaaatttaaaaaaatttcaatttttaagggtctattttttaaaaaaattctaaaaaagtcgatccttagggaggtgtatttttcgcttttttcgcatttttcttatgaaaatttgcaaaaaatagccaaaatatgctctaaaaatgcaaaaatggccaaatatgcatttattctcaaaaacccccaaaatatgcttttatatgcactaaaaaccttcaccaaatcaaaaaattttaacgcagaaatgctatttttgagccccttcttcatagcatatgcgcagaaaaaaaatgcaaaatcatacaaattataaccctaatgatgataaatcagcagagttgggagccctgcctgctgttataaaattataaagtgtttactataaaatattaccgtataattgaattgttttgtttttgaatgcgtgtgaaccgtttaatttcttgtcgatttccacaaaattttttggaaaaaatttctcgggtggacaatttccgtcgaacaaattgcagacaaattcgtacacaaaatcaacacaattgtgcccatctttctcataaccataagaccatccgtcgtacactggtgatcttgcgaaaaaatttcgttgactcatctcccaaaataattcatccgctttttttgtgctgacaaaaaaaggcgtttcaaatgactgggcctttacggcattgtcctcattagactcattattgtctttaaaatgattgctgaaaattgtgatatttttacatatatatatttttaacttacaaaagtcggcgacgcggcccaatggaagtgtagtcatattctgaaattttgtattggataaacgaaaaaaaattctattattcaaatttattaaattctgaggtacttttatagagagtttagggccacatgaatattatttttttgttaaaagacaaaaaatgtacatgggggtttttggggttgctatcacgaatatgacatccatttcgaccaattccgaaccccggactcgaacaatggtcgaaaatccatttttcaccaagacccactcacatgcagatttgggcattttgctgaatttggttgtgttgaattttaaatgatatcagaaattcgggcgaactttac

SEQ ID NO: 4341 - DNA, 1761 bp, Heterodera glycines
agggatgcgatttttaggcacaaaaaatcgcgaaatagccattaaataggcacaaaatcctctaataggcatttttgtaaaaaaaaaacattgtaattcttaagggtgtattttcttaaattttttcgtgtcgattttttagggtgtatttttcattttttttgcatttttccaaaaatggcggaataagcaaaaaaataggcaactaggcattaagcacaaaaagtcgaaaataggcaaagttaggcattataaaagtcatcgtagaccccccaaataaagcggaaaatgcgtttttcgtgcttatctgtgcgtatcaatcaagtgcgcaaaaattttaggcatttgcctaaaaatcgcctccctaacattatcaataactggtttaatactcctcccccaataaattttggtgactttgcttgttgcaagctgcgcgaattgagatttgttttgtgccgctttctgcaattagcatgtaatttgcagcgattgtcccgtggtaaacgctttgccatttaatttggtctttggccgacaatttgccgtcggacgaacagcaataaatgttctgtgccaagctatcctttactggaatagtcaacatatcggtgaattgatgactgattttggcaatttgccgttcgactgatggcgacaatggtcgtggcccacaataggccaaactttcattttgaaagtgcacagcgcctaaaaaggacaattaaaaacccaataaatttgtaatgtttttgtattttgatttaatttttattaaaattaaaatttaaatgcttacgaatgcatccctccggcacggaatcatttgcagcgaattccggcactgagaagtaacgctgctgatagaaaaggccatcggtggcaggagttggacgaaagttttggtcggcagaaatgcaacaaaattgaacagatgggaaccattggaacccttttgggcattcggaagtgctttttggatttaggccaatagggggcaaaaaaactaaaaatttcacaaaaattaaaagaaattaaaattaaaatttaccatagcaatcgaattgtgatgagaaaacgccgttttgaagtgcgaaagcggcaaatagtgaaagggataaaaaatggaaaatattttccatttaaatttttatcagctttaaattgaaaatttattaaaataatttttacttttcttcaatttcattatttataaaataaaataatattattaattttttatatgaattatttattacacgccccacacaatttttccatgttttaagaaggatttcaattcaataattcaagaaaatcaatgtaacagattactagacaggtgtgtcaatagtcggctttttaactaggataaagggtgggtgctaagtcacttcaaaaaaagtgcaaaaatcaaaaatcagatttttcctatgattttatcattttttaaattataaatatgttaaaatttgattaaattgatgcttaaatacacattcatttagcttgagttgaagcggatacatttacatataaatattttcatattttatataatttaagctcatttataattgtttccatttgtaattgaactttcaaatatttaaaaaactcaaagtaatctttctaatgattttatttatattatggttcttttatttgaaatccttccaacaaaacttctagaagaatgtgtatttaagcatcaatttatttaaattttaacatgcttgtattgtaatttaaaaaattgag

SEQ ID NO: 4342 - DNA, 1086 bp, Heterodera glycines
ttaacagacgcgcccactacgaaacagtttactcagatggagagaatagatttgttcgttacatccaaatgccacgttcaacgtctgatgtaggaatgatgtagtctaaaatgaatttttaacagacgcgcccactacgaaacagtttactcagatggagagaatagatttgttcgttacatccaaatgcaacgttcaacgtctggtgtaggaatgatgtagtctaaaatgaatttttaacagacgcgcccactacgaaacagtttactcagatggagagaatagatttgttcgttacatccaaatgcaacgttcaacgtctggtgtaggaatgatgtagtctaaaatgaatttttaacagacgcgcccactacgaaacagtttactcagatggagagaatagatttgttcgttacatccaaatgcaacgttcaacgtctggtgtaggaatgatgtagtctaaaatgaatttttaacagacgcgcccactacgaaacagtttactcagatggagagaatagatttgttcgttacatccaaatgcaacgttcaacgtctggtgtaggaatgatgtagtctaaaatgaatttttaacagacgcgcccactacgaaacagtttactcagatggagagaatagatttgttcgttacatccaaatgcaacgttcaacgtctggtgtaggaatgatgtagtctaaaatgaatttttaacagacgcgcccactacgaaacagtttactcagatggagagaatagatttgttcgttacatccaaatgcaacgttcaacgtctggtgtaggaatgatgtagtctaaaatgaatttttaacagacgcgcccactacgaaacagtttactcagatggagagaatagatttgttcgttacatccaaatgcaacgttcaacgtctggtgtaggaatgatgtagtctaaaatgaatttttaacagacgcgcccactacgaaacagtttactcagatggagagaatagatttgttcgttacatccaaatgcaacgttcaacgtctggggtaggaaggatgtagtctaaaaagaatttttaacagaccccccccctacaaaa

SEQ ID NO: 4343 - DNA, 2150 bp, Heterodera glycines
cagatggagagaatagatttgttcgttacatccaaatgctacgttcacgatctggtgtaggaaggatgtagtctataaagatttttaacagacgcgcccactacgaaacagtttactcagatggagagaatagatttgttcgttacatccaaatgcaacgttcaacgtctggtgtaggaatgatgtagtctaaaatgaatttttaacagacgcgcccactacgaaacagtttactcagatggagagaatagatttgttcgttacatccaaatgcaacgttcaacgtctggtgtaggaatgatgtagtctaaaatgaatttttaacagacgcgcccactacgaaacagtttactcagatggagggaatagatttgttcgttacatccaaatgccacgttcaacgtctggtgtaggaaggatgtagtctaaaaagaatttttaacagacgcgcccactacgaaacagtttactcagatggagagaatagatttgttcgttacatccaaatgcaacgttcaacgtctggtgtaggaatgatgtagtctaaaatgaatttttaacagacgcgcccactacgaaacagtttactcagatggagagaatagatttgttcgttacatccaaatgcaacgttcaacgtctggtgtaggaaagatgtagtcaaaaatgaatttttaacagacgcgcccactacgaaacagtttactcagatggagagaatagatttgttcgttacatccaaatgcaacgttcaacgtctggtgtaggaatgatgtagtctaaaatgaatttttaacagacgcgcccactacgaaacagtttactcagatggagagaatagatttgttcgttacatccaaatgcaacattcaacgtctggtgtaggaatgatgtagtctaaaatgaatttttaacagacgcgcccactacgaaacagtttactcagatggagagaatagatttgttcgttacatccaaatgccacgttcaacgtctggtgtaggaaggatgtagtctaaaaagaaaatgtattttaattctagtttgttgcctatggattttacacgttcgctaccaaaaatactgcagcgcatgtttctcccattctgacaatgcaaatgtaatgaatgtccctttcatgggtcggccagtcggtattatattggtgcaaccggtgaaattcgtgtacgcatgaattgaacacttttataaaaagaaaattaattcttcattgaaattttgagtatataaaggaagaataactttcattcactcactttatttcattctgttttcgtctccaaagcatcctactgcctaatattaaataacttctttagaatgaacttctttatcaaatttgttttatgcgttcttatcatagtatttgttttgcttttatttctttccaataaagtttcgaacaacgctggaacctgggtgctcttcttgtatgttctattggttttaacggtagttagaaaatactgtttttgtaatcacatttttccatacaggttatgccattcgttgttggaattagtatgagcttcttcgctacctgcgtttcagttatcgcggttaattgtttggctaatgttaaaacacatatactaccttccttgattaaaggtgaccgccattaaaaacccgactcttgttgaagcgatcttgcgccgtgttgggattagcagtgccagttttcgccgcattgctcaaatcgtttttcgccaatttcgcattgctcgccgttttccgaaccacgaaattgaaaaccagcaaattgttgatgcgcagccacagcaaaatgagcaacaaaataatcctcaacagcagaacacggctggcgccggcacgcaaaacgtcgcttcgaccgccttaactcctggccagcgttctgagcatgctgtaagtcaatcattcaacagcactttcttaactccaatcacatcaattcaacctttaagcaagctccgccgcaagacaacaccaaaaagtcgaaaaagaaagaaaggaaaaagaataaacaaattaattgcgttgaatgaggcgatgtgttcgttgtgttttctttacctgttttgtatttcgcattgtcaatagtccacgaaaatgttgttgccttctgtttaaaatggacgaagcggtgc

SEQ ID NO: 4344 - DNA, 3766 bp, Heterodera glycines
tcatccaagtgggcacggattagagaatgaatagacaaatgatttgacaattgaaaggcacccatcggaaaaatggtcgaattgaaagtggaaacgatgcaaatggaacaaagggacaacgccagcgcacgggtggcaccagcggacgcggcacttgccgagttggcccccttttgctacgattacgccgccatttatgacggaccgaaggtgaagggatggccaaccccagcagaaggaatggcccgaccgattgcttcttcccatggcttctccaccgtttgttctcttctttcaaggccacttcgccctttctgatgcggcccaattgtgccctttcctctgattcgacgggcgatcagtcgaagccctcttttgtttcctcccaccgtcgcgtcgatgtgtttttcgtttcggacttgagcacagaaactgccgggggctttcaagtccatttttaattaattttttaactttttatcaattaaaaggtctctttccgtgccgtcgatgctccgtgcggaggcgtaaaattggcgtcggaagaatggcaggcggtggaatacagcagcgaaaagacactgacacgcacaaaccaacgccacaaacggtcggttttgaaatgcaattgaaatgccaaaaaaaggtgccgttggtttgtctattcggatgagcgtcagcctgtggaagtgttcttcgaacagttctcttttccttctacgagcggaaattgcgtggacgaattcgtcgagttacgcgacgttggcgcattggccgagtgcgaacatccgtcctgtgccagggaggagagccaacggaagggcaacaccgtgcggagttgcggcaaatatgtcagcgcggaaggggggattaggatttagcatagcattttgagaggagcggaatggatttgggtgtatggaagatggcactttgaaatccggggttcgaaaccagccaaaacgggtgtcatatttctgaccattgtcagaaagaccaacaaaactcataaactgaactgaatccatgttcatatgttaacaccatttggtttttctttgtttaggctcccagttggcacatctcttccacttccatcctccaaatcacttcttccgtcattttgcaaagtcaattctctgccaatttccgtctgcgcttccgcgcgctctccgcctgcaaccgaaccatcgaaattgatggcaacggtaatgaggcatcaatttaagcatccgctaattgctttagcccccgacggcgttagcatcgcttcgggccgtctcacctcgccgcacttcccccactcgccctactcccacaacaattcgtgctccactcatctgttagctgctccctcacatcgcattttcatagtgttcaaaacgtttcaattggagcgcggccgttacatcgcccgtttgttggcgaggccgcggtggactttcgaccggagttggctcgaccgcaagagacgctctgttcagttgcttagcggcagcagcgggcgacagaactgcgtgtacgactcgctgacggtgggcgtggggacggacagctccaccgctgtccgaccattcattcattcgcctctcatccattgattggtcagatcttcgccaacaattcgtcgcttcccgtcggattgtccttttgtggcgattggctgcctccttccgttctgtccgatcgcaatgagctgctcttagagcttacaactgatgcttctgttgccgggagtggatatgaactcagctattactccgtctcttcgggtcggactgattgatcacttttggactgatcactttccatcacccattctcctcatttagtgtcctcgtcttcttcgagtcaaattttcgaattggccccatcccgcgaacgttccggcgcgttgacaagcattggctaccccggctcttacccggcttccgcactgatgaggttggcacgcatttcctcctccccccccccaattgcattttgctttagggcgacaatcatcccgcccattggacttcgctgtgttgccgtggtgctccgcgctgactttggcggcgactgtcgcgagagagatggcagtgagtgccaatagcgaacactccgagttcaactctcattgccctagggttccccgctcgttccgctttttcccctctcgattcggtctctcgtgcgtattcggtgcccgacttcgacagtttggactgggacccttggccttgttcggtgagttggcatttacttttgtttcagagtttaatatttgccccaaaggtggacactcctttaaaattgtcgatccccgtcggaaaccaactgatcgttgaatttcgcagtgattcggaccccgagaatgacgggagcggattcagaatgacgtgggactgtgaggacatccaatcagtccaactctaacaatagactgctgattatagtttaacactccgcattgtatttactcaaatgaatttttaatgctagaaaatgaaatatttgaattattaattaataaaggaaattagtaaagctttgaaggaattgttctctgttgattatatgtgttgtgagcacaattaatcggaagtcaaagtcttgtgcaaatcggcgaagggaagcaatttcggcatgagtaacaccgccaacgaaacagacgagaatggcacgccggattctgttgtcgggtggtcgcgcgtccgggtttgtgcagtgcacacacttttcaccgaacaatcgcttcaactgcgcctcgtcccatcccttacaaattaggtatcgctttttgtgggttttcccatggattgcccttttttccctcacatttgtcactgtgccgtgcacaatgttcgaaatcagcggaatgtacgcctctgagaacgcataagccaaattccgtctccagtttactcagatggagagagtagatttgttcgttacatccaaatgccacgttgaacgtctggtgtaggaaggatgtagtctaaaaagaatttttaacagacgcgcccactacaaaacagtttactcagatggagagaatagatttgttcgttacatccaaatgccacgttcaacgtctggtgtaggaaggatgtagtctaaaaagaatttttaacagacgcgcccactacgaaacagtttactcacgtggagagtagatttgttcgttacatccaaatgccacgttcaacgtctggtgtaggaatgatgtagtctaaaaagaatttttaacagacgcgcccactacgaaacagtttactcacgtggagagtagatttgttcgttacatccaaatgcaacgttcaacgtctggtgtaggaaggatgtagtctaaaatgaatttttaacagacgcgcccactacgaaacagtttactcagatggagagaatagatttgttcgttacatccaaatgccacgttcaacgtctggtgtaggaaggatgtagtctaaaaagaatttttaacagacgcgcccactacgaaacagtttactcacgtggagagtagatttgttcgttacatccaaatgccacgttcaacgtctggtgtaggaatgatgtagtctaaaatgaatttttaacagacgcgcccactacgaaacagtttactcagatggagagaatagatttgttcgttacatccaaatgcaacgttcaacgtctggtgtaggaatgatgtagtctaaaatgaatttttaacagacgcgccccctacgaaacagtttactcagatggagagaatagatttgttcgttacatccaaatg

SEQ ID NO: 4345 - DNA, 1981 bp, Heterodera glycines
  unsure (1)..(1981): unsure at all n locations
ccatcgtttggtgttggaagtttccttttcgctcattttcgctgtgcggtggacacagtggaagtgcgctgattccatttgccagtggggggaatgattgggtcggtttgaactcgtcaaccaatggagggcaatctgacgaaacaaagggaaatattggccaaataaaaacactttcacttgcgtttttgccgagaaatggcaaagcctttgagcgggcgatggcactttccttttctgtcagcaaaaagtgctggcgcagtttataaagaacagccaatttttcaaatccatatctacataattaaattaaaaagggataaaattcaaattaaaatcgaaagaaaaccgatggaggaaagtctcctgaaactgccgatagaatctggactttaacccctgagagcgcaaagaccaaagacaggcgatttgcaggacaacccaatggttgcacttcgaagcgatcagttttagcagagtttcgctaaccatttggtcctaaagttaaatccaaatacaaatcccctctttttactatgctttttctcgtcatcacctcaaattcgccccgtacaatcgcttgttcaatgccaaaccgttcgtttgctcctcccatccctttcaaaatatgttcacatgcaaaaatgtgctaaacaattacaaaaaaggtcaatccctggcaatggacagagaaacgactcaccaattcaagctgtttttgctgctccttcaaatttcgaagttcggaagacacaaagtttttcatttcgtccacccttttaatggcttaaaattgcattttcaaccatttaaaaagcgcatttaaacgactcgccggacgccctgtcaaagctcgcctgaagcatttttgccttcgagctgagaaaagagaaaactgcggtcatgtgggcatttcttattgcggagaatatcgggtcggaattgttcagtgcgtaaacaccgctcgcgtcgatttgtttcggattggcactttcggtccctgctttttccaacgcctctttgaaagagattttgccacatttgtaagtgaacacatcgtcaaggaccgactcgtaagtcaatccggtgagcaaaacggacggaatgtcgcagcgacggtcaaacagaaaactaaagcataagagacaatagtcattacagaaactgcagaacgtacacatggctaattggctgatcggctgaagcgaaagcctcgcccaattcggcagaaaattgcctaagttgtttttcgatagaacaaaaacactgtccgatcccaaaaaaggtttgaatttgcccgtaaagcacttgcaacttccataaagacttggccattggcgaataataacggtcgaacatttcgggtgaatattgcggaagctccatggagaacagatcagactctctaaaattataaaaaggcaaggaattaaagcataaacaaacacggacatggttacgaagtccaagtcaaattccaagaatttaacgttgtcaaagagtccatttctctcaagttcccgatcgaagaaatgtttccgattcccacaaatgatgatcacataattgtaattcgggcttgatcgtatcagttcacaaattttgtctgaataatccaattttaaaagactgggataaaaaagtgaaaataatgaatggatggattacatgcgagtttaattgtgggtcgtataaagaaaatccggtggcaattttggtcatcgctccaagcaatgggaaattcgggcagtaattgatgaactctcacacaaccatggctttgcaagactgacatggaacacaatttgtcgagagggcggagaaggcattgctcaacaaccaattctttctttccgagcactgagaggatcagatgaagaagtttttgccgattcaatttagaaaccagagaaaattcatcaaaatcattcattaacaactaacataaaatgatattaagaccagtagaangtagacctgc

SEQ ID NO: 4346 - DNA, 1680 bp, Heterodera glycines
tggtcatgagagtgatcaaattcaaagactctttcagaccttctccgactgccacaaaatgtgccgaacaatggcactttgggtttgctggaccccctcattctcaacatggacttgcaccgtccgccctttttccccttcgaccccgactctcatcccctcgggtaattgtgcccactcaataatatgccaaaatcttttatttttttttccagcgaatgtgccgccgaccaatcgaatccacgccaatttacacaatgcgaaggtgggaaaacagaaacgaccgaatgcgagcagaaaattgtgagaaataagcggacattgtgtcaagaaatgacaattccttttaagagggatgcccaacggaaaatcgacgaatgccgaaaaaaccaaatgcacccactaaatgccattttctacacaaaattggcaaatttgtgcgtcattaacctttgtccagcccttcttttaatgccaaatagagacgaaaaaggcaaaaacgaaaaaaataaaaatggaaaagcgaagcttttaagaggggccgaccgttctgtacgagtcgcttgccgctgccgacttttacgaattctccggcggcgattcctcctcccaatgtcccttttttgacaaaagtattggcaaaaagtgccaaaatcagacgaaaaatacatcgaatggcaccgttttgaaaagcatagctgcttcaaggaataataatggtaaaacaatgccaaattgcaacacttggttcgtttcccttcagtttactcctctccctctgactttgtccccctcctttttccgatgttcgacttttttgccgatggtccgtccgcacttttctttttgtttaatttcacaattcaggcccattcacttaccttcagaatttaactgaaaattacgtgcgattgtttggaagggttgtctcattaacgggcacaataattgacgaagactttgacggaattggcgaccaacggcaaaagcagcggaacaaaaagtgcccaaaaacatactgcggcgcaaatgccttttaattcagcaaatccgtcggcaattcgtcgaaaatgccaacgcattttttccgaattctcttccgttgtgaggacgatctttggcatttgaacggaatcaattgcaaatggaccaacgccactcgcgtgctcgccttcgttctgcccaatgttcagagagatttgaattgtttggtcagttgcggtggcttttccctttcgatttgctcttttaaattgccaaagcgcgccgacgaatatcttttggtgaacaccgcgagggtccgcgacatcgaattgcttacggacgtacaattctttgcggaacgaatgtggtacccaacggaggatcagttgcagtggcggacgaacatcagcacggaactgtggcattgagagacggagacaaaagggtgggaggcgaagacgaaatgccaaacggatggatgggggagaatgtcattgagagcggggggggggggggggttgaagcaaaaatagggaggggggattttttatgattggacatatcaaaatcagcaccacaacgaaacgggcaattctttctttcataattaattcgctcacatcgcttttctctcatcaatcaattccatcgctagtcgaattttattttaattaacatatcatatcattattctat

SEQ ID NO: 4347 - DNA, 3109 bp, Heterodera glycines
tctgcacagattgaaaagcattctctcaccgttcatattgttttaattgactatttttttggctcattgcatttcttaaatcaaaatgttcgactgatttgtgagtcaaacggtgcttctaactccggcacccccccccccaaattcgcttgccatctccgtcaattggtcgtgcccaattctcttcccaaatgggtgtctccatttgctgagcagtggcctcgtcctttgacatgccgtgctatgttcagggctcgcataagtgctcggccgttcatttgctggtgcaataaatttggtcaaacaaatttcgttgttcagcgaattgcacgcgaactccataaaatcttccgggaatcgttcctcttttcccatttgcaaaggtttgtactgctcgaagttggggatggccgactgaaggtcgatcaacttccatttgttctcccctctgacgaagatccaattgcccggcttcaaatgcaaatgtgcagcatctaaacagcggtgagggaggggaggggagtgaatgtgccgaatacgcgagggtaagccgagaatcgcttttccgcaattattaattaattagtgtgtacgtctgtgaaatgttgacaatgtgcttgccaacttggccagcagttgttctgcgtcctgctttatctgctgttcccccatttgtttttcccttgccaattcgtcccattgcttcaaataattgtccaaagtgttgtccccaaattccatcacgtaaatcatcgagaaatctcttctcaactccacgtgcaatgggagcagcttttcgtgttccaccaccatccgacttttgtcctccaccgtttcccccttgaataatttgaccactgagtgctcatcgacgggtttattcgcctccaaatcattgaaccacttcaacatatttaattcgtgcttaatcatcgacggtggctttgccaaattaaccgcgcgtgcgcttgtccccgtggagacaactttcaccgcgaaagtcctttctgagtcaagttccgcctgcccaatcccttgcttgaacttgtccgctttgtaaatctgtccagtttggttggttcatcaacgaatgtttccgtccgttcgtccatcaattaactaataattcgccaattaactaataccttgctgtccggctctcctgcaattttctttccttcgaaaaagtatgacggttctccgttcgttctccgatagcaaatttcgccttcccttccctttggcacatcgtttggcacttttggacagactaacggagaatgattttggatgaaaagagaagggaggggaaaaaaggaaagaaggaaaaagtaatggaaagaaaagggaaaaggcatatcaaaagagaaaaatgggataaataaaaaaatgaattttatgaaaaggcgggggaaagagaacagacagcagcagaggagaagagaacgaagaaatagcagggcggggagagagagacatggcagagatgcgtggaaaagtgccactaataaaatgccatccaattttggcaatttcacgtgccaaatgcgctccccaaccactcaaaatttgctttatttctttcattcatataacatttttgacggagagtaacacaaagtgcaaaatgtccttcatcattctctgcccttggctcggcttcacaatgccaaaaacgtggctttgcccgtgcgacgggggcagcggcaataactgcacagaaattgggagagtgaattattgagtcaatggtgcccttctcccaaatgccaaactcactttgcgtctctccctggctctccgtccaatcccggttctcccgaagtgcctaaattaatgcccattcattagtaaataattcccacccctcagtccaaaacctggcggtccccgcagtcctccgtctcccgtgttgccgccgttccccggcactccgatcagtcccggctttccgtcgattccgggccgtcctggcggacccgccggtccgattggtcccttttggccttaaacaacaattagtaactaaattgtttaacagtccgagattgagaagatgcttccccgagcgaaagattaatggattcaacggtatgacaattaatcgtaataaattggaaagaagcaaaggaaagatggggggtagttcatttggcagaacacaggtctaaaaagccagagacaccggttcaaacccggcccgtccatattttttccctcaaaaacttcccagagctcattcatatatcttcaagctcttttcacctggtgctccgttgtctcccttctgtccaattactcccggaagtcctggcatgcccggctctccgatcgttcccggcttccccgactcgcccggcattccctggggtccgaggaagcccgtgctgcccgacagccccgggttgccgggctctccgtcctgccccggtaggccgtcctctccgcgatctcccggaggcccagggtaacccgggggaccagatgggcacattctgaacagttcagaatgagcaagcacccgtgtttagtataaatggcaatgttcacctgcacatcacttcgccctgatttatcatcaccggcggatgagtaccgggctgtcccggcagtccgggattgcctcggtttcccggctcgcccggcaccccgggctcccccgcccttcccggcggacccggggggcaccgattttcttggcggcacgcgcaatgcccggccggaccaagctcttttacttgacgacgttgacgctaaatgaccaatatttatataaatgcaaaagcctaagctcacttggattttttatgtgtgatatctgccacttttatcctcggtatggatcttattcctgccatcgatctcatgtgacggggcggacacagagtgtatgcgctgagagccgaaagatggtgaactattcctgagcacgatgaagccacaggaatctctggcggaagtccgaagtgattctgacgtgcgaatcgatcgtctgacttgggtataggggcgaaagactaatcgaaccatctagtaggtgcttcccctccgaagtttcctctccgcctttttttttttttttttttttttttttttttttgagaatgat

SEQ ID NO: 4348 - DNA, 406 bp, Heterodera glycines
  unsure (1)..(406): unsure at all n locations
agcatttttcggtaaattggcaaatttcggcgtccaatgtggagagagagatgaggaaagaaaatgagagacggaggagggggaggggagacagactttgacaatgatatcagtcgcgatgattacatgcacaaccctttagtaagagattaacaaacaaacaaaacattgcttaaataattaattaatttctttttgatttgtcattttcccctctttctctgcctcccttatctctcgtcgtctttctttctctttccgtcattgcctttttccttgtcaaactgcccgtctgagatggaatttgattttgtgaagcatttgtattcatcctttttgttgtcgttgttcgactcgtcctcttttgttgttccgccngtcgacgacgaaggcactgaaaaaagca

SEQ ID NO: 4349 - DNA, 1671 bp, Heterodera glycines
ccctccctatatccctctatctcgctttccctccctttccccccccccctctcccacttacccccgtcttctctttgctgttgtggcatcggtttaacgatggactgaggctttttacttctgctgctcccagtctcattcgacggtccaattgtgtccaaataggcaacgatgccggcccgtacattttcctccactgtcattaccgtatgtgttcgctgtctgtcaattaatggcaccggcactttctgaggggcgttggaggaggaaggcattgcctgagcaagcatttaatgggtgatttgttctgtccatggcttaattttacctccaaaagtgtcgtttgatctgtccgtttcggcttttccttcttttcgttttcgatggctttttctttttccgtttcttcgcttttcccttcggctttttccttctgtcgttcgtccgttttgcgctgtttttgctcattttttgactttttattgactctgctttctgtttgctctgtttccaaatttttatttgaaaatgttttttggaccaaaacatttgccgatttgtgcataattttcgcatttaaatgcgccgattggctttttacatcggcggacgatggatcctggattgacattcttaagtaactttcaaagcttaaattaatactgtgattgtcttacagagaattgtttgacttttctgcgtctgttctctgttccaagtccaataccgtctccgcacttctttttctgacccttctttgggctttgtccacgttccgcgcccttcctccatcgtcctcttccctgctattcattccgccccttcttcctcttccgtcttcctcttccctgctattcatccccctccttcctcctcttccgtcctccccttccttttccctctcattaattccgctcctgcctcctccatcgtcctcttccctgctattcatcccgccctttcttcctcttccgtcctccgtcttcctcttccctgctattcatccccctccttcctcctcttccgtcctccccttccttttccctctcattaattccgctcctgcctcctccatcgtcctcttccctgctattcatcccgccctttcttcctcttccgtcctcctcttcctcttccatgctattcatcccgcccctttttcttcttccgtcctcctcttcctcttccctgctattcatccccctccttcttcctccatcgtcttcttccttctcatttattcttccatcgtcttcatccctctgattcatcccgctccttctttctcctccatcttcctctttccaatttgtctcctttttttcctcatcccttccgtcttggccatttattatcatatttgtagtcccggctatttcctcttccatttgagtgcttaatgagggtcgacttgtcactgtcgcgtgtccatgcaatgcttttctctccaatgaccgcgtccggtccatctcggtcattcccagccgagaattcggcccgactccgacactgctcgaccgtttgtgcactcgaccaaagctggacaatcgcgggaggggcgcccgtggcattttgagttcgacgaaaagaccgactgaaaatggaagtgccaataccatccaaccttttttgtttgggacaaacattcacgaatccccgcctgttcagcat

SEQ ID NO: 4350 - DNA, 2616 bp, Heterodera glycines
caggggtgtgatcgaaaatttttcgaaatcaggacatctggcccaaaaaatcagattttggggtcgaaaatcaggacattttgcaaaattgcttcaaatcagttatttttacaatttttgatcaaaagtgtatcaaatatttttttttttcatctcccattaacgattttaacaattttgtggagaaaattagcaaatcataaattttagcgcattcgagatcaaaaaatcagatttttaacaattttttgcggcacatttttccaaaaaacttttgggaaatgggcgagggggagggtccggcggtgccgttaggcgtcgccggaaaaatttcgtaatttcgttctgatttgttaacagattttcatcaaaaaggccgatttttgcaattaaattaaaagtcaagcgacgacttttttgctttaaaaccacttttttttgcggcgcgttttccaaaaattttgggggatggacaggggcgtccggtggcgcagtaaaatttttgcgtttttaatcgatttgttaacagatttttgtcaaaaagggaccccattttgccactcatcttatgggccccagggtcgtttgggccccaagtacagaaaaatgaaaaatcacagtaaaaacagctttttaaatttcagcataaaaatgtaaaataaacattttaaaaataattcaacaataattttaacaataaaaaatgtaaaaattaacagaaattcacgggttcattcgatagttgcgagaaattccccggagaaactccaaaataatgtgaaattgattttttgaactcgcatctccaaaattttgtcatcccatcagaactcattttagcgaaggtgtaaaggtggccttcgtaagacaattttactttttgttttttggttgcaatttggttagccatttctgaaaaatgtccaaatcagaatgtacatcaaattggttaactattaaaaaataataggatttggaataagtaaaattgtaaaaaatgagcgaatgttaattaaacctaacttataccaagtggcgagggttccctcaggcgtagtttttagaatcttaatttttaaaaaagcacatttttcaatttttgggttggggcccaaacgaccccggggcccaaaaacgggggcccaaacgaccccggggcccaaaaacgggggcccaaacgctctggtcccaaattgggccgctgtgtttagggaatataatccttacccgaatgcccttcattttaaaggtccgattttccctgtcggcaccctccgaacccaaacactcttagtttttaaattaaatcattaaatttaattttcatggatttaaaatatttttttgaattgtccaaaagtgaattgagttttcttttcgctcaaaagggacatgtcgccatcagcacaaagggaagtgttcgcgtcgcgcgtctttccctgcgattcattggcgccgctcacaccgaatggcacgacaaatgcaccggcgcccctttcgaaagtgtcgacagagtcctcgacgagtacagagacttgaccaggtaaagcgaatgagaggcgacttttccgagttttgttctcttccttgacagcgaactttcgtccctttgcgatggctccaccgaactttcccccggcgaacattccgtcgcttttcacttcaaagtcaacggggggggggggagagggaaacgcacttcgcaccgttccttttaagctgccgatggattccgtgtcgaccattgccaaagacggacacggcgtggtcaaatacttttgcgttgcgtcgttggatttgcccgacgacgggggagacaacgaaatcgttgcgggtgcagcacagaacaaccagcagggttgccgcccgaaacccgacttttttccgacccgcggcaaccctggcacagaccgacccccctctaacaaagcccccccccccctcagagaaggaattcgctgtcactgcctatctgaacttagacgcgcctcattttcggtgagaggccattgccaagtcaaatattggtgaattgagctgtacgtttcctccagggcgggtgatcaaagattagtgaattcaaatttataggaaactaatttcatatttacgatttttagagagaaaaacggtactttccataagcgggaggagggggggggggaagagaatcgctctctcgtcgcttctctaactgtctgttctcttattcctctttatctcctctttatctttccgtgcccagttttgctttgttttgcctttctttagagagcccgcccattcctccgaacaaattaccaaaggcggagttttttgcggaagaatacggcgggtgaaggcggagctgtgcgtcgaggaattgggcttaatgacgggtgagagggaaggcaaagaggggggagggaggggaggaaaagagaaaggatagagagggaagcgaaagagagagaaagggaaagagagggggagagtgaaggaaagaggggagggaaggatagaaagggaattgaagggaagattcttccaaataccaaaggaggagagacatgcgaagtgacactgacagtggcaacaacggcgaaaagggggcgccggaaaagccacgccggggag

SEQ ID NO: 4351 - DNA, 3038 bp, Heterodera glycines
atcaaatcccgaaaaaaggatcaaacaaatattcatcgcttctaattgcaaaatctttattcaactgctccttttccacttcaatttgtcggccttgccttgagaagagcagtggcattacgcgcatccggaaacaattcatggtagctgaccacgggaacataattcgcagtgattacttttcctgaaaaaggtttttaaaaaacatgtctaaaactcgggattaccagcaaaccaacgaccgtgcagagcaattactgatttatgggcgattgccaccgtcggacatttaacgtaaacgttgccctgaggggaagctttgtcgatgtatacgtgcacacatcctaagcttttttcaatataaacagtggtgttggaatgagtcacaaccgacccccgtgattagtgcactcctcaataacatcatctcgaatgtccaagtcccagccaggctctgtttctttgcctgggtcgaacatattcgtcagcataaaacattgtgttgcgaaaatgggaattttgtcggcgttttgctggtgcgcctgctgagccgcaatagcctcctgagtgaccttggggagctcgacatccgacttccctaaaagcgaacgacggtcttcttaagaaattaccagccgacctttagccaaattcgcaattaactgcagacgactcgacgaattcatattccggtcttcggattcaagagacgtttcttttttcggggtcgcctctttctcctttgaattggtctcattttcctcgacagttgtcaaccgaatatttcttccggccaattcaaatcttaataagaaacaactgaaccaattcaacttctctagcacacccattgagttgctccatcgctctgcgtccctcctcagcatggcggaactgggggatggacgatatttgcatgtgataaaagagaatggaaacaacaaaccgtcacaaagcccgtcccatcagaagaatcttttcggacatagcagcgttcaaccttaaaccgacaataattggagttcatttatgacttaaattacacgtccaaaaggttcgaatatagcggcaagcatatcatcagtaatattaggatgaagattgttgacacaaagctgcagaggcccactggaaaggccaagaccaagtcctaaaaggaggattaattaaaactacgagtttttgctattgagttaattgcaatttgttttgttcgtctcctttcctaaccaattgtattcgcagctgccaccgcatttgctgctctgtttctctcagcacaagtcatttgaataaccaagggagcgccgtgaagtttttgtccacttaaacccatcgccttaatttaaaagtaattaaaaggtaattatggcgcgaaacaataaattaatatgatatcgttgaatgaaggatcgccctgacgaatctatactgatctcatgactattagctgcacatggagatgacagtaagacccgtcagagaaactcttccattaagtaggcggaatgcacgcgaattccttgtgtggattagcccatttaagcaagaaaaaggttaccaggggaactgcctctcgctcccaaaactccacataagcaattcccttggaacgtcgcgtctttgtgtcggtaatcactcgaacatctctaacgtgtccaacacttgaaaaaaattcctccaagtcacgaggacgcgtttgacgagcaagcttaatcagaagaatttctcaataatcagaaaacgaagagccaacctggagaataaaaactgttcgctcatctctttcttcggaagtcatatccattcgagcatcacgcggcggtgatctccgaggcgtaaatggcatacttaaagaatcaaggctggaattagcataaatgtgtacttttagttgaagcgacccccctctaaactcacacatcccggcgctcgggcccgggtaaacgacgcggggcaggcgaacgacgtttctcaagaggtgatcgggaacgggagcgccgacgtgagattggagaacgacgccgatcgcgagacctagaacgagagcggcgacgatcacgagaactaaaattacagattaattccatgtaggaaagcacaatttgccttaaaaattaaatcaatgtgtctgtgtgcctggaaagcaaattaataaatttatgggagggtaatgaaggcatggcgcgaacgaatttatgaacgaaagaaaagaaaggttgtggaatatgagaggaatgagtttctgctttaacgcacgttccacgccgttcttcgtcttcatcaacaaacaaaggagaatatgatcagacgtcaagatctggagatatttaggcaattgagttcgctcactcaaattttgtgcttatccggcttcctaaccccgaatagtaaatccaatcgtaaacttgatcacctagaccgacgttttcttttgctgttctctgacggagaacgccgccttcgctctcgcgacgaatccctaaaagtaaataattaaagtgtcaaatggcgtcagaaacctcttcttcttctcgcgactgcgacttcgtctgcgctttctctccctgcttccgcttctgctacgtttacgtttgccttcactgtcactcattctaagaaaaaaacagcaattaaaatttaaaaatgtgatgtttacttgattccaacttccttcgcctttttcttgataacatcatccatctttgtcccatttttctctgcctaatttatgtattgtttatgagtgtcactataaaagccaacctcgtcaacatttttgaatgcttcttcaagaagatcatctacctcatcttcagccatttgtaattactagcgtatgactgtgtgtgttcaaatgaattctcagtatgtaataaaaatgaaattgtattttagtacttatttaataaaacccagtttggtcatgtactcatcacaatctaattgtacactaatggccagaatgtttgggtaactatgttgggtactaggaaagtcaagacgctataatcttttcgacacttgtaaagtatagt

SEQ ID NO: 4352 - DNA, 1210 bp, Heterodera glycines
gttcattataaaatttctaaaaaaccactgctttatttctcaaaaattttttttcttgaaattttcgtactaagaaaattcataagaattttttatgaaaatttctaggtttgaaaattttttttaaaaaaaattttcgggggggaaacgacggggggaaatgaagtgcacacgtttctttaagttagttttccgttgttaattaaggcaaactcaaatgggactgtgctgagaagcgaaatcgttggttccattcgaatgcgtgtgatccttacaggaatgccagaacttcgactgggactaaacgacaaagtgttgtttcaatcagtcggacgtaagcaaagattgccttaattaaaagaatttgagatcattaaattaaaagctttctttttttcttgctttggctttcttaagcttttccataatccggcagattcacccgggggggggggatttgttaacatataaagttttgtagttcggtaaaaatttatgtgtcgagtttaaaacagcatataagaagataggaacttgtagctttgagtaattaaatcctaaacttttattcaagcacttttgaaacaattataactaatttaaaatttgttttcttaataaagtcgtttatgaattgaaaaaaccgtcggtttggtgtcgtgtttttttgggaagtgagggttcgatggtgccgctaggcgccgccgtgaacaatttttggcatttgtttttgggttcattttctcctttgtgggcaaaggaggaaattggctgctttttaataccgctttttttgctgcgcgctttttccaaaaaattttggggaacatggattttttgaaaattttagtgcagattgttaacggattttatcaaaaaactgccaaatttttgcgcttttttttaccaggcgacgactttttttgttttttaaaaaacgtttttttgggcgcgcttttttgaaaaactttttggtggacaggggtccggcagcgccgataggcgccgaaattttctaattttaattctatttgttagcagattttgtctaaaaaatgaccaaattttgagattttggctaattttttaagaaaaaaataggtttttttggggggccgacggtgccgataggcgccgccggggtaaattttaagggtttttaatgaatttggttaagaaaatagccgaatttttcaggaatttccctctt

SEQ ID NO: 4353 - DNA, 4544 bp, Heterodera glycines
caggtcatttccaccaaaaaatagtaaataaaggcgaaaaggaattgcatcggacggggaatggaaccgggcctgcccccgtgtcagccgagcattctacccctggaccaccgttgcttgagcaacacaaataccaataagctgaaaaataatgtttctaagcggaagaaagtaagggatcgatgcccccccccccttatattttgtatgtttttaaacctaattgcactagggctctttttgttttgtattaattttgtggaacaatggaaccattaatttggaataaatggaattttcgttgtgaaaaaatcagttttaggacagactaattgtaaaattttttactaggaaacagaggaaaggctgttgaattggaggatgtgaagttccatcagtgcgtccgtctgtcccgtttcgaaagcgaacgcacaatcagctttattccgcctgacggtgaatttgagctgatgagttaccgtctctccgctacaataaaaccgttgatttgggtcgaggtccaattggagaagtacgcacattctcgtgtggaatatatcgtgaaggtgctgataatgtcattaagattgggtcggcgcaattttttgaaaaattctatttccttcatattgtctatttttagttttaaattatataatatagagaaaagactgaaaaacttttcctaattaagggtttggcaaaaatcatacatttatctaggatttgaagtcgttcggcaaatctgataccatattaatttattggtttaaaataccccacaaaagtcattcgctaaaaaatgcatgaaaagagtggatgttaaaaaaagtgggctaaaaataaattatataaaacacattcaatactagtcgaaatggccttaatggttttatattgtcttccattaaattttaggcgaagtcccaatttaaacgacaatctatcgcgaatcacgtggagataattgtgccggtacaaaacgacgcggattctcccaaattcaaaagcaccgtcggatcggcccgttacgcaccggagatcagtgcatttgtttggaccatacggagttttcctggtaccaatgaatgaaactcttccttttaaaattaactgcaaggaggtcgcgaatatctcatgagggcccacttcaatttgccttccatagagggcgaagacaacgaagggaaagcgccgatgagtgtcaaattcgaaatcccttacttcacaacatcggggctacaggttgtcaattcgaatgggtcttttggtgaacagaaatgacaatgttaggtacgctacttgaagatcatagaaaagagcggttaccaagcgttgccttgggttaggtacgttactcaaaacggcgactaccaaataagaatgtgatcaagaatgtgtgataaaggatttgtatgttgccttactttatttatgtaaaacatttaatatcttctgttgaaattcggttcctttgtttaagataaaatgtttagaaagaggagcaaagatatttaaactcagtaaacacatttcatcatttgttgagttaggctaggaaaattcagtttaatgtatattaaattttccatttttatactctcgagaacttaagaatttgaagaataaaaaaggatgattatattcttcgacataaataattattttacaattagattggtgaataagtccgtgagtttcttttactaattttatttcatacgaaaagagaacaaaatagaccttgaacctccgccctttttccctttattatctttcaaaaaccacttaaccaaacatatttacttttaaaactgggagcccaaaattgagtggtgcaaatgttggaacacaaaaaggaaataatctataatgcacaacaaaattaaaaataactcttttttgtctttttcattgggacacaaattcggaaggattagcgaagcttccccttcgcataatcatatatttgaggttaaatcgaatatttgtcttttttattgtacttgcatattttacagtcatatacaggcattgtgatataaaatttactaaccggagatcaaaattatcagtgaaaggtggaaagaaatgatcggtgttaatccagtggtttgcgaaaaaactgatatgggagtaaagggggcgcattcccaaacggatcatcgctgatctgttgctccatcgatgtcaaatccaaacccaaaatgtttggccgattaatttcactttggaagtccgattgttgttcgacgacacaactccgtcgcatttcatcgaagcattcaccaaaagcgttgtcgtccatgtgatggtcgatggtggacatacacggctgaatgaacggattggacgattcgaacaaagtatttccagccaatgtttgaagcgtaaggttcaaattgttggcgtcggccgaagaattactctcacgttggccataagtcagagtataaggcctaattaagccaaaattataagaaaagagacacgcgaaagaaacttcacctaaatgcgctttgagttagcttcggcggatttgaaacatcgcttttttgtgtgttatcgtaaatcgtgtgattttcatgtgctgccttaacaaattaaacaagcaaagtattggcatcaaaaaggcagaatggtctcacagcattggccactgtttgttgcttgagctgttgctgtccggacaaaggcatttcccccctttcatcggccgtttctttgcgctgcgacattggagtggaatttaccaggaccgcttggggtttgggcctaagccgtgggttaactgatgttgttgtggcccgtcgatgcgtttcggtacaatgtgaagaggctgtgttcacaatcattccttctgatgctgctaaaagggccgaagagctgctacaaacggccgaacagtcgtccgttcggtgcccggggagttctgacggttttatccctgcgacgaatgttcgctgcattccgtctcggctgtgcctttcttcgatgacttcacccggccctctcccaaccgaaggggccgtgtgccttcgccgttgtgcctcaaagtcgttaaaagccttttcatacaaacgcgcgtaatcggagccaagcttattgcgcattttcagaatctgaacagcttcactcagttcgatccgcaaacttttctgaacaacaaaatttacaaaatcgaaaaagaggaaataacttcgatgttatacactggacatttgcgatcggcagcgaaaaatgccaaatacgaagcttggtaaacatttggcctgtgtttggcattcagagtgaggagaagatctatgaagacgaagataacattcaagagaaatgactaacaataaacccactaattatggcctttatttggtcagagattggcggagattcggggaaagtgaacagtccattttgaatagccaacgcagattcaccaaacggaagtgagaagtaacaaagtttgtacagcaaaatgcccaacgcccaaatgtcggactttgtatctaaaaacatagtctttttgatatgaattttgttcaaaaaatcacaataactaatgctaaccaattggaatgcccgaatacaaatcaatcatttccggggctcgataactgagagtggtgtaacgttgaatctcttcctccataaaggctgaaaagaaaagtaactgaaaagttggagagacaatgaatgattgattgaatgaccatgggtgtaatgttccttagaaagaacttttgttgtggagctgccaaaatcgcagagaatgtacgtggacttttcatgagcattccgttggtcaatcagaatattttctatctaaatgcaataaaaaatatcatcgattctattgggttaatacattaaaagggagggggtctatagaatttttacgaggggcaggggaggggggattggcagccaaaaacgcgaaggtagtccaatctcgacgaccttttgtttgccgaaaaataaaagaagtccgcaatagggaaaaagaaattttggtaagtattctatcatcttctatataggtaccctaataatccaatgggttgaccgtacctttaagtcgcgatgaattacgggcgttttcgagtggtgaagacgtgcaacagcttcacaaacatcgcaaaaaatatccaagatttcacgagcagaaagccattcattcagcaaaagccgagcattcatcaattgcagaacattggctaatcaaagaaaaagcgtttgacccatggaatttgtgtgactttaccttggtaataagcctaaaattgaaaacaatttgaatttgtttactttcccgacttcgtaatcccttttttgattaaaacgtaccgtcaaaagcatgtaatcgtaaatgcccactttgttaacagaaagctgatgatcaatatatgaaacaatatttttgtggccgttgagatttttctaaactgagtaaaacactatttaatattgataattgaagtaaaaaaccgaccacaatttgaatttcggtccgacatgcttcgacctgtctcgggtcatcgcgcact

SEQ ID NO: 4354 - DNA, 3915 bp, Heterodera glycines
gaaaaaatggactttttgaatgcaaattttgcgcatttctttcgacatgtcataagcggttgttacggggacaaatgcaaaccaattgggtgctatcgaatgagctaggcgcgctctacaattccaaatgtatcaataaagggtctaccgccactccctgccgagatctggccagtcaaagcagagtggggtctataacactgatttttgttaaccgtcggcttttgcctttatctcgagcctgctctactagtgcatcctttcccaatgtggcactgctccagaactcttgtactgcttcacgacggattgttgagataatttttctcacccatttcttttatttccaagcatagacattattaagtgaagttaatagctttctggaaaaaatagttgaacaatataagcctgtttcgtgaatatttacaacaaaattttatagacaatttctaaaaaggaaggaaaacaaattttttggtctcatgttttatgtcatgttgttgaatggcttagactgcttcagatgcggttgggcaaagttttgggcttttcgagaaaagttttctcagaaaaatcaggaacaaataaaaattttatggaaatagttgaacaatataagcctgtttcgtgaatatttacaacaaaattttatagacaatttctaaaaaggaaggaaaacaaattttttggtctcatgttttatgtcatgttgttgaatggcttagactgcttcagatgcggttgggcaaagttttgggcttttcgagaaaagttttctcagaaaaatcaggaacaaataaaaattttatggaaaaagttgagaaatataagcctttttcgtgaatagttacaacaaaattttatagacaatttctaaaaaggaaggaaaacaaattttttggtctcatgttttatgtcatgttgttgaatggcttagactgcttcagatgcggttgaaaaagtttttggcttttcgcgaaacgttttcccagaaaattctggggacaaataaaaattaagcttctattaggagcgatttaatgttcttatcaacttctggtttgctttaccacgctggccaatgaaaaaatggacttttttgaatgcaaatttttgcgcattttctttcgacatgtcataagcgggttgttacggggacaaatgcaaaccaatttggtgctattcgaatgagctaggcgcgctctacaattccaaatgtatcaataaagggtctaccgccactccctgccgagatctggccagtcaaagcagagtggggtctataacactgatttttgttaaccgtcggcttttgcctttatctcgagcctgctctactagtgcatcctttcccaatgtggcactgctccagaactcttgtactgcttcacgacggattgttgagataatttttctcacccatttcttttatttccaagcatagacattattaagtgaagttaatagctttctggaaaaaatagttgaacaatataagcctgtttcgtgaatatttacaacaaaattttatagacaatttctaaaaaggaaggaaaacaaattttttggtctcatgttttatgtcatgttgttgaatggcttagactgcttcagatgcggttgggcaaagttttgggcttttcgagaaaagttttctcagaaaaatcaggaacaaataaaaattttatggaaaaagttgagaaatataagcctttttcgtgaatagttacaacaaaattttatagacaatttctaaaaaggaaggaaaacaaattttttggtctcatgttttatgtcatgttgttgaatggcttagactgcttcagatgcggttgaaaaagtttttggcttttcgcgaaaagttttcccagaaaattctggggacaaataaaaattaagcttctattaggagcgatttaatgttcttatcaacttctggtttgctttaccacgctggccaatgaaaaaatggacttttttgaatgcaaatttttgcgcattttctttcgacatgtcataagcgggttgttacggggacaaatgcaaaccaatttggtgctattcgaatgagctaggcgcgctctacaattccaaatgtatcaataaagggtctaccgccactccctgccgagatctggccagtcaaagcagagtggggtctataacactgatttttgttaaccgtcggcttttgcctttatctcgagcctgctctactagtgcatcctttcccaatgtggcactgctccagaactcttgtactgcttcacgacggattgttgagataatttttctcacccatttcttttatttccaagcatagacattattaagtgaagttaatagctttctggaaaaaatagttgaacaatataagcctgtttcgtgaatatttacaacaaaattttatagacaatttctaaaaaggaaggaaaacaaattttttggtctcatgttttatgtcatgttgttgaatggcttagactgcttcagatgcggttgggcaaagttttgggcttttcgagaaaagttttctcagaaaaatcaggaacaaataaaaattttatggaaaaagttgagaaatataagcctttttcgtgaatagttacaacaaaattttatagacaatttctaaaaaggaaggaaaacaaattttttggtctcatgttttatgtcatgttgttgaatggcttagactgcttcagatgcggttgaaaaagtttttggcttttcgcgaaaagttttcccagaaaattctggggacaaataaaaattaagcttctattaggagcgatttaatgttcttatcaacttctggtttgctttaccacgctggccaatgaaaaaatggacttttttgaatgcaaatttttgcgcattttctttcgacatgtcataagcgggttgttacggggacaaatgcaaaccaatttggtgctattcgaatgagctaggcgcgctctacaattccaaatgtatcaataaagggtctaccgccactccctgccgagatctggccagtcaaagcagagtggggtctataacactgatttttgttaaccgtcggcttttgcctttatctcgagcctgctctactagtgcatcctttcccaatgtggcactgctccagaactcttgtactgcttcacgacggattgttgagataatttttctcacccatttcttttatttccaagcatagacattattaagtgaagttaatagctttctggaaaaaatagttgaacaatataagcctgtttcgtgaatatttacaacaaaattttatagacaatttctaaaaaggaaggaaaacaaattttttggtctcatgttttatgtcatgttgttgaatggcttagactgcttcagatgcggttgaaaaagtttttggcttttcgcgaaaagttttcccagaaaattctggggacaaataaaaattaagcttctattaggagcgatttaatgttcttatcaacttctggtttgctttaccacgctggccaatgaaaaaatggacttttttgaatgcaaatttttgcgcattttctttcgacatgtcataagcgggttgttacggggacaaatgcaaaccaatttggtgctattcgaatgagctaggcgcgctctacaattccaaatgtatcaataaagggtctaccgccactccctgccgagatctggccagtcaaagcagagtggggtctataacactgatttttgttaaccgtcggcttttgcctttatctcgagcctgctctactagtgcatcctttcccaatgtggcactgctccagaactcttgtactgcttcacgacgtattgttgagataatttttctcacccatttcttttatttccaagcatagacattattaagtgaagttaatagctttctggaaaaaatagttg

SEQ ID NO: 4355 - DNA, 1302 bp, Heterodera glycines
  unsure (1)..(1302): unsure at all n locations
ggggagcagcgaaatgcacaattcgtggtccctttaaaatggaagattttcttggatgaaatggcaggaggaaaaacggacgaaatgagcgaattgatcacttccggctctttgttcacgtccaccaccaccgactcaatgttactgccaagcgaagccaatcgctggccgtcctttgacgaatcgctggccacggtcaattggacattcgatcgcgaggcgtaatatttggccaaggggtcggacaccttaatgaggtcaaattgggagaaaaaagggaaacgatggtcgagagtattgagtttgttgatgcaaagaaaagagaccattccggcgccaagaagcagcacacgctttgaactaacagccacaacacgcgatttgtgcgcagaccgtctaaacacagtggaagtttgtgatttaattggtttagtgattagtctgtcccctttccttctctctcctcactctctctccttttctcactctttctctctctctccccctcctctctctctcttctctccgcccactctctctctcctctctccctctttctctcttatctttctcacactccttttttcccttctcacctctgctccaatctaagctcgtcaatgtatttgtagccgggtgttaattgcccatctgaagtgattatcgcccgtttgatttcgtcgcgacattgcagcgaagcgaacggctgatcagtgttacaatttagcttaaaggaatgggggaggtgtttaagaaaatgcatttttggcaccaaatccatcatataagggagcagcaacgagccaaactgttcagtggcctcgacggggagttgggcgggcatattatcaacggaacagatgagacagccggaagaagcatcgaagctaagtcaaatggcaattagaagagagaagccgcttttgactcacttctcatggcatttgtttgtgtccgcgtcgtaaatgacaaagggtttgtcgatggtggtgcattcggtcataaattcgatggaaccgccggggtcggcggaaatgtcacaaatggccatcggaaaaggggaagggacaatcgactacttaaagaggggagagcagagcagcaacagaaagtgcccaccaatcggtggggcaacgacggacagccggggacctaagggggagagaaaagcaggaaatgaacaaagccaggcaattaggcacctccaaacttttgttcacagttgnggtcaacaggtattttgcatcgggaatggtgagcaatctgtgaggaattanacgatgaaatgccattggcggaggg

SEQ ID NO: 4356 - DNA, 1164 bp, Heterodera glycines
caaaacaaaacacagggacaaaagcagtgccaaaatttccaatcacctcccacgcgttgattgtctcccgtcggatgccaattgttggcacgcctcgacttgtgtaggaaaatgaagaagccgtggaatgattggaagggagcaagaaggacgaaatggaggacactgaggaggaggaagaagtggaaggacggacacggagaagggaagaaagtcgcgcacaagtcattgctttatttacccccgggggaggaagaggaaaaacttaaaatgaaaataaataggaaataaattatgacaattattttagggaacggacacaaacactgattaaagaaagggaataacttcaaaaaggggacggaatgaatgggttggctgattatttattattggaatgatatttaacggccgaatcagtcactgccaataaaagaccccttctccacccccccccattcactcatcacaaatttgagaagttccgcccactgatattgggagagaagctgatgtaaccatcgaaaagtgtcaaaggggacaattcaacacaacacgacgaaatttcttttgcaatattttccaaattcccaaatgtcccacaatcgttctcaagagaattggtgtttattcgctttataaataagtgatttcgaatgaaattgaaggccggccgatcagcagaaaagggcgagggaagtgacgacggaagggcggggggagggggaggagagaacgtgacaaaaacgactgaataataatgttcatttgattgggttaggctgatgcaataatcgtcggatcgaacgctatgagaaaagagaagaaaaagcagcaaaaccgaaaccaaagggagcaaatgacgagccgatcattagaaagggccgggcttcaaacgacgagccaacaaacaaatgactctgtgatttttaaaagtacaaaaactaaaggaaggataaaagggatttagtctctctcttccgccaaatcagccttaagccctgctgatgaagtcaaattccgacacgtgggcctgagaaaacacgtgaaaacgaggaattattcaaaaatacgaggggggggggggaggagggaaaaataacaacacgtgggaccaaatcgagcaatgaaagggaaagaaatgtgcaactacggagggggggg

SEQ ID NO: 4357 - DNA, 5387 bp, Heterodera glycines
gcaatcaatccaaagggaatgatcgatggtcagcccaactgtgtcagtcccttaatattttgtaattttgcaaaaaccaattaatagaaaattagtttggagaaaaaattgagttaaattctcaaacattttttacgtgtccgcgtgaggagaaatggaggcattcttcggatagtaattgacaatcgcagcatccggcacgagggggaacgaaccaagcactgaactcaacaatcgctcaatgtgcagaaacgacaaccaaaacgcaccatcgatcaccaatttggaaatttgtttaatttccatcggcagtgctttttcttccatcgaataatctttgctagtccaatcgtaatcgaggccaagtgtcgtccatcgcaatttctcagctccacatgtcttgaagacggaactgccggaataagtgccattggacgacaaattggtgatgttaggcggttcggggtactcaaaaagactccttcccagccaacgaagctgttgctcctcagaaaataatccgaagagaatgtataatcctggtcgactcggcaaagtggagaccatccattcatctaagggcctaaaaagctctgccatgccatagcactaaaccgaatcaattgtcttgcataacttagcccatccaatttttctcgttgctcataaattttgctccgttggtaatgaaaattttgatcagtggtctcgaatatccaaggtgtgtacgtagtcaatggctgcagaaaacaaaaacgactgttgttgtgagggtcaataacattggatcgccaatcgtagcttttgtttttgtaaagtttaaattgatttctgatcccaatttcggggtcagactttgaaaaagggtcaattacagtagaatacatcaaattcacaaattgaatctggcttaaaagttaaatatatatgtaaatggttgaagaaataaattaaaattatatatttttttacatttctatttacgaaaatttaaaagttaaaggctatttatttattttccaccggctatcgatcgaattacctacctaatttcttataattcaaaaaatatgtatgtacctaatctagtttttaagctttaatatgggcactgaacaagaaattaattatcgcgagcctaccttttcccaacgcattgccaacagcaaagttttcgttattggtgcaggtggaattggttgtgaacttctaaaaaatttggcactgacaggattcaaaaaaattagtgtggtagtttttttttttggatggaacggcattcgaaaatatcaaccttcagattgacttggacactattgacattagcaatttgaatcgtcagtttctgtttcggaagaagcatgtcggaaaatccaaggcggaagttgctagtgaagcagtcaaacagatagcccctgacgtcgatataacgtttttccatgactcaattatgaacgagcgctttgacgttgatttctttcggcaattttctctcgttatgaacgctttggacaacaaaggtgtgaggaccgagttttttatgtaacaaaacaaaattcgtttttagccgctagaagtcacgcgaatagactctgtttggttgccggggttcctttgattgaaagcggttccgcgggttatctcggccaagttgcagtcatattgaaaggccgtactgaatgttatgactgcacaccgaagccgaaccaaaagacatatgcaagttgtaccatccgaaacacacccacggaaatgatccattgcgttgtttgggccaagagtttgttcaagtaagcgactcgaaaggcttattattaggatcacgtttaaacgcatagttcattttgttacgttctttcccttttacaattagtcaactttttggcgagagtgaccctgatgacgatgtttctcctgagacggtcacttccgatggaatgggcgaccaaaaaaactcacaaacaatggataatgatgggacgaccaccaatggaagtgttatttttgctgacaatgggaatagtagtgctaatgatgcgattacaaaaaatggaaaaatgagcacacggcaatttgcggaagcgacggattacggaccaaaacaaatttttgagaaggtttgtttaacaaagtaaaacattcttgttaagtttcagacttttagttgttctttgatgacattaattatttgctttcgatggccgatctttggaaggagcggaagaaaccaacgccaattcactttatgcaagttattgacgaaggttttcaattttttaaggtggatctctgattttaaaatggatttgtttaactaaaggacttggtgggagtcggccgaatgaggacgagaacgagcattggggcgtatcgaaatgggctgaactgtttgaggactctctttttgcgcttgcggaaagataccgaggagctgtcaaggaaaagcgaatgctcatctgggacaaggacgacgagccggcaatgcaatttgttgcggcctgtgccaatctacgggcttacatttttggaatcggcacaaaaccattgtttgacctgaaaggttttaattggtcgcgaaatgccttcaaaattagtttttagctatggctggcaacattatcccggctattgccacaaccaatgcctgtgttgctggaatgattgtcgtcgaggctctgaaaatcgtttctggtcagctgagcaaatgtcgaacggtaactttcgcttgtccaattaattcccttttcatttgtttagatttttatcaaacgcttaccaaatccgcaagggaaaattttggtggaccaggaacccagtgctccgttcccgaaatgttatgtctgttccggcaaaggagaggtgacacatacgacaccattactccaaaatattgcccattcttggttctttttcaggtgattgtacacgtcaatttaaatgaaatgttgctcagaacattccgtcaaaatgttttggtcggtgctttgaacatgttgaagcctgacgtgatggatctctgccaaaaccaccgaattttgctctccagtgaagaaggcgaaaccgactccattttggaccgttctcttggcttattgggagttttgaacggcacgcaattggagtgcgatgactatgcccagcaattgaacttcaagctgatccttttcaacgacaacacactgacgggcgaacagttcaaaaaagtcgaagatcaggcgacgaaaggggcgaaaagcatttctgacgacaaacagaaaagagaaaacgaaatagacgaggaggaaggagtgccagtgaaaaaggcgaagattctctgcgaaacctgaatgggctttacatttcttgaaatgtccatcgttattattattattattgttttattattattgtcatttaattgcttgcaattttgttatttttgatcaatattgcattgtcactgaaaatagttccttcgtttatttcatgcatttgtttgtttctgtcaatatttatttttgcattaattgccccattaagaaacgttgttttatttagaattttagaaaatggatttgttagaaatcattgcccagaaaagaaaacagattgaggatattgcaatcgaacatggggtaacattattagcattttgatctcccaattaataatggttctcagagtggtgcgaaaatgatcagacattctgatctgtttaagaaagagaaggacgcttatttggagcgacaaaaacagctgggaaaggaacagcacctttctgtcaagggtttaaacaccgaggaacttttggacgcaaagttttcattgaccggctcggattcgatgccgcgtcccgaagttgtgcgtcttgagggcccgagggcagcccattcggctttttggtgaatccgatgcgatggctttaaagcgattgaggcgtttggaaattgaaaagacggaacaaaatgaggggtggaagaacgactttcaagcggcactcagtcaggtggagaatgaggaactgatggagcaagtgatcagggggaagcgtggaaaagacgaaatgggcagacacgacgtgcaaattgaacagagtgaggatgacgccagctgggaccaaattgtggtaagaagcagtttcattggggttcgtacaaaattcatatgacggttcttccaaaatttaaaacagattttttgagaggattcttaaaagcgtgttaagacatttgcggtccggacatttgcgcctcggacatttgcgtcccatttcttaagggccattttcggacatttgcggcccgacaaatgcggtcggacatttgcgcctcggacatttgcgtcccatttcttaagggccattttcggacatttgcggcctgctgaaaatcggacatttgcggccaacggaacgccaaatattacttttttaattccaaagaaacatttgcggcccgactttttcgaccccaaggccagaatagggctcatttatcgaaaatcctttttcctcttaaattttcgccgaaatttattcaatccagtaattatttttaaaaaattgggctgtcaaaaccccactagagctcgaaagttgcgctagtcagtctaccaactactgtagagatctgagattccctaataatgttctccatcattttgggacttgtttcgctgatattctgctcctcctcttcattgcttccagttgggtgggggttaggaaattttttttctctagaagacttgaatcggcttattagaaagagcattaaattcggttaaattggatggaaaataatttcctgaagtttttattttgttgaagtcgaaaaagttgagccgaaaatgtcgtttttggctgtggccgcaaatgtccgaccgcatttgtcgggccgcaaatgtacgattttcagcaggccgcaaaaagtttttcgccgcaaatgtcctacaaccaaaggaacagtgtagtcagagaaattgagaaaattagcgatgaaagaaattaaaatgcagagtgtgagacgaaaggagagagagaagagagagttcgggaaaggtcgcatctcatagtttcgggaaataccaacgaggaaattgataatgttttctgggtcatgcacgggcaggaaggccaatgaggtgatcattttagactgctcttcgaaagcaggatcagtgttataaacctaaataagtcagaaaacaatttatgatccaaaaaattcaaactgaaaagaataattaaaatccgaaagaaaaataagagcaaaacaattttttggtaaaataatagagcatgaattatctaatatgcaaccacgcgaaaatggccacgcgaaaacgaccctgaccccaaggagagagaacaacgaaaggagagatgagaaaaaactttcaagattatt

SEQ ID NO: 4358 - DNA, 3997 bp, Heterodera glycines
ttttttttggggagcggtaccgggaacatgagttttttcaaaactggggacgggggccctcgaatggctgggaattctcgggccggtcccgttcccgtggcactctaattatttttgatgtaaagttgtgtaggtctttatttgaacacttcgtccttaaaatttcttcagtccatttgcagaatttaagccggacagcgcaggaaaggtcctatgatttggctttagtcgagctagtcccagtcaaagtgaacgggatcggaactaaaagtcgtatttgccgggactctcgtcccggtgtttccagttcaggcttatggtgaaaatcttccatttatcattaagtcccaatttttccttaaatttcctcaactttttaaagttttgtatcaaaaaattcacaaatttttaaaacaacaaaaaattctcattttcaaaaaaccctttttaacccctccaaaagggtggggggaagtttgggcaccaaaagtttgggcaccgggaagcaatgcaatttttaaaaaattaaaaaatatttttgttaattaaattttatgcatttgttgattatatgttaaatatataaaagaaaaaaataattaaaaagcaaatggaaaaataaattaattaaaaagtaaatgactaaattattagtatgtatttacttttcactgatttattatataaataatttgagataaatgttaattaaaataatttgaattagccaacatttatcagctttttgaaatcgttatctttagtctgcacatctgctgtttacataaacattaatatataggatgaaagtgaataaaaatattttcatgaataacttaagatgggaattgtccattataaattttttctgttttctgtgtttaatttacccaaagattttcggttttttacaatttaaattttttacatcgtcgagcggaagcagctttacgtgccttatacaatggcacttcccgaggatcagaatttgtgtcaagcgattcatctgaggggcagcagaaggagcccctcagcacataaattttttgtaaattgtttcaaaacgccatggctaggaaagtaaatcgcttttaacgcacaatggctttgaataggctcccggacagtggacattccgacagtggacaatcggacaatccgacagaggtggacaatcggacagtgggtaatccgacggtaaaatgcacaaaaagattaagaaaatgccatcgccgaagtgaaccgattgggcaaaggtatagattattggtcccgaaaattattttttaaataaagtttaagaaaattatttttaggggtaatctgaggcgccgagcacgaatccggccttattttggctcagtctcgaatcccgaacccggactcgaacaaaagttcgagaattcaatttttcgtacttcgcagttttagttcaaaacccggctaggtatatacgtggaatcaaacaggatcttattaatacgtcaataaaagattatttaaaccattttgcaccaaaaatgtaaagtttgaaaaatttagatttttgaactattattcgaatctgggtcaggggttcgaatttggtcgaaattgatgtcagaatcggatctccgaccctgaacacccctaaacaactttgtttctagaaaaaaaaattaaaatttttcaaaaaaagggtgcggggtaccatcgacagtattacgaaatgttcgaatccgggttcggggttcgagactgagacaaaataaggccggattcgtgctcggcgcctaagattacccctaaaaataatttcctcaaatttttattaaaaaaaaattttcgggaccaaggggggggggggtcagttcggcgccgccaactttgaaatgccttaagcgccatgaaaacaatttgccaaattgggtgtggaggaaatttggtcaattcttccggtggcaaaaaatgaaggcgaaatcggttcatatccacaaaatttatgatgattatcctgtcatttcaaataattctcttgtttctttctccgctaaccaatcggcgccgtcacttatcatcaacgaccttttcgttgcttttgctcgttttttttggcggagacaattgcctaaataacgggttcagatttttgaaaaacccgaattggggatggcacgcccggccctgccaagatttaaatgcgtgttcagttgttggtctctttaagacccggaccctaatgggcttataccctctgttctggttctcatttttgattcgatgaaaactaaaaagagcaaatgccctgtgctcagtgcttacccaatgcaattgtcaccaatcaaatgaagcttgactccgttcaaattgtctgccgaattttcgtcttcccattgaaccgccgccgccgtctccccaacaattgggcatcgcttcaacagccaattaacatatccaaaatcgccttcgtgcttctgcaggcttagcttttcgttggtccgctcgttcaccaatgcaaaaagtgccattgacaatgccgggaaatgacaaaattccacattgtaattagcagcaacggtggcactgataaatgcctaaacaatgttcggtcaattgtacggtctgatcagaattatttgattggacctctttgatattgttgatccattttgtaatttctggatctgcatgaacaagatctttgtaaaacaatcgcctcggctgcccatcagtgcgcggagtgtgcaaccatttagccaatgattggccggcagttctatatagcccatccaaatcacctaatccatccgggagcacaccattggcttcaattgatctcaggtttagatcggtaagaattgttggcgaaatgagacggcgcaaattgaacagatgatttgcagtgggaaagtacaaatggtgaatattaggggcaaaagtgggcaaaatttgacgggccaatacatccaaaatcggaatgacgttgtctattttgtatgaacacacatccaaatacaaattggtgcctcgggcgaaaatgtgcttattggagcggagaaatgtgatcacggaatggcaaatgtacctgaaaacgaatgactgactatcaacatttaataatgaaagaaagcattagagtactcaattttgaaaaaataaaagcgaattttgttgggcagcggacggtcgggcaagggaaaaaactcaaatttgtcattaattggtacagatattataggtttttcagcatttttgtcttctcgaattgcgattgttctccaaattgtccattcgcttttgccatcgaaatgtttgtccactaaaacatcaaaacggggcgaaagcaatgccatttttaggccgagtttggcatggtcaaaaagaggaaaaatgtccatccaaacgtcgttgcacacccagctgaaattgtggaaaatattttagggttaatgaaaactttgataccgtcggttcattatgtgacaattaacacaattttccgtattccaagtgaaaaagaagatatgtaggtagggaaagcggaaaatatatgtacccttattccgcttttctttgaactctggggagagttttgtcgaacgcaagattagaggcgcagaggactttttcgccaatttgaggcgattatcggcaataaaaactgatttgcctgaggcaaaggaaaggcacaaattgtgggacaattaggggagggctgagggcaaagagggaaagttatctttttgaatttggatggacagtcaaatcggcaaaagttgatgacaaaaaatgggaaggagacagaacggacatctgctactggcaaaaaaagacaagttcaaaaaggatttgtattttaaaagaaaatttcaatatctttcttcatctctattttttaaatggtatttcttcctttttggtatttttttaatttttcggagggagggggaatggaatggcacttaacgcagagttagtcggtaccggcacggtaatttttttttatttaaatggagat

SEQ ID NO: 4359 - DNA, 4804 bp, Heterodera glycines
ttttattacattgttgatcgagcaaaactaaattctaccaaaagtaacacgtacagttaattaaataaattataatttggctgctattttctgcggcttttcttttgatgagaaaatcatgaaaaccatggttttatctcgacaattgatcattttagcgccaccactattcttcattactgatgcatatttttgactttttatactaaataattgcttaattattttgatatttcatcattattttcgtcctttttataattctctagaaattttttaacgaaaaagcagtaaaaaacgaaaaaacgaaaaaaagagaaaaacttcaaaaactgatgcttaataatccaaaaatttgaattttgataggtttcttctaattatgtccaattattttcgtgagcgactctttggccattgcttttttgctgatttgtgagttggccaattcctgatcaatatccaagtcattaatttgccaattccctcacttttgactaatattcacatttttaatgcaaaaattcatgaataatgccaattaaaaattggtgatttaaaggaaaaatttatttcctttctcatcgcattgaacattcaattatgaattacaatttttttttcaatttacaattgtttttgggggtttttttgttctttttccctacttttttcaacctggcggaacaatcgggcaaatttatttttagaaaattagtttaaattgaatacccaccaatccatatttttaatgctgaatttaaccagcctgcatctcaactgaccacgctataaaaagcgcttaaaagcccgtttgaatgatttttttattgcttatcgatttagaccgatgtttttaggcattttttaatttgtggactatgatcaatgttttcccaattttcttcaaaatatttttagctttgttgtttttttaattttaattttaattttttgctatttttaagagattttctttaaatttaatgaatttaaaaaattgaaaaatttatatgcatatttttcaccttttaagtgcatattttactattttagtgcgtattttgcgattttatatgcatataatttttggaaaaggcgggatttgctggattaatcccgatggatccggacccgaaaattttttaaaattccaatccagcagagggatccacaaatttggtttttttctgcgaaatcccgccgaatccgcattgcattttttgaaaatctcaaagacggaatgccaaatattttccaaataattttatgcatgaaaaacaacattttgtccaggaaggctcccggacatttcgacaatgaccgtttcgccaatacctttcgacaatgccgtctcgacaataaaattaaatatatatttttaaataaaattcaaatttctctaaatgatatgagatagtgctggtatgggatcaatataaaatagttttttttcgtttttgttcaaaattgcattatgagaatggctttagttttcgaacctaaaaatcactaatttaatttttttttcgccacttacaaataagataattaggccattatttttaattatctaattatttttggatttttcgccactaaaaatacccaccctaatacataaaactgctattctttgcaaaatataataattatttgcaaatccaatatccctttgcgatcaatattattattttattattactattcataataatggaaaagatttttagatttcgagaaaattctagaaaatcaaatgaaataaaatttgttttatttaacatttattgaaaattcgtagcatttaattaatttattcttaaaaattattttctcgctgaatgaattgtttatttttaatattattttttgctttttgtccactctttcgcattgccttcttttcccaactatcatcatcagctgaggtttgttggtgttcttttggactgtgttcaaatcttaatttgaaaatgcctcattttaagccccgttctttaagctaattaaatgcgcacataatgagttaagaattcaaccgaaaatctgtgacagtaaaaggagcccggaatttaaaaaaatcgggatcgggctttgggattggtggattcgggccgggactgaaatccagattttgccggaatttcaatctcgaaccgggatacaagcccgattttgttgggatcacgatcctggtcattttctcaaaaaaaagcctgggttgagacccggaaaaataccgcgggatctcgatccctcccggctctaatattaacgggcaaaatttaaagaaaaatgatattgtaagccaattttttcatcccaaagcccaacaatccacttttttggggctgtacttggccacaatcgcatttaaattcaaccaattgaaaaattccaaaacgcatgaccaatgaatgaattttggcattggtcagtaatctaagccaatgaaccttttagtttttttagtgtttatatttcaaaattttgtgcagattgacaacgacgcgcttgtagcttttgtgaaagggccctccaattttgtgcagttttgcgccgccaaaggtgtggccaacaatgaaagcaaagggcttttggcccgagtttatggcacacaccttggcatgctgtaccacatgagactgaattggcactgtgccagaacgaacaattcgatacacagaatgctgtacaagagaaaatgcgaatactttcgcaaaagtgtggatattttgtacgaatatttgtcgagggttcacaacggaggaaacgcggaagtgacgaggccaattttcaaggccgaatccacttctattcagctgacatttgttgatgtcgtggagtgtttggccacaatttccaatttttatttttgtgatcaaaaaatgacaaataattacgaaataatgaaagaaatggccaagttcagtcagttcaaattggaaaatgaggagcagcaattggattttaagagcggaaaaagtgccaaacaaaaaaacaaaaggctgaaaacagatggaaaggcaaatggaatagaatttgagcaaaaaatggaaaaaatgttcaggaagataataatagagaatgctaaattggcaaatggaagctcatcatcggcattttcatcgtcgacatttccatcatctgcgtttccgttaccgatttccatgtgcaccgtacctatttatgatgccgctttgcgcgtgccaatatatgacatgagcgatgctgtaagtttctcgaaaaaacaaatattcgggttagggctgccattcgacaaaattactcggaaatgcttccggaaaaatgcgtcagcaatattaatttccataccaattcaggattagttttcaaattataaaactactgtatctctttttaaattcactgactcattttccggtcaagtttggaaaaataaagaattacagaagtagccaaaccagattgaatttttgaaattggtgcaggaaaatgccaaaagatttaaatggttgttatttcgtgccatttttgataaaaatctcaacacttgcagattgaagaagaattatttcttaaatttgtgaacggaagtgccgatttttccgcacattttgctgctgtgccattagatgaaattaaaaagtacgaaactcatcttggtctactgtatgcgatgaaaacaaattggcgttgtgccaatgccaaaaataaaattgacaacagctgcaccaaagatcgccgatacattgacattttgtatgaatatttgttcatgattcgctatggaattaagtctgtgaagccgatgttcgagactcttgtagggcaacggtaatattatgtttaaaaaagcaggaagtaaaagggaaacccgaaaaacggtaattaaccctctttagtcattcgtcctaaattatttttaaaattttttcgaaaataatttaaaccgctaaacatttaccccaattttaggaggtttttgcatttcagtccccttaaatataaattaattggtaatcagttggattaaaaattgcatttgggattttaggccgagtgagtcaaagtttaatgaatgttgtgcatttattgggcaccatttctaaatattacgccacgggatatgaaaatgcagaaggcaaagcattgcctaatgagccatttaagctaaaattaacaaatgaaaacgaattgctgaattatggcgcaaaatcagcggcaggtaataatgacaaagaaaaggcttgaggacattatgaaatttataaaaccaaaaacattatcaaaacgatttattgggaatttattgcgattaatgaggtttctattaaatttgctgaatttaaatatgtgtgtatgtatggtctattaagaaattataaggacacttcacctacttcccataaatttgtaacggaaatttgtaattagtgccgccctgatatgcagacaggctttaggccctataaaccacaaaaaaacaggcacaaaaacaaaagtgccattttctctgtaattctcggtaatttaaccagtttggcttttttggatgtcgctatttgcagatttattctaaaacagccatttttaagctttttttaaaaaataattacaagtggggcacctttgtcatttgtccattagcagggatcatttttaatgtaaatacatattttttcctggcttttccatgcttctaaatagtgggaaaaacactttcttttttgtttttccgaacaaaaatcgggacttttatttacatatttcggggtttttctacatattacatatgtacatatttttatacatattt

SEQ ID NO: 4360 - DNA, 4843 bp, Heterodera glycines
  unsure (1)..(4843): unsure at all n locations
tttcgaatgataccaaatttgttcaaatttgaccgtttcctcctatcaagggcacccttttcattcatttttcgagttttcatccggttcaaaaaccggttttttggcatttccgcaactggagacctactttctcgtgcataactcgtcgagacgaatcgattggtatatcattggtgccattttttaatgggaccttgactatagtatatccaagtctattttaggggtttccgagtcggtgaacttattttccggatttttatgaaatttaatttatttttttctgcacattttgtgggtcagcgaaatttcttcattaggacgtcattttttgtcactagaaatcactattttggcgtttcatcacttaaaatatgtagtttaaattcactattttggcaattttgtcactattttttcactttttcgacattttttgaaaaatttgggctcccggacatttcgaaaatgaccgtttcgccaatgaccgtttcgacaataccttttcgacaatgccgtttcgacaataaaattaaatatatttttttaaataaaattcaaatttctgcaaaattatatggacggtgcggatttgggatcaatataaaaaagtttttttttcgtttttttcaaaatagcattatgagaatggctttagtttgtcaattttcggcgcaaattgcttgtttttttaaattaaaaattgaaacattgttttacacctaaatagttgataatgaattagaagcttttaggtaatagtaaagtttatcccccccccctttttcaaaaaaaaattaaaatttttaaaaatgcttaaaaacaggttttagggggttttcggggtcgctaatcacgaatccgacatccatttcgaccaattccgaaccccggacccgaattcgaacaaaaaatcaaaatttcatttttcaccaaaatgcatatttattgcacaaaatcgatccaaatgcatatgcgcataaaatatgccttaaaaactgcaaaaatggcttttaaccctaaaaaaatgccaaaaattgtgtaaaaattctgaattgactttaaaagcttcaaagaggagggaaaagaaggaatgacttttatagtacgatgcagcggggaaggggaaaaaattacaattgcccaaatgccaaatgttttttctcctttataaggggtgcttttctcatcggactgattattttttctttgaattaacaatctttgcattactaaattgcttaatttgtctcttcgttgctcaatcctctgttccaaaattccattttgtttttcatttttgaccagcatattgctacccatgcactccgtcgattgtcaaattcatcaacgacatttaccatccgaacgttggagaaagcggcgacatttgtttggacgtctgaagcagatgtgggctccggcgttgaccatttcgaaaggtgagagtggacaaaacgccgacaaaatatcgacaaaacaaaacgaccgccataaccagactttttggaaaagtgtcgatattttgtcgtgtgaaatgggatttttcgaattcggtagtgccgttttaatctttatccccccccccatttcagtgctgctctccatctcttcgcttctctgtgacccgaatccggactgtgcgctgcgacaggacattgcgattatgtaccgcgacaaccgtgaggagtacaaccgaaatgcccgtgaatggacgaagaagtacgcgatgacatgacacgacaaacgaccgatggatgggagaggatgcagaagacaaccgccgaagaggaaggaggaggaggaggatacattcaacttaccctattcccatttatatgatcccaactgtattgtatcattgtatctcattgtatgtacattattatgtcgcccggttagtatttaagcgacgataagtgtctgttgttggttgatcactattatcaatgtgttgtatctctatattatcatttcaaacgatttgtgattaattgttgcgcctgtgtgtaaataaatgtgaagattccaaaaagttgttttgaaaaaagttttttttgcggcgcgttttttcaaaaaattttggtggacgtccggcggccgccgggaaaaattttgtaatttaaatgcgatttgttaacagatttttgttcaaaaaataccaagttttgccacaaatcttatattttcatgataaaatagtgacattctgccataaaatatcaaaattaagagtttattcaagtcttttaccttggtgtgggactaaaatgaaatttagggctcccggacatttcgacaatgaccgtttcgccaatgaccgtttcgacaataccttttcgacaatgccgtttcgacaataaaattaaatatatttttttaaataaaattcaaatttctgcaaaattatatggacggtgcggatttgggatcaatataaaaaagtttttttttcgtttttttcaaaatagcattatgagaatggctttagtttgtcaattttcggcgcaaattgcttgtttttttaaattaaaaattgaaacattgttttacacctaaatagttgataatgaattagaagcttttaggtaatagtaaagtttatccccccccctttttcaaaaaaaaattaaaatttttaaaaatgcttaaaaacaggttttagggggttttcggggtcgctaatcacgaatccgacatccatttcgaccaattccgaaccccggacccgaattcgaacaaaaaatcaaaatttcatttttcaccaaaatgcatatttattgcacaaaatcgatccaaatgcatatgcgcataaaatatgccttaaaaactgcaaaaatggcttttaaccctaaaaaaatgccaaaaattgtgtaaaaattctgaattgactttaaaagcttcaaaacaatgataaagaagctttttttagacaattgcaaaaaatattgaatttcaaaatttatatatgcaattttgaatttttttaaatttttattttatgctcaaacaaatttactttttttgtattttttgcatctaaatttttttttcaaaagttcttacaaaaagctaaaaaaatttcgatttttaagggtgtattttttaattattccaaaaaagccgatctttaggggcgtatttttcattttttattgcatttttcttatgaaaatttgacaaaaatgaccgaaatatgctctaaaaacgcaaaaatggcaaaatatgcatttattctcgaaaccacccaaaatatgcttttatatgcactaaaaaccttcaccaaatcaaaaaattttaacgtagaaattctatttttgagcccctttcttcatagcatatgcgcagaaaaaatatgcagccctactcatcaagtacctaattttttctaaaattttattattttaaattttcttttccgatgaatttagggttaagaatgcgttatcacgattccgagctcagattcttaatcagcgcatttttctatcctagaaaaaatgcttcttaaatttttaaatttattttacgcagaaaccacaaaactgcaccattgcccagaatcctgtatgtatacaaactcaaacaaaaagaaaattcaaatttgtggcccaaatttatattttgttgattttcaatttcttagacagttttagacccaaaagtcgaaactccaaaattttccaatttacttattgttgaaaaaagaaaattcattatttttgaaattcaattttgtgattgtgcaaatggcaatttgatggcattaattcgagaaaaagcagtagaaaacagaatttttatgctttcaattagtacaaataggtattacaatgcgagtgtgttttgactttcactgtcgagatcacatagcacttttcaagcaaattttgcaaaattgctatagataagcttaatggctattgtaattagcattaattaatcatcgggtcaaaatgcctatataaagggaaaggttcgaagaaagttctcttatttttgtgcccgtcagcagggatggcacggaatttcgatttccgaaatttttgataaaaagtcggaaattttcggaaattttttttgaattttttttcaaaaaattaacaatttttttacaaattttgttaataaattgcactgaaattttcaaaaatttcccggcggcgcctatcggcaccgccggacctcccccgccatgttttcaaaaattttgaaaaaacgcgcagcaaaaaaaggtaaaactttgatgaaaatcattgaataattttttaaagcaaatatgtatttaaatagatcaaaaaatttttgagtcaccttttacttggttaagaatttaaaatttagcctattaaaatatttagaaaattttttattattttttgttttntgaaaaatttccgacttccgatttccgacgtttttgggcctcggaattccgatttccgaaaatttttgggcctcggaattccgatttccgaaaatttttgggcctcggaatgccatccctggtgtgaagcatgttcagagttgtaagccccatctgagtttaaaaagtataaaataaatttgtttttatttcattaacttttaaatgtttaatttaaattaatttttttaccacaaaactaaaccaaatggcactgaaatgccaattgcaccgtctttcataatttttagctcacagagtggccattaaacgttcaatgactaaaacatgggcaaggtaattgcgaaaaaatatgggagccattgtggcacgagtttgccaaactccaccatctgtcgaaacgaattgacccgtcaaaaagtcttcaagcaaaacttcaaagcgaacttaacc

SEQ ID NO: 4361 - DNA, 1355 bp, Heterodera glycines
gataacggcccgtaagcaaagccaataataacgatgaattaattttcatttggtttttcagattacgccttttgctggattgacatgctgcacagaaacccctcaacaatgtcactgcttcgtttttcccaacttttttggagcgcattggtctcgcttgctcttctgttctatggcatcatggaaatgctgcgctctatcgaagaatataaagtgagcgagcgcaacacgtggcccacatcaattcaacccgacaaaatcgtgaccaaaattgcttttcagttgaaatccgattgattttttggatcaaattgagatttaagttttgtagtgttgaggttctgtgttcacgagttgtcaaaatatgttttgtctgcgtcgcttaatttgtttcttttcaagatcggcatctattcgtatgccttcgcttctatcttctgctgggattgctctgttgtgtactcatccaaattgctgctccattggacggacttttggacttgcgtcaacttccaagcggatcacacaaatgtgccgttgatcactttggtgagtttgttttgttgtcacatttaccatttgattcctacatttttcaaaattttaaacacttttaaaggtgctcagcattgtcttgttgtgttcgtccgtcttcgagattattcttcacaaattcgtgctgaatgatgtcgacacggaatgtgccaatatgatctttcatcagcaccagaagaagaacggaagtgccatcgaatgaacttaagcagagacgagtagaacgatgccaataaacataatcaatacgatgaaacgacgatgtgatggatgcatgatatacttacatataagataaattagttaacctatttcgtcataaactgttgtattcaattgtatatttcatatgtcaattgcatatctgttctacccgtatgcttaaaaatcggattgggtgacctgctgctttgaatcgtaccgacttttgtctgtgtcaacatacaaaaccaaagattttttaaaaatattttaataggcaaaattttaaaattcttaaccaagtaaaaggtgattcaaaaatgttttggtttacatatttgaatacctatttgcttgaaaaattattaaatgatttcatcaaatcttttttatgtcattttacaccattattttaggtcaagattacatacaaattagtacatatattgtcagataaattttctctgcacattttgtagatcattcaataattgtgtatctcatcaaaaagaagtttttttagaggttttcgaagtcgatgatcagtgataaggaatataatccgcatttctactcatttggattttttaggtcagcag

SEQ ID NO: 4362 - DNA, 1113 bp, Heterodera glycines
tttattataaaagctaaagggaaaaataaaaaaatccatttaaatggaaatttttttttcttaataataaaaaacagaaattttttgcattcctgatcacatttcatcgtctttggttatggaaaggctccaacaaacaaccatgataattgaaaaaaataaaaatttctatccctaaataagtatataaataaaagacacgtgcaacatttaattcagcgctggaaaagtatacaaatttttgttatctcccgcttttttgtcacggtgaacattttggacaacatatggtaatttgtgtttcgattccatagcaaacagttttttctcctaattaatttataattttggccaaacatcgcgtttatgcacatcaaattttttttattataaaagaccaaaggaaaaatttaaaaaatcatttaaatgaaaattgttttctcctaataattaaaaaaacagaaatttttggcattcctgatcacatttcatcgtctttggtttatggaaaaggctccaacaaacaaccatgataaattgaaaaaaattaaaaatttctatccctatataagtatataaataaaagacacgtgcaacatttaattcagcgttggaaaagtatacaaatttttgttatctcccgcttttttgtcacggtgaacattttggacaacatatggtaatttgtgtttcgatttccatagcaaacagttttttctcctaattaatttataattttggccaaacatcgcgtctatgcacatcaaattttttttattataaaagaccaatgggaaaaactaaaaaaatcatttaaatgaaaattgttttctgctaataattaaaaaaacagaaatttttggcattcctgatcacatttcatcgtctttggtttatggaaaaggctccaacaaacaaccatgataaattgaaaataattaaaaatttctatccctatataagtatataaataaaagacacgtgcaacatttaattcagcgttggaaaagtatacaaatttttgttatctcccgcttttttgtcacggtgaacattttggacaacatatggtaatttgtgtttcgatttccatagcaaacagttttttctcct

SEQ ID NO: 4363 - DNA, 1738 bp, Heterodera glycines
  unsure (1)..(1738): unsure at all n locations
ttatttaattagacattctcatcatgggcattttcacctccccttttgtggcccaacttcggcacaaaagcgggtcgcccattgccgaatgttacgaagtgcgcattttgttgtcatcgcttatggcacggattaacttgttggagcgaagtttatacgaatacaacgacaatttgccagctccaacacgaaaagcgtgcttagagaaaatagtgagagcgaaaaacgaattttacgcaaagatcgccgaaggaaatttgtcgcatttgagaaaaacgttttgcgtaatgtaccagtttgccaaatttttggagaaaagtgttgccgtggggcgtttgggggaggcaattgagcgatgggaggcgacggaatgccaaaatgaaaatgtcgtcaaagagacaattttggcacatcgggcgcagaagaaacgcactatttttgatattataatatcagctgtaaaaaaggaggaagtgatgagacaactcagagaaatcaggggatgctacacaaggataagcagatatttggaggaccagagaatgttcaagaagctgctgaaggaggcggacttttatgagcagagaggtaaatttattatttagaagcaattcaaagcgattaagggactaattgccataaaacaatgccaaaaatgtgtaattattaaagccctgaattttaggttttacctattttttacggataatacttgatgagagaagcacgaaaatcatattttctccgaacaatttttgaattagattgactttttagcatccaaaaacacttaaaacggggatcagcacttttttagcattttcggtctttatcacctattttggcctttttccagaaatttcataccaaaaatgcaataaaaacgtaaaatgcacccctaagaatcggtcccagaaatttcagaaaaatacgccccgaagaaccgatcaagaaattttcaattacaaccctaagtatcgaaaaaattttttttttaaatatctccaaaatttattatttattttttcttgacaagttgcaattgttcagacgaaatttttgcaccttttttgcacctattttagtacctatttcagtatttttggcacataaaaatcccagctctagtcattatctaaattcgcaaaacttagaaattttgggccgtttttatttctcaacatttgtcttctgtgtgggtgcattagattaagatagcttttaacattttgattactctgatagggttttgctatataataataaaaaaaaagataagagcacttttagtaattcaaaaactattagatttgtcagtgtctttcaattaaaatagctattcttctaatagtttcaataaatgcgtggagattgaaattttcaacactcaaactctttgataagaaatttaagtttctttctttgcttatctttcagtcgaacatttcttaaggcaaaaaaccgtggaattattttaattttattatttttagtttttgaaaaagatcgcttaatgcaagcccattacattgaagtgttattgtgtgtcgatttggccataaatggcgagggatggctaaaggccgatttaatgggttttgttcgttggatggactcgaaaaaatttgcaaaagatgcccaaaatgagctgatgggccaccgaattgggaaagtgtgggacaacganattcggccaatttttggcaaaacttacgacagtttttacgatttggatgac

SEQ ID NO: 4364 - DNA, 1811 bp, Heterodera glycines
  unsure (1)..(1811): unsure at all n locations
gccaattttgcaaaaacttacgacagttttttacgatttggatgactcgccggagaatcacgcgtntaaaattaaaaatntaagaaaaatattatccattttcaagaattatttggacaaaataatcaatgccaaaaaggcgaagagtgaccgcgtggtttttgcggaattggcaaaaattattggaagcggcggcgactctctgccggcgaatggcaaggaaacgataaacgacatcaacggaatgccaatggcactttcggaaacgcaagagaaatcgtggcattgttttgaaaattggatccaaaatttgcatttcgatgtgctaaagcaaatgctcaataagcagactatattcttcgacaacattaaaagatgtatacaattctctgagttttacagaatcatggacttttatttaatttttcctgttcttaggctgtttattctaattagttataattagggtaggtcgggaccgggaccaaaacacggacaactgagtatcgaagtcccggttttgaccagttttgaccggaccgggaaattcccggttttttcccggttttcccagccaaaaagtcccggtttttcaaccgaaagcccggtcgaggttttgcccaaaattcccagtcccgacctaccctagataattaatgccataattaattgagcacccaaatttcagtttttgaatccaagccaaaagaacatacggataaattgatgcttttcctacacaacaaacaaaacgtggagaacattttacgccttttgggcattgattttgaagccaatggcagcagcgacggagatccgacggaacgaacaccgggggcggaagacgacgattggccaagtacggacagtccaatgggaagcaccgcttcgcccgtggtaagtccatcgacagaaagaaaaaaggccaagcggaagaaggcaaaacgaagcaaaaaccaacgcaaaacgtcaattgttgagcatgaaattgacgaagaaatgtttttgtcaagtgaaacgcccaaaaatgggacggaaagccaaaagaagcaaagtgaggaggaggaaaagccatcagaacaagaagaagacgaagcagtaattgaagcagcggaaattgaagaattaatcggggaggaatcatcaaaagatgaagcagcaaatgggggaaaagcacaagaaaaagatgaagcgaaaattgaggaagaacctacagcagaaagggcaccagacaaggaagaagatgaagaagaagaagcagtaaatgaggaaaacggaccaaaagaagacgaggaggaagaaacagtggaaaccggagaattaattagggaggaaccatcaaaagaggaagcagtaaaaggggcaaaagcacctgccaagcatgaagcgaaaaatggggaagaacctacaggaagtgcaccagacgaggaagaagaagaagaagaagcagtacatgaggaaaaagcaataaaagaggaaaaagaatctgaagaagaagaagcagcagtaattgaggaaaaaggagcaaaagaagaagaagcggtaaaagaagcattggaaggggaaaaattaacgggggataagaaggcaccaaaagataaagtggatattggaaaaaaagcatttgaaggtaaagcagtaattgtgaaggaaccaatggaaaaggaaccgctgaaaaatgaagcagaaaaagcggaaaatgaaaaaatgccggaacattcattagcaattccatcagttcagaaagcggaaagagagatggatgtgagggtagaaactattaataggaatgaagaacacattgattatca

SEQ ID NO: 4365 - DNA, 6002 bp, Heterodera glycines
taaacaattcaaaagttatttggccaaaataaaaaagttgaaaaagagcagaaaccaatggcaaaagaaagtgtcactgtgccgggagaggatgcttctgtgcgtgccattgtccatctgctcgaccttggcatttacgcgaacgagatttggcaccgattgaacgctattagacttgttgagcaaatatggccagaacttggcattttgcagtcggaagtcgctaaaattgagggccaatgggccaaaattaagggcatcaaattgtcattgaaaagccaatggacggaattggagaaatatttgcatcaaatgctaaagcaacttttggtgctaatggacaaaaagaaattccctggcattaattatgatggtgttgctaatgataatgagggagaattgttgcgcgaaatccgtctgctgaaggatgaaatgcatttgcgtaatttggcattttcactcgccgaaagcaaaagcgcacaaacaatttggcacagtttgtgcccagctcaatccgcatcgtttttgtcgttgctctttagccgtacgttttaaaatgaatttctttaaataaatattttaaaaattatttatttcgaaaaaacactcatttttaatgagagaattattttcagttttttaaatttgaattttattttttaagatttgttcagaaagcatttgcatcaaagagtgaattttgcgatgaaagaaaataatcagcagaaaattggtaaattcataaaactatttatgaaaataatctaacaattcagatgttaaactttattatgaattccgaaacaataaaaatttgaaaagattcgttccatttaaaatgtccgccaattttgcgacgaaaaaattgaaccaaatttcggagttatggcaacacatggcttttggggaggacagatttaacgaattggacatttacaatttggtatttttaattttaaataaattgcaaaatgaattatttatttagaaaaatgaaattgcaaagggaaataattatctgatttttgatgtaaatcaaaaagccatggttgaaaatataatcagagaaatggatgaacttctcaaaaattgggtaaatatttaataaatttgttgattttttaaaacttgatttttagtcatcaaaaataaattgccatttctccgacgaatggctgtttagacccaaagaagaagcgaaactcagtgccatttgcataatgccatttgaatttgacatttcgtcctttttgggcacttatttttcgagtaattcgtcagtttgccatgaccaatcgctgttctgtcgactgtccaaagtaaataatttattttttcaaataaattttaaattctattttttcaatttccagaaggaaaatctattggcactccaaagaattcaaaaagattatttcaactccgtgccacaaattcatttcacttacaaaactctgcctgtaaccattatggccattttggtaccaaaccttggccaagaagtgccaaatgggtcattggatgtccaaaaaatcaaaacaatcgcacaaaaatttggcgatgaaatcgaaaaattgatcagagctgatcatctttttgacgaaggccaatttcgaatcagccaaagagtgaacgaccaaacaatggagcagttggccaattcaattgttcacgcaggtaaaagggcggacaatcaaaatgaagagataattaggtaattaactgagtgttaagtgccaaaagaagcggccaaaattatgcaccaatgggtaatgttcgatcagttaaaagacctgctgttgaaggaccgacaaaaagcaatgaacctgagggaatctgtgaaaactcatttggccatgataaaggcatttgcaagtgcgaaaaatgccaaataaagtttaaaacccaatttttgaaattttagactttacaactcatgcaaaaattcattggtttttattggacaaattggacacaacacaaaaagaagcagccagcactgtgcttaaccgcaacattaataatcataataatttgttcattaattttgcgtttcttttggcttatttggaacaatgggccaaatgtaagaccattttatttggcaatgaaaatttaatgccaaatttcagctaatcacattaatggcgagcatatcggctttttgaactttaacattttggttgtaatggtaacgaaaattgtgctcgcccactcaaatgccgcactgccgatattaatcgaaaaattcttcatcacatattcaacatggcataattatatttaaatagaatctctcaaaaataaaatgcgattaattaatactagttaattaactaattaattgcaggccctggccactgccggttcaattgacagaaatttgtgtccacagaaagggcgaatttctgagttggatgccgggcagagaatggttcacaaaaaggcaacattcgcccaaaaagatgctcaaggcgatccatgccgaattggcaatggccatcattacgccgacattccctgaacgaaatttggcacaaaacgcaaatatttccgctttaaaatgcatccaaaatcaaatgaataaaggcaattaaatttgaaataattgcacaaataaaatgataattttagcattgaaaactctgcgaaatgaatctgacaaaaatgcgctaattgggccattaatcaacaaaacattcagccaaatggtaaaataaaaattaatttcataaattgtcccattaagtatgagcatttcattgttgtcatttgcgctgctcccaattatcaattggacacttttgctaattttgttggcattcgaattgggcacgaattgccagaaataattgaaaatccgttggaaagatggattaagttttgccatctgtttgcccgtccaatttcacttggcgaatgtaataataataatgcaccatctccaaaatcaacgacgtaaattatgcttttaatttaatatatataaattttaaaaatgatttatttttcagttattgtaaaaagatttggctggtcggaattgaagtgaatgagaagcaaaaagaattgagcaaatttcaggacaaaatgcgagaaaagcttaaaaagaaattggccgaaaaaatcatcagcaatttcgagggaagctttgttgaaattgaaacggactatgtcaatgagcgggaacagctccaaaaattgtggtgaacaatttggaaagaaaatattatttatttaatttttaattttaggggcatcgatttaaatttaatatgagtaaaacaaaagcacctaaatcatttgcaaatgatcgcagaaaatcggtgaaaataatcaatcaattaaccgactcattattcaataattgttcatttcttcaattgtattaaattactacaaataattttcacatattatgcataaaaagctgctcccttttctcattttccatttaagtaatttatttaattaatacaattagcgcaatttgaatttacaattcacttttgataattccaagggtaatgtaagagggaaaatcgcttttaataatgaaatattgtttttattttttgcaggcattttgtcaatattggtataacggagtcactcagttgggccagcacggtttttttacactataactttttactttatcattcaaatccaataatgttggtatttttgctaattttctaatcgcgaagcaatagctagaaaagcttctaaacatgttaagtttcgaatgataccaaaaatgttggattttgatgacaaagaaaaaagttatagccaaaaacatgctgggcccaaatgtgccggcccaactgaggtaaaccgttgtataagaagatctaaaaaagaggagtaatcgttgtcgcaaatgcgcaagtttagactaaattcagcggtcaaattttagcgtgtatcgcaacttgtctaggaatcgaaaacttttgggtgtttgaagaaaatgaaatatgaaattgaaaaaatttatcaaaatcggagaaagttcggaatcgaataataatttgttcattttttgatctttttccaaaaccaataaaattttaagcatttttgcaattatggcttattaaagttgtctcatcagagacagagttggcaagacccagttgacccttatcgtccgtctcctgggactttctgagaaaaacaaacttttttcgcgcatcgcggattcaatttgccccggtcgtgtcccacccatggtacggacaagggatttatttgctcctcgttttctcgcattcttaccttttttgggcttctcgtcgagcattaaactcgaaatgcgagaattttataaacgctgttcagaaatggggttagagtgaaaaattattttggaaattgtggaaaaagtaacaaacttttactataattttttccttttcaaactcattatttgcattttaattatgaacggatccgatcggatttttttttaatttggattgagcagcgtattgattcagatgtttatgaatttgaaaggttgagcaaaattttaaaaacacaatttttcgaagaaaactccttgaaaatttcaaatttctcacagtggcgcctattggtacccccgccgaaatcaaaatgttttcttttcttttttaaaaaattgccaatttttctaaaaaatttaaagcgatttttgtaaattttccaatatttattgtttaatagggccgctttaacagaggggccctttatagaatccaaacatatgtacaagcaccaaacgaagttaaaaacatttttgcatgtttattcctaacacagtccatcaaaacaaaatatggaattagaggaatttttagctaatgatcaatcccatttcatctgtctgtctgtctctctctgatcgtttattttcttgctttgcctttgccacggtttgttgtgccacggcttgatgaagcgccaccggtgtttttgctcgtccctccgccgccattcttttttgtcgtagtgagcttgccgaatagttcattttttgcacctaacatttttttgttttttattttggattttttttgtctgccagaacataatttcgtaaatgaaagaaagcataaattactaatgaaaatgaacataaatacaaaaattgacggggaaattgagtgaaaaatttggagtttttgaaaaaattttttggttttttatttttgatttttttttgtctgccagaacataatttcgtaaatgaaagaaaacataaattactaatgaaaatgaacataaatacaaaaattgacggggaaattgagtttaaaatttggagtttttgaaaaaatttttttgttttttatttttgatttttttttgtctgccagaacataatttcgtaaatgaaagaaaacataaattactaatgaaaatgaacataaatacaaaaattgacggggaaattgagtttaaaatttggagtttttgaaaaaatttttttgttttttatttttgatttttttttgtctgccagaacataatttcgtaaatgaaagaaaacataaattactaatgaaaatgaacataaatacaaaaattgacggggaaattgagtttaaaatttggagtttttgaaaaattttttttgttttttatttttgattttttttttgtctgccagaacataatttcgtaaatgaaagaaaacataaattactaatgaaaatgaacataaatacaaaaattgacggggaaattgagtttaaaatttggagtttttgaaaaaatttttttgttttttatttttgatttttttttgtctgccagaacataatttcgtaaatgaaagaaaacataaattactaatgaaaatgaacataaatacaaaaattgacggggaaattgagtttaaaatttggagtttttgaaaaaatttttttgttttttatatttgattttttttttgtctgccagaacttaatttcgtaaatgaaagaaaacataaattagtaatgaaaatgaac

SEQ ID NO: 4366 - DNA, 1069 bp, Heterodera glycines
taatgatcaatctcatttcatctgtctgtctgtctctctctgatcgtttattttcttgctttgcctttgccacggtttgttgtgccacggcttgatgaagcgccaccggtgtttttgctcgtccctccgccgccattcttttttgtcgtagtgagcttgccgaatagttcattttttgcacctgaattgaaaagtgaagccttttttgtatgtcataattcagctggggctgtggcgagcccgcgatttgcgaccgggtgggaaaaagtgacagaaattaccggcattattaaccgtaattgcttttattgctaaatttgaaggatagaataaattactagttttcgggcaataataattgttaagctttattcgttatctaaattttaaatggggggtacggtatctgtcgctaccgtatgcccggccccccgtccctctcctgtcactgacttgtgtgttttgcaagagcagcttggtgtcttccgtatggcccattggacgacgaagacgaagacccactcgaaagacagccgcctcggaaaacgcattgcaccaaaacaaaaattatcagaaaagcagtgaaaacattcgcagcaaaattcattattattttttttttttgggggttcttcgatttgaaatttaattgaaaagataataatataattctcttagattcgtatgctttatatacgggattttactaaaatgttttgtttacatttttaaaagtgacgaaaagtctagacgatcatatgcaaaaatatacaaacacacaaataaattaataaattaaaatgcatcatattttgaaagatcatttggattagttatcgctttgagaagcttcttcttcctctccatctcaatgacttgctctttgactaaggtaagatccaaaatatgtctggtcggaaatgtccaaattcatttccgggccccactttcaattttataaaaaaatagaacataaacaaagtctacgcgaagctacccattcaaaattctttcactgctatattcctctttcttgtatttttcgttttttgggaaaaggacgaagaga

SEQ ID NO: 4367 - DNA, 1786 bp, Heterodera glycines
agaattttatggagcacatttttctaaaagtatttcgaggggataaagcgctacgtttgggccaatttgcagaaatgtcaatagaaagatttaaatattaaattcttcgaaaaaataaaaaagcatcagcagggcgaaaaacaaattaactgtgacgactgtccagataatgtgtggtagattaaggtgataaaatcaagtgacgatcacaggaactatacaggcaaaatatgtgaaaataaataactaaataattgaggtcaaagtcaaaattaaaaccacgcgaggggggggaccgtgtgtccaaacccatttgcgcctcggacatttgcgcctatgtctaaaatctgattctaacatacattcattcaagccctgatagcttaaacacctttacaattaaaaaacaaaatcttctaattcattagaaaaaataattcggcaattttgtaagcaaacaaactaaaagaggaggagaagaattagcacatacacaaacatatcgccaagacgaaatatggtcaaaaaaattttaaactttgatattttaaaaaattctccaaaaaaatttttccaataatttttttcttgaaaatttttctttttgaatttctgcggcgatattttggctcggcgagtttcgggcggcgatatgttgggtgcaccccacaaacacatgcacatggaatacaaaacaaaaattatttatgaaataaaaaatcagaggaatcccccataaaataattagccgtcgtttcgtccgtatctgtcgttggtctcatcaatttgaacgctttctgtgttcatcatcatttgtatcttcctccttctcatattcacttatgccttccgctggcactgccatcgaagcccgaggcgccctgcatttgcttcatcctatagggaaagcggaatcaaattctattcgatgaacaccgacttttggatgagtcgccgtttgttcacatcgccggccatctcctcaaagtcgatggatttgagcacattctcacgcaattgcttcaccaacctgcaaaaagatatgatttgatttcggtgatactttttaattattaatgaatttttgaaatttttttaataggaaataataagtgttgttttttttaatttcggggcgcggaacgtagtgagcgtatccgtaaaaacgtttggtattacaagtccccactttttggattttttaaaaaagcagctaatttgagggaagagaggtacactcaggtacaattaatacctcaagaaaattaatgcagctctgttcatctttttcttgtaataaggtgttaatttttttgcgccaatcctctttgataatgaaggggggttgtgagttacggcgaagaataaggttaataaataattggccactgcgcccatttccgtccccataaggttgaaggcgaatctattggtaaaaatcaattagttacttgaaattctctcacccccctccccattttaactaacaaaggagagaaatgcttgcgcagcaaatctttgggttggtaggttagtagcatcgcagaggttcatccatttgaccaattcttcaactccgtccttcactttctctctcttcactccactaaaattcatcccctccggctcaagggcgccatattctcctcggaactttccaacccaaacatcattctcaaactctcctcctttatacgctaatttatgcaactctccgagtatctttaaatggcagcaaatgtaaattttacttgaaataaaaaatttacatcggcactccatggcc

SEQ ID NO: 4368 - DNA, 915 bp, Heterodera glycines
tttcggccttatataattgctctgtattttccgaaaatttggctctattacattacgcatccaatttacattacgcctttaaattatttattcacacactaattgcgtattggattttgtaagttttgaaaaatgtatggactcgaaattttgtgctaaacattaggatacgtaaattgttaaaagagtcaaattgcgaaaaatttaataattttggtgataaaggaatattcactgccgaattggaacactgacgaaaaaaatggaaaacagtgaaataaataaaaatagtacactgacgaaaacgttcactgacgaaaatcactgacgaaatcattcactgtcgaaaatgtttactgacgaaaaagtatagcgccaaaaattaggatgcgtaaattgttaaaagagccaaattgcgaaaatttagtaattttggtgataaagggctgtagaaacatgggatatgggtataatcagcagggatgcgacttttagtgacgaaaaatcccaaaatagttaactaaaatagtgagtaaaaatgccaaaatagttaactaaaatagtgagtaaaaatgccaaaatagtgaagaaatagtgacaaaaagtctgaaatagtgacgaatagtgacctaattttcagtccgatgactttgcgtggcatttgaatttgcggaattggcaatgctatttgaccgaacttgacaatttccatttccttggtgccattctttccaattttacttccaattcaaataaatttcagcgcccatttgcgcgttttgaagtgttcatcgacgtaatagttaaaacggtggctgatcagagcaattccaagtccaagttgagaaaggggcagcaaatcgaacaccgaaagccaacagtcggcggagatgaaactgaaaaaagggaaacaaa

SEQ ID NO: 4369 - DNA, 5910 bp, Heterodera glycines
atttttattttacattgcttttgccattttttcctccgcttcttttcggcggtctgacatttgttgaggcaaatttaataagacagatttcgttggattttaaattagcttagcaaaatgaataaatcagttgatgatttgaaattttgtaatgctgtaatttgtcggtcagggtcgttttcgcgtggcgatttttgaaattccgaaaaaatttagaattaaatcctctaaaaaactaaatatctgaccaatttggaaaagaattttcagggatagcggaaaacatgaaaaagaggggtggtttcgaaattttgcaggctaatagaggattcttagggctatcgaatgatactaagaatgtttaatttggatgcttcgccctaaagttgcaaaaaaaaaagttatggtcgtgtcttttttttatggtcgtaagaactgcaatagataaatgcttaaaatttcttacaactaatcttggtttcaaagaaattgttgaattttaccctaataaataataaaaacacaagtaaatttatcattgcaacaaaaagaacattttatgatcacgtcataaccttaaaattcatttttcaactcttcaattcaataagaccgatcacttgcatcaattcattcattcacttctgctgctgatcacttgggccgggagttgcgtcgagaagcctaaaaattgaacacaataaaattgaattttttgaaaaatcattcgcttacccatctccgatttcgtcctcaccataaattgcactgtcaattatgttccgctgatcacaaatgtgccagccaatcgcttccttttcccattttgtccatttgcttttgtctcgcgcaattggacaacggacaaacatcagaagacagtcgtcgtcacttgacgacaatgaaattggcgtggtaagaagcattggcaaatgcctaaatatggaaaaatttgttaagaaatacaaaatgaatgcaccgctttgaacgcttcaattttcgacgccaatttggatcatctttacacaaccagcatttgaacagcttcggcacattgtccggacgtggagtgaaaagccattttgccaccgcttgtccatccgatgccatggcattgtcatcggccggaaattcgatcaagaaattgtcggcatagaaaaagagaaagtgaattgatggaaatcgttgagaattgacgggacgaatttacgcaaacggcggaaaaatttggcgtacaattccaaggcacaaatgtttttcccgataattggcaaaatgttgcgcaaaacggactccaaatcgggatcagtgctcttaaaaatgatcaaattaattggacagaatgaggcgaaaagttggcgaagaaaagtgatgacattgcggtatagatttcaatgtccatttgcgagtcttgaagtgttcgtcgatgtaaaagtcaaatcggtggctgatcagcgcaattccgaggccaagttgagaaggtgggagcaaatcgaacaccgaaagccaacaatcggcggagatgaaactgaaaaagggggaaaacaaaattcaaattgaaaattggcatttttaattattttacattgctttttccatttttttcctccgcttcttttcggcggtctgacattcaaactcggaaaaatagataaaataggcgcataattttaaaaaattcataaaaaattaagataaaaaagctatgaaacgtttctctaaagaatcagcaaaaaaagctttacccaatacccattaaaaaattatgtgaagtgaaaaaaaatgctaggtggaatgttactttggtaaagaaaaatcaaaataattcaccaaaaacaaccaaattttcagtgataatatcattcgacaatcctagtttatggtatcattaaattgaatatattttattttaaattttttttttgcccaccttgaacaggccttggtttttcgcgtaagtcctctttgataatgaaggggggttgtgagttacggcgaagaataaggttaatcaataattggccactgcgcccatttccgtccccataagggtgcaggcggatctattggtataaatgagttagttacttgaaattctctcacccccctccccattttaactaaagaaagttagaaatgcttgtgcagcaaatccttgggttggcatgttagtggcatcgcagaggttcatccatttgaccaattcttccactccgtccttcactttatcccttttcactccactaaaattcatcccctccggctcaagtgcgccatattctccacggaacttgccaacccaaacatcgttctcaaattcacttcctttatacgctaatttatgcaactctcggagtatctttaaatggcagcaaatgtaaattttttcttgaaataaaaaatttacatcggcatcccaaggcccacggaattccaacttgtcaaaaacttcaaatttggccctgtcggtgatgtagggcgaatgatctctctgctgtgatgcataaatccgccgcatagtttcagcagcggcctctctttctttagcctctttccattttgggttggtttcggccattataaaattgctctgtattttcagaaaatttggctctattacattacgcctccaatttactttacgcctttagattatttattcacgcactaattgcgtatttgattttgtaagttttgaaaaatgtatggactcgaaattttgtgctaacattaggatacgtaaattgtaaaagagccaaactgtgaaaatttagtaattttggtgataaagggggaagggaaattctgcgctgttgcggctcatcaagggttctgctggtagtgagatgaataaacacaaatttgttttttttatttatttatagaagtacaacagtcacggtcgaaagtattggagcaaaaaaaaaaacaaacaaaacaaattcttttaagcgattttctcaaaaattaatggcgacaaaaaaatcttatttacgttaaaagatacgtcaacaaatgcactaataaaatacccaaattagtgataaaaaaaaaacctctaaataatttcaatttttcttcctttttagcctttcttttttactttccactgactgtgccttttgtccagctttcgtcttcaattttcttcatccaaaatagcggtggaaccaccaaaaccagtgacaacatcttcgaggacaacggcatcaaagtcctcgactcgttgtgggccgccgtcgcgcacgctccaaaatgtgtggcgttcgctgccggctttggattggcaaaaaatgccgttatttcgctatggatttaggcgcttgaatttccattatgtgtagctttttgacatgcatttttgcacaattttgggcataatttccaattttcttggtataccattgacggattcaccacgaaatccatcacatgccatatttttttgaaaaaacaaagttttttctgaacagcttgccatgggcaacatcgaaggccttgttgaaaaggtcacggaaatggggctggaggataccattaagtcaaaagaaggtcaaattcgtgctcagcgcatcaaataacccctaaaaagtgttttttgaatttttattcctttttttgtgggaccaataatcttcatgattgccaatattttattttttcataaaaaattgacacaaaatcgcaaaaacttttcatttttaaagtctgttaatgctaattttttgtcggcaaaatgctgattttgaaaattttaggttgggagccctggtttaaaagaattttttggtggccccaagcgtaaaagtgccgaatttaccaacatttaaaattaattacctgtgcaaaaaactgaacatttggtactcattttctttttagaagcaattcaattttctttttttaaatacctcaaaatttcgtctgcaataatccgaaggcttttttcgtcgatggcaaacggttcggacaaattcagcaaattgccgcagttggccagcccgtcgctgtaccaaatttgcctcagcgttgacgtggacacgtgtaaattcaagggcaacgagatcatccatcttgaggttagttggcactaaaattttggggcaatccttcggaattagtgtcccccggcggtaaaaaaaaattgagacccgaattttgaaaaaagcctggacctgggttccatgttggcctggacctggatttcctggacacgaattcgggttcagaaaaacccaagtttaccgataatggccttgacctgctcgtatttacataaacattgattccatctatgattttgcatcaagcaaatgattttttcaaaaaaaaaaaaaaaattaattttgtaaaatttattggcgttaaaacgtacgttctgaatagtgtagaaatgattagcacattttcttaccttaaaaaattaaagaaaatttttatctctttttttgggcaccaattccgaaggatttacctaccccaccaattttggggcaaatttcactttcctcccccctcaccaacctaatttttccctctctccattttcagattacaaagccaacaaatttcctgacactccacgcgggtgcattggaggtggaaaaggcgtcgctgaagttggaggatgggacgggtgagtgaggtggcggagcaggtctttcaccccagaccctcgaaaaaaaattttttttgaatttttcgggggggggggggacacgaggtttgatgtaaaactttgatttctctcacgtaaattttgaaaaaaaaacattttcaacttttgcctcaattcggggtcagatttaaaaagtgtatggaaattcccaagcgcccccgaaaattttttttttcatattttgcaattttttttttgcacagttttgtcggatttgaagcgcgagttggacaccaaatggacgctgctcacccttcagtggccgaaagaggtcaaaccgcaaaaggccgagttggaatttgcgtacagtggccaattggcgacgaacatgcaaggcttctacaagtgggcgacggggaaaaacaatttaaagaaacagaggggaaaataaataaatattccatttttattctgtttttgaatgtttcctttttaggctggaaaagtttttcatgatttttggaaaattttttgaaaaaaatcgttgaaaaatttttctaaattttttttattggattttactggacattggtttgaatttggatcattttttcctcaaactttatgtaaaaatgctgcgcaattttttaatgtaattttctgatgcaaaacaatcattttaattgttttgtaattttttttccttcccatttcacaggtcgacgtacaaagacagtgcgggcaacgaaaagattttggcgtccactcaatttgaggttgttgtccaagcgttaaaaatgccaataataaaaaaaaattgtaaactaaatttgcgtaatggaaaatattgtttaaaaaattggcacaatttggcagcatcaatttttcatccggaaaaagatggccccactttttcatatggttttacattttttgagctaatttgaatggaaattttttgcattttcgcgtcatggagaggaatttttaagaaatttaagcaaaatcaaaaaaaaaaaaattttttttttggttttttccaattggcctaacaatggacaccattttcagagcacttacgcccggtcggccttcccctgctgggacgagcccacgtacaaggctcaattcgacatcaaattggaggtggacaagcacatgaccgccctgtccaacatgaacgtggtggcggaggaggaggggacggacggtggcggcgccaaaaaattgctcacttttgcgcgcactccgcgcatgtccacctatttgctggcatttgcggtcggccactt

SEQ ID NO: 4370 - DNA, 4382 bp, Heterodera glycines
aaggtatgtgatttatttattgtgaacgctttaccagattgcaattgttacattgtaggtcaacgacacaatcccctcactcttcaaaggtcgcatgaagtcctatatcaaatgcaaaaatgtcgacttcggatcatctcgagaggaatgtttttatgatctccagttaaatgtcaagggaaagtcaaatggtttgtgttactgtctttgttatcgtcaataaattttaattattagtccttgaatcgttccgggattacattcaacttgaaattctcgatggagagaataaatatgacgcaggcggtatgttatttattttttactggataatctggcaatatgattacagattttggtctccagccagccgaaaagggactcaaattcctttctttcccacctgttcttcaccttcaactcatgcgttttcagtatgacccaatgatggattccaatgtgaaaataaatgatcggtaatgctattatcttttgttattttattttttgcttatggttttcaggtttgaattttctgaaattatggacttgaacgaatttgccgaatctgagggggatgatgaagctcagaagaacgactacacatatttgctttatgctgtgcttgtccattctggtgatttccacggcggacattacgtggcattcataaacacgaatttgaagggctctccgagggtttgtgttttatttttattatctcgaattttaatatttccctttagtggtgtaaattcgatgatgatgtcgtttcgcgtgtcacttcacgcgatgcggtgactgcaaattttggtggggagaatccagaaggagttggtcggagttttacgaatgcgtacatgttggtctacataaagaaaagtgcgactggtaactctttgaattgttttttcttaactgatcgttgtgattaaggcgaagtgctcggttctgtgtctgaagaggacattcccgaccatcttaaagttcgctttgaaagtgagaaaaaaagagaaatggaacgacgaatagagcgagaggaagcgaataattattgtgaaataactgtgagttttttaaaaatttattgactgtttttcttttttcttctcagcttattttggacgaagacatgaacgcacaccacgaattcgaattgtttgatgggcgaatgaccgagatccaggcacgaaaattgaaggtgcagaaatcgatgacttatatggagctttacaaatttgttgcaacaaatatggtaagtatagcactttcatattttaaatgagtttcaatttattccagggactgaaggaaagagaattccgtctttgggactttcaagaatcggacaacaaccaacgggaaatgatgcacagatttcgtgtggagaatacgcgacctcgttttttcatcgacccatttgagacatgcgacgaatatgatggtggcactgtccgctacgaccgaatggtttacttggaactgtgcagaggacatgttggagatgagctgggtttcccaaactacgacaaaaaccgtaatttttttttggcaaaaacagctcacattgatgatttagatgacgttttggccttcgttaaattcttcaccgctgagcgcaaagttcccgaattcaaaggaactttgatccttaccatgtcaagcgactttcctactattgcagctgccataaacaaagtgcttgggcagccccctgacactaaattaaatctttatgtggtaatgaaacatttcgatgctttaatttggtttattttctccaaaaggaaataaaaccggacaaaatcatacagctgcagtcggctacggtgaagaattcccagcaatacatgcagcaagatggagtgataataatagcagaattggaccaagtcagcgaggaagctagtgtcatgcaattcttcaaaacgctatacaacagaattgaggtaatctttaaaaaattactataaaacaaatgaagctatacataggtcgaggcgcatcttcaagaatttgggtctggcaaccatactgaacagcatgcaatttctccgttgagaggacagattggattggtaagataaatgcatgccgaagtttcaaaaagaacgtgtttttaggattggaagctgacgcgggtctgctcatggctgggttcagagctgaactatgatcccgcaaagatcatgctttataagagtgagtttgatttgtttctcgcgttttaagtttgcatttgttttatcagatgtgttacatggtgacaagcccggcatgtggataccggttagagtttttacattcaattaaaacctattcccaaaattaagcaccaacaattgttggaactgcaggttagccagatgctcaacctgaacacaggcagttacgacccacgttttcaacgcatcttcaaatttttctatgccaaattgccacttccaatggtcgactttgataatcatgcacatgtattgctgcacttgatgaatgaaaaattccagctaacggtggctttttttgcatcgttttttatatatagttgtttttaggaaatgagtatttttgtggataaaaacgcaagcgtgcaaacactcctggatgaggcgagaaaagagttcaggttctcgtcgatggggaccaaaactcttaggtaattttgtaaacaaaacaaagacatacaaaaatatttttcagacttgtgcaagcctcggccgacgggacttttagagtctatcaggtcctcaagaacgacattctttacaaggatatccaactccgaccatctttaatggtagtgcttatttagctatttttaaaaaatccggcgaattaagctgcgtgtggaagaaatcccgaaggatcagcttgaagttggcaccggcgaatatttgctgccagtggcccatttcgacagagagccgaatcggacattcggagtgccattcttcatcaaaatttgcaacggggagaaagtgagcagcataagggagagaatccgcgagatgttggacgtgcccaagaaagaatttgagaaggttttaagggtcggactactttaccaactttcccttccctttcagtacaaattttgcattgtgaggcagggccgagtgatgcgcgaattcgacaaccaggacgacgcagcagcagtcaatttgtcggaattatcccttgcccatataacttgtgtgtaggctgattatattcgagtacaaacgcactattgttttgtcatttcagatccgcagtcggcaccatttctggggattcaacacaattgccccaataaattggtggacttgccgaaaaaatcggtgatggcttttttgtgctgatgactttcgagaagatttccggaaaaatggccaataaacgtccgaaaaaccttcgactgaagccattggttctagtgcagaatacgcgtcccatggacttttacgcgtcccatggacttttacgcgtcccatggacttttacgcgtcccatggacttttacgcgtcccatggttttttacgcgtcccataattttttacgcgtcccatctaatttttacgcgtcccaaggtttttcacgcgtcccattgaatttttacgcgtcccataatttaaaaaaaaatttgattaaatttttatatgttatcacattaatgcaaatattttaggtacgatcacatcacacattatttgttagacagggtagttatggcgcatttcttccaaaatatgctgaaatatttttttgttttcgtgataacgacgaaatgcgtactgaaacaaataagtaggtaaaagttcgggtgtagtcccatgtaaatgtttaaggctttgctttaaagccctccaggtagcctcaattccctgtgtatgtatttgagggttggcgggatctacgaagtaaatttgatgatttatccattcgtggttgtattgctgctgcatgttattaatccctccgtatgccgcccacccatcagatactatcgtgcttcccacctcaatattttcagcgataatgggcagaagagtgtctgcagaccgatcgggcacagggaaaaaccggaccttattagaccctctttgaatcatgccaaagacccattcgtatggacgatttagcattcgaccaccgatggtattttgccctatacaccttcagactcgtttatcagtcaacggattttgatgaattattttgttttcaactccgttgataatgtactttgtttttataatttttttatttaacatttcaaactgaaacaaagaaaaaatgaataaaaatcgatgggacgcgtaaaagtccatgggacgcgtaaaaaattatgggacgcgtaaaaattcaatgggacgcataagagatgatgggacgcgtaaaa

SEQ ID NO: 4371 - DNA, 2170 bp, Heterodera glycines
ccttgcccatataacttgtgtgtaggctgattatattcgagtacaaacgcactattgttttgtcatttcagatccgcagtcggcaccatttctggggattcaacacccgaacagagttcgtgcgtcgaggggtgttttagactcgaagaaagcgattgtcatacacaactgaaggattcgatcttttgcttcttccccaccctctaaacccaatcgcttaagattgattattttattgagtatcataaaaagggcattgaatttactgatggtctatggttgtttgttcgtctgctagtgaagatggtttctgttcgtatataaatatgctgcatgttaaatgctttttaaagtttggggtttaacgcttaaatcgaatcagaatcttattaatatattcttttgtgaaaaggcggggacaaactactattacctaattttcctcaatttttgtacctgttcaaaaaccagcttaaactcttttcccaagacttgtgatttttcctcacttgggactattttattatgtttattggtcagtagctcattagagattggttggatctagggaacgacaaatcgactttaccaccgattgttaattattcgatgttcagaactccaaaagatttttttgaatttaatttcctaaacaacaaaacaccattcaattattttctggtctaaaaatattttatagatctacttacgctagcatgaaaaatatctattttgctaggtaaagaggatgacatggacggtaaaaaagaaaaaaaagcgacaataaatctttttatggataattatgggaaaaaattggcgttctgtcacatttactttttatctttatttctctcacttttacgtactatctcttcattcttaataatgtaaagaacaacattcacttcgctacgtttaactttttttctatacgttaaatctataccaaattttgcatatcgatagagaaagaaattaggaacaaaatgtaagggtctttaagagcaaaaaaagggttaactaaaaagttatggagtgattaaaatttttgcatttctttttctctccttttagagtactattttcatgtctctaacacatgaaaaaacacaaattcgcaaatgctaacaattttcattataagggtacaaaatcacttaggaaatttaaaaccaatagaaaaacgattagttttcgcattttggttcaaatcagcagtttaggacttgagttataacgtgatgaacatttgaaactcgcacaacttttttctgagatgtcaaattgcttagcattcacttagaaaaagattctccttttcaaaatctttttttagataccaaatttgttcatttttgttgggaatgaagcgtgttatggctgatcaaaataaaaaatacaaaaaaggcatttaccagtgtaagtgcatatactttgtttttgcgtgtgttggcgttttgttttacgccaattattttttggcaatttttttcgttttttaccgtccatgaagagtacatacattgggagaatgataaagaaaaccattttaatatgcaaactccatcgcaacaaacttcctttaattattagtagggctgtgaattttaggttttaactaaattttttgctcgattgatttgaagaaaggagctcaaaaaacgcatttctgcattaaaaattttcgattctgatgtcatcatcggtcactagaaatcactattttggcgacttcgtcactaaaatagttaaaaatcactattttggcgttttgtcactattttttcactatttcgacattttttggaaaattccttaacaaaaatgcaataaaaccaaaaaatacacccctaagaatcgaccttaaaaaattttcaaaaaatacacccctaagaatcgagctaaaatttttcaaaatatactcctatgaaatgaaaaaaaattttctcaaaaatttactttcttggcaaaaatttttaattttaaaaaattttttaggtaactattttgggttttttggtcttaaaaatcccagtcctactcatttgcaactgcaatcagtgaataaaaattatttttgctcaatttttggctgaaaattatgtcactattcgtcactatttcggactttttgtcactatttcttcactatttcgggatttttcgt

SEQ ID NO: 4372 - DNA, 2442 bp, Heterodera glycines
gagtttccaaagttggaggatgtgcatccattttactcggatctgatgaacattctctatgatcgcgaccattacaaaattgcgatgggacaaatgaacacggcacgccatttggtcgatggaatagcgcgggaatatgtccgactgatgaaatacgccgattctttgtatcgttgcaaaatgcttaaacgggccgcgttgggtcgcatggtaaaattgctgcgtcgacagaaatcaagttttgagtatcttgaacaagtccgtcaacatttgagccgactgccaagcattgacccgaacacgaggtcaggtgttaactaatgtcgcaaaagtcgtcacaaaaattgtaaaagaaggtttacatggctgacccccttcgcaaagattagttgagtatctcccctcccccatttttcacaaagattaccatcgaatgcaataaaaaaaacttctatttgtctccagttaaacaaaattatattaacttggttcgaatttaccgcggttttgcgaagatggaataaacccaaatatttctaccttttgttcagaactctcatactatgtgggtttccgaatgtcggcaagtcttcgttcatcaataaggtcactcgtgccgatgtcgaagttcagccatatgcttttacgacgaagtctctctatgttggccatttggactatcgttaccttcgttggcaagtgagcttttgttcacttttgaatgaatttactgttgcctttcaggtaattgacacccccggcattttggaccatcccttggagcaacggaataccatcgaaatgcaggccatcacggcattggcccatctgaaggcatccattttgtacatgatggacatcagcgagcagtgtggacggacactcgaagaacaaatccatctcttcgagagcattcagcctttgttcagcaacaaacccgtctttgtcggactcaacaaaatcgacttaatcactcgcaaagatttgatagccgagaaagaagcgattttacgagagaaattggaaactgcgggggttcccgtggtcgaattaagcacattgactcagcaaggcatcaccgaactgagagataaggtaaacggacgaacaatgaaaatggaggaagagagtctgaatattttcaaaccgaagcagaccctttcttatccagacaaagtttttggggaaggctaccgccacccgacggtctttttactccgttcctccaaaaattttcttttggttcgatttttaaaagtccgtgccccccttcccttcctcctgaacacgggctgaatcggattctatttttaggcctgtgatgctttattggctcagcgtgtcgaaaagaaattgcaagtgaaaggcattgcccagggagggtcggtgatcagtcgtctttttgtcgcttacccaactccacgtgacgacaaagttcgagctccgcacattcccgaaactgtactgaagagacatgccgaaatggaagtggaagacggggaaaagccgaaacgaaaattggaaagggaattggagttggagcaagggagggagtacaagttggacttgaacaagcactacctgctgaagaatgagggagagaagtacgacaccatcccggagatttgggaaggacacaacatcggtttttaatctcatttttaacaaaaaccctttcaatgtttaagccgacttcattgacccgaaaattgtcgaggtaaattccaaaacattcattttcaattttaaatttagaaattgctgaaactgagagacgaggagaagaaacgtgaagaagctgggttttatgacagtgacatggacgaagacgacgaagagaccaggaaattattgcgggaagcggagaaaataacacaaaaagagcaaatgcgaagaatggaattccgcgaaaagaaaagcacaaatcagccgaaaatgtcgaggaaaatcggacggaaacgggagcgaagcatggcgaggctggaggaggagttgggcgacttgggggtggacatcgccagcaagaaaatgcgccatttgagcgaggagcagaacagggaacagcggggcaagaaaattcgcgtgggtcggtcaccgtcagtcaaagcaccgcccaaaacgccgcgagacgtacagggcattcccgacaaaaaggtacgaacgaaaagacggatgttttcagggagaagagggggggggggtcataccgggatgtgagtttcgggttctgaaattttgtataactattttcgtatttttatttttaatttttagaaaattttgcgcgcaattatattaataagccgggccaaattcttaattttctccggtagcgcctgtcgacaccgccgggatttcattccttaaaaaaatttcgtttgtctcaaaacaaagagaaattaaagtttcgcacaaaagacaatatatcataatcaaaattaa

SEQ ID NO: 4373 - DNA, 1505 bp, Heterodera glycines
  unsure (1)..(1505): unsure at all n locations
aggggagaacttagagtcgacaaacgacgaaaattcanccggcgagggggaaaaggaagtgacgaaaaagcgaaagaacaaattgggcaaagagaagcgagcaaagcgaaggaaaggactcgccgaaagcgaaggggcgaaaggcgacggaacggaggccgagggaagcgatcggtcgccgctgctcacttcggtggatgcctctcgattccgttttctgaacgagcggttgtgcagccaaacatcggcttcttccgcaaagctctttgaggaggaccccgactcgttcaggctgtaccatcgcgggtaccggcaccaagtgaggaccagcggaactgggatgggatgggtatacgttaaattataatcgacaatcagaaagtgccatctctgactttcttgccctaatcacaatcattgccagattacccgccccaagtcaggtactatgtccaagagtgacaaagtgttgttaagccatccatggcgttgctaattaatgaattattccctccacaattgtgtctttcccattttgcaatgattctctctcaattttaaggtgtccaaatggccggtgaatcctctcgagaaaatcgtgctggacctcggctcccttccgcccggaagtgtcgtcgccgacttgggctgtggcgacgcggaaattgctaagcgattgggcgaacggctccgagttcattcctttgacctggtggcttcaaatgagcgggttttggcagcggacatggccgatttgccgttggaggcggagtctgtggacgtttgcgtttactgtctgtcgttgatgggcaccaatttggcccaattcttccgagaagctcatcgagtgctcaaaactcagtgagaaatcacaatggagggaatgtttcaatacgcagactcagataaggcgtagaatttcgcacgggggagggtccgagacgatttcacaaattttcggagaaaccctaaaactagcacccccccccccccctatcctgtccatatataccgccggccccaaatccttgattttttaaattgtgaatgctcaaaaaggaacgcaaaagtttcttgttggagcaaaaaatttaagacgacatataaaaaagtcccgacgaattccccctcctccgctttatttgtttcgtcgccataaacgcacaaaaggggtgcgccgggcccctccccctgggggtgggggagaggaggtggtcgtagagtgatagcaaatggcaaggcaattataacgacttctactttaagcgggaagatcaaaattgccgagataacgagccgtcttcggagtgtctcactgtttgtgttggcgttggaaaaaatgggattccaattgaaacggaaggtacgttctatttgtagctttttatgcgcttatttcgtgcttttgtttcagaaattaatcggtgatggcttttttgtgctgatgactttcgagaagatttccgaaaaaatgaccaacaaacgccaggaaaaccttcgactga

SEQ ID NO: 4374 - DNA, 1105 bp, Heterodera glycines
  unsure (1)..(1105): unsure at all n locations
ttttcattcaatgaaatatttattctaattgccatatgtataatgcaaaagaaatttncggagaaacccacaaaaaaaaatcattaagtcttaatattaatttttaaatatttttaatctaattgaaattaaattaaataaaagattttatttattattgaaatataaattttataaattcctttaaaatacatcttgatgttagactattatttttttctcatatgaatgtatttcttttaaatttattagttttttttaatatttctaatttttttaggaaattatattcattttttaaattcataaaaatttaattttattaattaagtttattttttttgctaattaatgcacttcgtaatttgttagatttactcaatttttaaaatgattgtttttgtcttaaaataggttttagtttaagacatcggctattttatttataatagctgtgatcagcacgttaagagttctttttttaactcgaattatttgtatttttaatttatttttttaaattttttagctcgtagtctttctcgggagcttgattttaggcaaacctcgccataatgctccctcctctatttttctcatatgaatgtatttcttttaaatttattagttttttttaatatttctaattttttaggaaattatattcattttttaaattcataaaaatttaattttattaattaagtttctttttttttgctaattatgcacttcgtaattactcaatttttaaaatgattgtttttgtcttaaaataggttttagtttaagacatcggctattttatttataatagctgtgatcagcacgttaagagttctttttttaactcgaattatttgtatttttaatttatttctttttattttttatttttagctcgtagtctttttctataaatgtttatattttaaaattttttattttaatggatacttattgtttatatttattatttaaacttctctactaaagcttgtaatttagtaatgaaatcacttccgaaaaaacataaatgaattcatttcnactcatgctattgaattaaattattatttttttaaattttgataaaaattcaaaa

SEQ ID NO: 4375 - DNA, 9753 bp, Heterodera glycines
  unsure (1)..(9753): unsure at all n locations
taatacnttttgaatgattatttatatttattttcaagtgtttgtttgaaatttatcttcgattaggtaagcattttttaaattaatttaacattagaatattggtatttttcctctaatacacttaagcattaaaatttaatattcaattattgattattcttcataaaatagaatattttattttctccacttttttattttacgctcgaaatatttatttgtatttgccttttttgtccatttttttcatttgatcaacacgataattgtgctactcatcatctcgtgagctattcattcgggggtttattcccttaacaatccataaattaattcatattgtaattatttcgattaaatatttataaaagaattacatgaatgtattaaataggtttatttatctatttttaaaatatttctacattattttcgaaataagtgcttttatttgccttcctcggtttaaatttagaagatattttttgtaatttattcgttctttatattcattatttttaatattaaatcatacgtaataaactttgatacattttttttataaatctcttgagcttgttggattgaaactctactgcaaaaaattcagtcttatggattgcttggctcttgagttggcgaaaaaattggaaataaaaccagcacggtatgccgtgcgaaagacaatgatgaaagcactgttcataagcccgggacgctatgaatttaatgcaaacttgttcatggaccaagttccacgccgcgtaacaatgaaatggaattttcattaatccaaaaaatcatacttatatattaacaatgaaaatgattgtaaaaaaggtaaaaattaaaattcatcataaccttttgttaatggttaattattttttataaattataattacatgttcattcttcttttattatttttaaataggaataagaaagaaaaatataatttgcttaattgccttttaataaaaaaggtttaaaaaatctccataacaaatttattagtttgctaattcaaattaagcaaaaagtttaaaaagaataaaactaactttataaaataaactcgaagatattgataataattacagcattatatcataattaaaaactaattaaattttaacaaataaatgtgaaaaaaatgaaaaatcaaaaaacaattgtcgaaaatgaactatttatagttattttcgatttacaaattttttctatgttttctctcccccgggggatgttaagcaaaggactctctcctttgcttagtctctcttctgttggctgttcagtcattggtcttcagcgaccgccgcgaccgaacggcgctaatgtattcaattttcccttttccctccttttttcagcagaagcaacagtcagccgatgaaatcgccgtctttgccccctccctctctgttccgccaatctgcatttctccactgcacatccatcgcttcatctctgctcccccactgcttggccttccgccgtcccatctgccgtctcatccgcccccactctctctccatcgcacatcattcacaccacctccgcctggccccacggcttggaccatgccattgaagaacgatggacggaagacatttcacatcgtttaaactgttgcgaccattcgatccgccccctcccccaccgatggacgattttcttttccccgttttcattctattaatttttgcttcgctcatctcaactgacaataaaatttgctccgtcaaattgtcaaacaaggggaaaaagtcggctttttctaatcctgaataaacatcagattcggggttccctttctaaattaaatcccgggagggaatcgtcttttagaaaagggcctaaaaactgtaagcagggaattcccaacactgggaccaagaacggtaccgtaagacacttggtacggtaaaagtaatttggatcacttgtgatttccattcaccgatcgctgtttagcgcattgtcccctcacatcaagcattggtgcttgaaatcccggttaatcatttgatcggtcctttgcccgatcagtcttgctccatcgttaggctttttgtccactgtgttattcatttccaaaataattgttttctccccccttttgttgctctccattcttcactccgttgatcgccgcttggacctttctctgctgaccaattgatcaccacttggaccgttctccgttgaccaactgatcaccactcggacctctcttcgcctctgtccgagcatcaccaggtccggtgttcaccaatcgctgtcgccaactgatcgctgcacacaccagtcgaggaccaattgacgccgttggatcaggtcaagcacagctaactgtccaattagccggttatttaaccgctatccctcgcgtgtcaattagtcgattgtttaatcggctaacaatctgttctcaaattactatctcccaacggcctattcattcacagttccgcaggcaaccgccgcttaagtctcattccaagcggtttgcgttagtggcgacctggaccccacagggacgaccgcagctatcagttactaaccctaaagaccaaaacctattgtacggtccgacacgtccaatcatagaattttaattctttctttttgtttgctcatatttattttttataacaaccttttcggtcaagttttgaacctatttttttttgtgaaccagttttgacttcacacatttattctgattaattttgatcagtcttgatcaaatatttgtctattcatattaaattttgattgcgcatttaatatttatttttgttgagttgctgtcagttttgaacttactaattttattttttttttggggagagcgttgcttagtcagttttgactaaacaatttcaatttttgaagttcaattagtgcatttacaatttgttattcaacattttattgtttaattcatattattaaccaagggctgccgaattaccaagttgatacattttttttttacgaatcaaatcgtgactatttagtcaaattaaataaatctgaattaaacttaaaaagggatcataatgtcggacatttatgtcgaacgcatagaaacagctaaatatgcaattgagttatatctggacaagccattgcccattcttccgcaaggggtgttaacctctcaacagagacataatttaatttgtgatcaaagggaatggaaagaagttgcggacgaaattcagacgcaagtggacgaaataaaggcagcaagggcattgtacaatcaagaggcttctacgcttcacggcgatgaaaaaactgagtttcaacgccagtatcgtgcatcagtcaacgcaaacgatctgcaaaatttgttgcgaagagcaaatcataaattggccgatacccgcacgctgaaagggaacattgatcgtcttcttcaagatgggcccggaggaacggcacgccgaaacattgccttgccaaaattaagcctaaaggagttcgatggcagtgattgggatgacttttggccattattcgaatcgacaatacatgctgatgctgatttggattacgtacaaaaaatgagttatttggattccctgttgaggggtgaagccaaaaaggtcattcaaggacttttgcccttctccagggataattatgatctctcggtgtccttattaaaggacaagtacgggaagaatgaaaatttgatcagagatttacacaatcagttggcccggctttcaaattcgaagtctcttggcgacgacatgaaacttcaattggaattggaacgagtttgccgacaactcgagcattacaaccaggacttgagttctcctcaaatttatatgagtctggaacagaaattgtccaaaaaggtgttgaccagatatgtagacttaaaaaacgtcaagctgagtgcaatgcctcatggttcggattggtcaaccgacctatttagggatacatttaaagcggctattgagcagcttaaacaaatcaatgacatagttcaaagggctaatcccgaacaaactcaacatacatacaagagagagaaacataagagtgaagtaaaagaatcgaccttaaatctggccgtcatatacaaagatcaagagaaaacagacgatcgccaaccatcggttgctgttaagccaaagccatggcgtggaacttcaacttcatcggaaggatcaagctcacgctcatcctccaaatccagccgatacggaagagccccaggaagaaaagccggttcaccatggcccaatgaaagtcgaagaagagaataaaattcaaattcatcaagcccaagcccgagtcgaagcagaagtccgtcgcgatttccatgccagttttgtgctgaaaaacacttcgctttagattgtgacaaatttagttcaattgtgaacaggcgaaaacaaatagaagcaaaagcaatgtgctacatttgcctattcaataatcacatggcaagaaattgtccaagaaaacttagaaaatgttttctttgtcaacgtaccggacatcacccagcattatgtgaaaaacggaaactaatggccagaggacaagtcgcaaccaccacgtctaagaagcaagaaaacacatcaaccaatgtgtttgccatacaaagctgcatgaaaaatccaattcagcccttaagaccgattgatttaattttacccaacattggcaaagaaaaattggaaataaacactagatctgttgagaacttagacagtgatcatatttttgagaactccaacactgccaatctagtacaaacctaccaaaaggcaatgaatatggctgaaaaattttggcaaaattggaaagattcctactcattgggtctaagggaacgtcatcaagggaacaaacacacgccaggaaaagcaccaaaacttggggacgaagtgatcatttctgaaccacaaactccaagaaattgttggaaattggggaaaatagaagaaattttatcacaacgaaccgcaagagtcagaatttcggaaaaatcaattattgaacgtgctattaagcacttatatcccttagagttagccgaaaaggccaataattctgactctggcattaaacaacaggaacacagttttgtgaaacaaattcattataattgggcaaagggacctcctcaaaataaggcgcttgttaaggcaaattccccaaatcactacagatgggcaaaacaaccaccgaaaataataaatggtataactaatgtgacatgtatttcagaaatgaacaaagacttcgatgccgtgtctcttgattgtgaagaaatggaaagagatctcgaggacgaaaacaaggaggaagaatcgaaggatgagagaaagggcatttcacaaattcctgttgaggaaaggcgcccctgggatggcgttggagaaaaaagggttattattaacgctcccatcgcattcgtcggggatgacgaagtggaaccaattggacggacgttccaagacaacgggctccgtgccctagttctcgtgcactcactcagggacgttgtctggtggcatcggttaccagaggtcgtcaccattaatgatgtttgtcagatggtcgtcgtgcggacgacggaatgggccgagcacatcagaccatttttgagccttttgggaagatgggccaaaccggcggtctggattggtagtacaatacatgttgaaggcgtagcctggctggaaccggcacagacagtagaacttgacatcaacagacttgtgtttatgggtgctccgcgaatcactcaaaggggaggaagtgcgctgtataagaagcgatgccaacaaccattttctgatgatcgtagttcgggcgcaacaaagtcaaaaaggttccgtcctgttgaggaccaaccatcgcacagcgaatggactcaggaaattcgaccaattcgtcctgttgaggacccaccgtcgcacagcagatgggcgtaggcaattcgaccaatccgtcctgttgaggacttgcagcaacatcagtccagctcaaatccacgtctccaccgccaacagcagtttccggtcaaggccgtttacgatttttggaaattggaaagtatcccgccaattccgccgttcatcaatgacagagcaccattttgccgccgtgtccgggttgaagaaagaggcgaattgctaggattttttaatcagcaattttacttttcgaatttcaacgaagcgtatgaattcgtcatccacggaagaacctaccgatgtgtggagcagtattactgtgcccaaaaagcgttgtatctgaaacgtttcgacgcggcggatgcgattatgctggggacaaacagatatggcaaaagaataagcgcatttgagatgaagaaattcgcaaacatgaacggggaggacgaagtgactgtccaagaatggactgagctcaaaattggcatcatagaagaagcacttaaagccaagttttcggtgcctgatcttaaagatgtgctgttgagcactggatcggccataatttgcgaattatcactcgaccagttttggggggtgggttgtagaccgggactcatttatgacaaatggccaacagcggacatacaacagtggaacggttcgaacacactaggacgattgttgatgcaactcagagatgatttgaaggaggcaacaccaaaaggtacaacacgggctgttcagccaaattatggatggccaaaaaatagggaagaaaattttcaaaatattcctgttgaggaagacgtattcgacttaaaaagtttcaaaaatctcgaaataacaagcacagacgaagctaaaaggggggataaaccaaaagattcgacaaatgccaactcaatcagtgaactattgatgagccacgcagacgaagtggccgagacggaggaaaagacaaatgagaaatttgcattgtcagaaaggatgaaccagtggctcaaatatgcgggcataaattgtcaagtcctagtttttggttcctaattatgtcaattggctcaacacggttcggacttggaccttttcatctacaagttcgaccaaacatcagttcgtcttgctgacgaattgggaaagattcgacaaattttaaggcaaaaatatccgcgaacagagatggaattgagagcgagaggaaacaccccggtattaaaaattaagttggaattccacgttgatttgacaattggacgatcagagaaattgaatggtgtctacaattctgtgtggctggccacgttggtccgaattaatgacctgttcagttccgtctgcttattgattaaagaatggggaacggatatcaaccaaccggaatttggttcattcaatagcctgtccttggttattatggttcaaagttacttcgctgaacaaaagttgttgccaagcctgtttaggctttatcctgatatttacaaagaagacaagatcgtcaaattctacgacgcagaattccatcaaaaattagcagaagatgcgaaggcaaagtgtccgcagtcaacttcatcgttaattgaggtgttaaccaactttttcctttggttggatgatattgacttcgccagagtgaaattgtcagcaaaaagcggtaaaattgataggacagaaggcaatggattgcagtccgttataatcgaagagccttttgatgcaaaatcaaactgcagcagaagcttaacagataaggagttccaaaatttcaagggtctgttaagacgcacaaatacgcatctcagagcaaaagactggtatacagtaaaacgcctgtttaggctaaacccggtaaatgatgtagcgtggtcaatgaccgacgaatcagaagacgattcgttcgataaaattgctgttgagcaaataaatgaatcaatgaaaagatttgcgggaattaagccagacaacgtacgaacaacacataatgtgcgcagaagccaaactgaggaccgagatttcgagagaaacttcggattcccaaaaggtcagtcaagaggcttgagaacatttacaaatagcaaattcacatttgggctattgagcctttttatgttgttgggcgtaaatttatgtcaaaaaccaatgatttgtcacagaaacgtgccatcaagatttgtcaaaattggtctaaacaatagtgcctgttcagggatatctcaaatatttgaaagaggtacaaaaaatttagaacttacattgtatcgtcctgaccaaaaggaatacaccttttgggggcatcaatgtttactccttaaacattcggtccaattttggacgaatttactgaatgatccattcgacatcaaaagtcaagaaatgatgccgatttctgccgaagaatgccaagaaatctccaaaaccaaaaaatgcagattcggaattctagtaggtgactcagacggtaccatgataacagaaaataaactcatttatgagcattcttggtggtcttggggtaaaaagtctgttgagacggttaattgcatagtcaacaatataacaatcattggatatcccggatcccaaagaattgattcgattgtcggagacctccaacattgtcaatatgacgacggcagatgcagtttacacgattctattgtagtttgggatgttgatcggtatcacacatctgcaccatgggcggctcgacacggacattgcgtttttaaaagtttttcaaagaaaaatggaaccatttatcgaataggttggatcagtgacccaccggacttagccctaacatttggggaaaatccgacatttattacttcttgtttaagaagattggtagttagccaacaaggattcgcaatcgaagaaagagaatttgtaaacttcaaccgacaattggacagaactcgccgaaatgttaattttgatgaaccgttggacggcgaagttcgcacatcacaattagatgctcaactcacagcacgttcgatgttcgcagataaagaaatgagaaaagtattgcaggcatattttaaacttatttgtgactccatttttggctcagcatcgagcactgatctgacacatctcaatccgaatttttgattcgtcagctttcggacaaccagcaaatcgaagcagaatggatttcaaaaaacattttggaaatttggccatgttcctcagtatatgagtacggattcgcacaatccaaggataaatgttacaagaaaatctcagtaaaggtgacattagttaggaaagacaagccaattctggcttacttgggcccaaaagccctcataataagtgcagaagctagaaaagttgatcgtcagacagatcgctacaaacatatcgttcttgaaggtcgactttatgagattgatcaagttttaggtattaagactcctgttaaggaaataagtgagatagaaatcagtaccaaaatttggaaatcaggctgtactcgctcacacttctgcttgcacaattcttgtcgctcttcttgcatcagtcaatgtagatacttgactagagaatcgacaatacagaaaatcgactgaggtgagactacaatggcgactgaggagcgaagttgtttcacgaatttgtcgttggattcagcttccgtgcggggagggtcgagtgagtcaagtgaaaatgatcactcgaaatttccagttttggaaacaaatgttttaaaattaataggacacaaaattttggcttgggaaaatttagtcaacgcggtcattctgctagttttagc

SEQ ID NO: 4376 - DNA, 744 bp, Heterodera glycines
ttttcttgacatgagtcgagactcttgaacagcaccgctctctacaaaaatcaagcattagcaattttgtagttttccaaacagcttatcttttggcattagttcattaaatttatgcgtctaagcaatcctcagtttcctagatcataactttttttcttgtcgatgtcctcatttttggtatcaattgaaggcttaaagtctacagaaattttttagaatgtagacatttaaaattaagaaagttatggcctaggaaattggattcgtgataaaattttaaaaaaacggtccatccaaaaactcaccaaaattgcaattttctcgctgaatttgcgcggcgttgcctgcgacattctgctgatgtactgctcgcgcgtgtgttgcgtaatgtgcaaatattgaacaacagaaaaaagggggaaatgtgccgcttttgcctatgcctttcaaaaaaaaaagtcaccgctgaaccgacaaaaggtggcgaatgaaaatcaaagcgaaataaattaaaagtgcagacaaaaagcgtgcacacaattcaattaggtatatgtggacggaggggcaaaaggacgaggaagttgggaaaattaactttgaaaaaaaaattctcggaaggggggggggaattctgtgggaacacggtcgaatgagtgtggaaggaggcggggagagcagcagcatcagcacacaattggcatgtgttgtgtgtgacaaacccgcgcgtgaaaatttgtg

SEQ ID NO: 4377 - DNA, 2344 bp, Heterodera glycines
tttgctcatctcggcactccagagaaggttgttgagaagttggtgaaacatgtgacactgctaaatgcacttcatgatcgaggcgtcgacaacaaccaagagaatacaagcgattacccaaatttttgatcaaatttcattttttcaaacattttcaccatttcacattttccatatctgaatatttaagtgaacacattttttcggtttcaaatagcatttttaaataaagattttagtcatttgaataaagtttattaatgttaattggtctccaaaaaaggcagtgatcagcgtttcttttgaattaacgcgcaaaaatttacgccaaatacgctaatccaactttcttgatatcattcgagagcccttcggatgctctattagcctgcaaaatttcaaaaaattttattaagtttaaaaaaagtttgagccaaaaaagtttgaaaatctggttttttgagtttttctggccataacttttttgaagcttaacaaaatttttcgcaatttttcagattaatagaggacacttagggctatcgaacgatactaaaaatgttggatcttgttggcaaagaaaaaagttatagccaaaaacttgcgctcgtactaaaacggcccgtactaaaccgaccccgaccccaaattctcatctctcccccctttcagtaaaaccgttgacttttcgtttctccgtctgtcacccgctctctctctctctctctcgtctttctttccatgtctcagccctctctctttctctcatttgtccgttgtctttatccaccctccattttttccattttccgccacaaatttttctgtgtttaaaaattttgtggttctaattgagcagcagcagttcacacaacaatcacaggagaagcgataacggagggctgcctctctttgctcatctctcctccagccgttgtccccgtttttctgcctgtttctctctctctcaaaaactttggttttatggctccatttcctcctcgacttattgtgtgtatgtatacatacacatacccacacatcgtataaccaccccccccccatttttcacaccggaaaacataaaaaaaaactttcatttttatgccccgtttctctaaccgacaatcaccgtgtctgtctgtctgtccgtctcccatcagcggcacagcgaccaaatgcgaatggtagcagctttggccgcgccatattttagatacaaatccatttttaaaaatggacattttgttgaaaataattggggtaaaaaaatgagaaaggggcatttctcggcatttgacagcgttagaaaccaattttttttttttgtggtgtacaacagaggggaataacgaagaatcgaacaatggggcaaaatggatgggtttatctcttgagataatatcggtggatatccgtattacatggatatatgttaaaaaaaggcttgatgtcttttagatttaaaaatttaagtaaaataattttacatataaatgcttaataggtatgtgtatttatgaaaaaacaaaaaaggaaaataaaaaaggtaaatttttgcctgccggacgtgtgcaatggcatggcatggctatgtgtgttaaaatgtgaaatctgctgatgatgttattgatcgagaatgaatgaatgttaatcatcagacgagacaaacaataaaatccattgccatccctaattattactagggatgcaacttttagtgatttaactattttttttgctcgattgttttgaagaaaggagctcaaaaaacgcatttctgcgttgaaatttttcgatttggatctcactatcgatcactagaaatcactattttcacgcttcgtcactaaaatagtgaaaattcactattttggcgttttgtctcttaataaaaatgcaataaaatcaaaaaatacacccctaagaatcgagctaaaatttttcaaaatatactcctatgaaatgaaaaaaaattttctcaaaaaattactttcttggcaaaaatttttttaggtaactattttgggttttttgctcttaaaaatcccagccctactcatttgcaactgcaatcagtaagttgcatccctaattattacatattagttttcttttaatacaaattgattaattgccaaatttttcttcctgtttcttaaatatgcattctgtttttcgtttcaatgtcaatttttgtatatattttttatgtatataaatttgttataaatttatgcatacaacggccttaaatcagggctctgatctgtcctgatttatcagaaatgtcctgatttgaagggtccaaatctgataaaattaaaatgtcctatttgccaga

SEQ ID NO: 4378 - DNA, 3832 bp, Heterodera glycines
  unsure (1)..(3832): unsure at all n locations
tttcgaaataaacttgttttatgggttttctgggtcatagaattcgattctgatatctatttcagcccgtttcgaacccctgaccctgactcgaacaaaaattcgaaaattcaattcgaaaaaattcaaaatatgtatgcagccaaatgcattaaataaaaaggagtctcgattcagaaggcaaaacatagtaattcgtgcatttgaaatggttttgttgcatattttgaattttttcgaaaattgaattttcgaatttttgttcgagtccgggtcaggggttcgaaacgggctgaaatagatatcagaatcgaattctatgacccagaaaacccataaaacaagtttatttcgaaaaaaaaattttgaaaattttctttttcaaaaaagaggggggggggtacaaagtacactatttattattaccgacccgggtcttaaattgttcaactcccttaaaagggagtcttataattggagaaatatgtaaataaattaaaaatgattcacgctcgtgtatcacggcgattttctgcgcgtccgcgtcgcttttaaaccgcgttgcgccacacttttttggtccgcatcacccgcaaaactttaaagttaaaaaagtgaaattgaaatatgccaacatggtcttagtaatacacagttttagcaacaaaaaaaagtgcataacaattatctttgtaaatgagctatcgaataataccaagaatgtttaatttggatgcttcaagaacacttctgggtgcattaatgttgccaaaattttttttggtcttgtaaactgcaatagagccaattttttgctgctttccagttatcggcgagataaacaaataccattccacaattattcaatttgttttcagcaaaaagggaaattgtttttttgctttgtttaccaattgttctgatgacaacgcttgatgcgaagatgagcagttcgagctccgttttgcaagacttgctcagagatcacagttccgaaattggcaattggagtgaaattgtcaacaaccatcaggttattttttcatttaattgttttttgaatataccttttggatatgccaagtaacgacattcctcaacttaccacaaacacaaatttggatcaaatattgtaaataagcaattatactggaaaattggaaattgcttggaccaaattatgctttatgtttatcgaagctgaaaattaggttttcgagtccgccaatttcatacaatatacacagattttgctaaaaattctggatgactgaattttcggttaaacttcgaactttgctccatccctttctaatcaacgaattcattgacaaatgtcatcaatttttctactgtttttcgatgtaattttgttggccatccaaaattttccgctttttaggatgagagttcgaaacctgagccatttaccaacattgaccacaacggaccattctacatttttgtgcccaatttaacgcttgactatgccgtggacagtgtgaacatggaagtctacaaaatgtttggtggacataaaaatgtatgcaatttagatagtgaaaacggtacttttaccgtttagtgaagatgttttatcgcatccatttttatccgcaaaatttctcaaaattgatttttcgcggattcgattccttttatattatttgaaattgcaaaaaatggcccattttcagcgcgtttcagatactctaaattgaaccgattcagcaaaaagattatccatttcaaaaacaaaaaatagaacaattttactattttaaacgccatttttgccgatttctccatttattgcatcattacaattattactagtagtcaagcaagaaaaacaaaatgatatcattagtctgtctctccaaatttgtcccccaatttttcagcttttcgctgtctacgcctatcggttggcgaagaaagtgtcgcaatcattcatgctgatggcacgggacttcgaaagctgtgttcaagtgttgaagatggaggagaaggtaaattcaatggaaaaaagcgaatggtcgaacgaatggaaggcactcacacaaatagagcccgaacagtacaatcgatacttatactttttacgcactttttcgaaaaccagaattcgctttacagcttttcccacggccctagtctctgggtcttgaatgaattttggaaaatgatgcaaaagacctagagttctgttaaaaaccaagaattttgtctggaattctgtccgggtctcaggaccgtcacaggatttcggctttgggaaatacggggtgatgacgaccttttttcccatttttatgcggcgcgctttttcaataattttttggggaatagtgggtttttgcatggacacacccattaagattgtcaatagcagcagcaaagaggttgtccgtcttgagtacgtgttgccgtccgtcgccccgccaaaaacgtttcattacaccactgaacagttggacaaccagttgcagtgctacaaaaatattcacccagcggaaggtgggattttttagtttatacgttttgcggaatttccatcgggttactgtattagaaccagcttgtgtattgtattctgtatggaaaaattggtgtgtaatgtatagcccaagtccggtgctacttaaaaagtgttgtccactccaaactaaaaactaaaggggggggggggctctcttggtttgcagaatgtttgtgataataaatcgtgaaagctttttcccatggattttcggggttgttgatcacaaatatgacatcaattttgactaattcctagcccgaacttgaacaaaagtcatgaaaattcaagtttctcgattatccgcttaatttacgtcggggattcagaatttgttgaatatggtaatacaactaattttatttccagaaaagccaaagaagagcccattcggcgatgcaaagccgatcaacaccaccaagaagttgttgagtgtggaggagaagctgcgcgaggagtccatcgccgccgctgctgctgccgccgctgccgttgcagcggccgctgcctctgccgccgctgcgtccgcctccggcacttcgtctgccacaactatgtcatttgttgcaaccgcaacgcctgccgctgctgcttccggcacttcggttccggtcgctgcttccgactccggtacttcgtccacaacaaatgcttcgttggttcccgccgcaacgcctgccgctgctgctcctgctgcttccggcacttcggttgcggcacaaccggcccgcggcggtggcgcaatttctgcttcccgaagttccactgcaagcgcgcctgctgttgccgccgcagcacgttctgcaatgtcgtccgtctctcgaagttcatcgtccgcaactgcgtctgttgctgccgccgcaacctccgcaacttccttctccagcggcacgccgtctgttggtgctgccactgttgctgctcctgctgttgccccggtgtatacagcgcacagcaacaaccacaacaataacatcaacagcagcaccaacaccattggccatggccatggagcggtggcgtcggcggctgcggcgaagaagccaaagggcaacaacaagaagaagaagaagtctttctcaaaaaatgtaattataaaaataatttgatggggcaagaaaatgacgattanactctcggctttcagaatttaagtgccacgggtgagaaaaaatagcaattctagcagatttgtcgacaaaccatttccctttttatcaaatttttttaattggggaagatttttttatccctccctccctgtcggcatgccaattttttgtcctgaat

SEQ ID NO: 4379 - DNA, 2323 bp, Heterodera glycines
tcttcatttgatctgtctgctgttgttttgtcctcttccgccgtttgttgcacgtggaaaaatttctccaaagactgcggcactttttcctgcaacaaaaaaaacattttacagttcattaatattatatttaattaatttacaaattgctcaccaatgatggcatatgtgaacaattcccgactaaacttcaaccaatgctctgtcctggttgcctgaaattggcatattcaaccaaaattttggtaaaaattaaggaaagtttgttttttagaatataatgataattgtttcacgcagattcattcatcaactccctattcgaaatttcgtgtcttacaattaggttttggtgttgacacaaaaaaaaaattgtttgtaggcgcgcggattcgaacccatgaggacccacagagccctcgagcatagatagacaccaccataccacccagcgagggcggttcgaatccgcgtgcctgtaaatgcctttttcctgctcaaaatgatccgaatacgaatttgagattatttttttggtgtttttttgtacattataattagctaatattaataattgttttccaccttgcgttgtccattcttcctgactccgcccccctcaatcactcggatccatcccctgtcgtcattcgccactttgaagtcctcaaaagtcaaacattcgtcgcccttttgcttcgtccgattctttgttggttgccgttgtggtgaaaattgaatacgctttctgtgaaagtgccaaaattgtggtgaaaatggcacaaaaaaaagaaatcagaaaaaaacaaaacaaaaaataatgccgcaaaagcgtaaaaaatgaattttcttcaaaatgccaaaagcataacgcacccgggaacgatgaccaaacgcagcagcaaatcagcagcaatcctttccaatcgcaaatcccttcaggaaaaagggaagtgattaagaaattacaaaaaaaaacaaaaagaaaaaaaaagaattgcgcagtcaacgataaacaaacagaaaatcaacaggtacaagaaattccagaggtagcaattttcgacatagaaacttgagtctgggaatttaaaaacgtcgaaatgtcggggttacgattttttttgaaaaataagccgggatcccggcggaattctgatcccgtctgggctctaatgaaaaccttagctctcacacattactaactgttacgccaagagttgatgctcggaaaagtaagaaaaaaaaatttttttttccattttatatccaaaaacatggcatttaattccatattctcccaaacttacgggtgagagacggtgactgaaaaagtgccgttggaagtgccgttggcttcttcttcctcggcgtgtgtgtttccgtggtcattttcatcatcatccgacggctcttcaatgatcggaatgggcgatgtttctgtcgtcgtcgtttgagtcccacctattacaaaaaaatgtgccaaaattgatttttaaatatggaaatgccacaacatttttactcaccgttggtattttgaattgccaaacgcttctccatgcgaatgcggggacagccaacaaaaaagaggagaaaaatgccacggacgccccacaaaaattggtgccaatcagtcaacggccacacgaaggagaactgttccaccggttggctgaacaatgtaagacttaaaatggcatttttattgtttttcgtgccggggtatgtaaatttgttggtaaagtcaaaaagtcgagtccgcgcgtgccgaactcggcaccgactgattcagcatcattacggatgtgccccccccagataggtccaggaaaactgggaaaaattctcaattatcttaataggtctgacccaaaattttcaaatttttccctgaaggcgtcaaacggtatcgccgggtctcgtttttcaaaaaaaaaaaaaattgacccataaatagccaagatttgtcgaatagctaaaattgcttcgttttttttttactacggcacttaaatgttagacaatttactatgaataaaaactttttgggtcaggaatttttttttttttttgtatcaggccttccttacaattttgtttttcgaaaggcatcgaaaaatgcttaattaaaattgattttcaaaaagttaacgtggcgctaattgactccccgaccaatccgatccgatcccaactttcaatgctaacaattcacctcgaatctcgaaacccaccattcccaatgtgacgccgccctttcgtacgaaattttggccatttgaagacggtggtcaattgtgagcacgaggcaaacgtgaca

SEQ ID NO: 4380 - DNA, 4304 bp, Heterodera glycines
tacagcctttccaattgcagatagaggcttggaattttttttgttttttagaaaacacttcaacttagccccctcacagcagacattttttgatttgggttttagaaaaaaagttacgggcccccaaatgcacgaaaaaatgagaaatccgtccctgggactcagtcgtccgcgctgaatttttttctatagttttcccagatgcgcctcaaaaagttgtaagacccttccaccactttcagggcgctcccggccttcggccgggagaaaatggttttagcaacgaaactccttgtcaatataacatatatagtaactagcgggtgcgtgaaccgtcggctatttagctggggaaaagcgcttcgcgctttgggagcttcgctacctagactgtgaagcgattcaaattgatcgaattggttggagagattttttgaatttttaaaaaattattagaggtttttagtccacattgaggctcaagacgggcgcttcgcgcccgttttttaaatttgttgaactcatacgggcgcttcgcgcccgttttttagcttgttaggcgcttcgcgcccgtttttcaatttttgttggccttggacgggcgcttcgcgcccgttttttaaatctgttgaacttatacgggcgcttagcgcccgttttttagcttgttaggcgcttcgcgcccgtttttcaatttttgttggccttggacgggcgcttcgcgcccgtttttcaaattttgttggccttggacgggcgcttcgcgcccgtttttaaactttgttgggctttgacggccgcttcgcggccgttattaaattttagaacagatacaaaagtgattagaagaggtacaacattggtcagaagaggtacaacagtgattaaaagaggtacaaaagtgattaaaagaggtacaacagtgattaaaagatgtacaaaagtgattaaaagacgtacaaaagtgaattaaaagaggtacaatagtgatcagaagaggttcaacagtgattaaaagatgtacaaaagtgattaaaagacgtacaaaagtgaattaaaagaggtacaatagtgatcagaagaggttcaacagtgattaaaattgtatgaattataaatttattaaattaaaaataaatcctccatttattaattgaaaataacgttgaaaattaataattgaatatttaataaatttaagatgaaatttacaaattcaaaaaataaataattaaattctttaatgtaaaaaatttttttttaaataatctacaacaaatcttaagattagttaaaaacattgaaaatgacgtaaaaaggcatataaaataatttacaccggccggattcgaacctgccgccccccccccccccccagaagatgactcagaatccccaatcacacagggattctgaggtcttgacgatgtcaaaagtaaaatctgatcacgtattcgtgatcagcggcccaaataacccttatttggtagagcaaaaaattgcggatttttgttgtatattatttttacaaaatgacttttcagaaggtagttaggaatttttttctgaaaattcggatttttccagaatttctggaataactttttttctttagaatatagaaatcccaaataaatcccataaaattctcccgattttttgcctatttttaaagctttaattcacttaaattgaccggtcctccattgagttatgaattttcaaattttaacccaaatttccaaggaccaaaaaattgccaaaaaataaagaatttttaaaaaattattatgggtttttagtccacatcgaggctcaagacgagcgcttcgcgcccgttttttagcttattaggccgtttcgcggcctcagtcgggcgcttcgcgcccgtttctaaattttgttgaacttggacgggcgcttcgcgcccgtatttaaatgttgttgagctcatacgaggtacaaaaattgttggaagatgtgttggaagaggtacaacagtgattagaagaggtgcaacagtgattagaagaggtgcaacagtgattagaagaggtgcaacagtgattagaagaggtacgacagtgattagaagaggtacaacagtgatagaagaggtgcaacagtgataaaagaggtacaaatctgattagaagaggtacaaaagtcattagaagaggtacaaaagtgattagaagaggtacaacggtgattaaaaaggtacaaatgtgattagaagaagtacaaaagtgattaaaagaggtacaacggtgattaaaagaggtacaaaagtgattagaagaggtacaacggtgattaaaaaggtacaaatgtgattagaagaagtaaaaagtgattaaaagaggtacaacggtgattaaaaaggtacaaatgtgattagaagaggtacaacattggtcagaagaggtacaacagtgattaaaagaggtacaaaagtgattaaaagaggtacaacagtgattaaaagatgtacaaaagtgattaaaagacgtacaaaagtgaattaaaagaggtacaatagtgatcagaagaggttcaacagtgattaaaagatgtacaaaagtgattaaaagacgtacaaaagtgattaaaagaggtacaacggtgattaaaagaggtacaaaagtgattagaagaggtacaataaatgttagaagaggtgcaacagtgattagaagaggtacaacagtgatagaagaggtgcaacagtgataaaagaggtacaaaactgattagaagaggtacaaaaattgaatgcaatttattataaactttaaaaaataaaattaattattccttttattaattacaaagagaattttgaaatgtacaagaattggatatttaaattaatatgaaattaatttttagggccgggacttttagtgacgaaaaatcccgaaatagttaactaaaatagtgacgaaaaagtgccaaaatagtgacaaaatagtgaaaaaagtccaaaatagtgacgaatagtgacataattttcagccaaaaattgagcaaaaataatttttattcactatttgcagttgcaaatgagtaggactgggatttttaagaccaaaaaacccaaaataggtacctaaaaaaatttttaaaattaaaaatttttgccaagaaagtaaatttttgagaaaatttttttcatttcataggagcatattttgaaaaataacaaatctttaaatataaattaaacgcactgaaaaataacccaaaaatgcatagaaaaataatgttcaccgtccggattcgaactttgcacccccccccccaaaaatgatgtctcagaatcaccaatcacacagggattctgaggtcttgactatgtcaaaagtaaaaactgattacgtattcgtgatcagcgtcataaaatacccctaaagacatgtttttggaatattttcggtgaaaaaatttttccacccaaaaatcctggtcacccccctatggtcccgaaaccaaaaatcacttttatttttataacaattcgcaaaaaagagataaaaatgtaaaataaaatttatattatagagaaaaaaattgcgaatttttgtagtattttacttttacagaatgacttttcagaagggagttctgaatttttttctgaaaaatctaaaatttccagaatttctggaataactttttttctttagaagatagaaatcccaaataaatcccataaaattctcccgattttttgctatttttaaagctttaattcacttaaattgagcagtccttcattgagttatgaattttcaaattttaacccaaatttccaaggaccaaaaaaattaaaaatattttcgaatttttaaaaaattccaaaaaatctgaaacttaaaataaacatcatatttgtgctcaggaccctaatttaccccagaaaaatatttttcaccctctttttcaacccaaaaaaaatttttgaaaatttctagggggcctagctcgaaaatttttgaaaatttcctttcatatagtacaccattcgatagcatttaaaatgctctacaaaaatgtctaaggcaatttttggctaaaaccgatccctgacgagttataggcccgggactcaaatgtcccgctcaggccaaaattttttctatttccggaaaaaaccgaaatttttccgaaaaaataccagtcgatagagcttgaaaactatgttttggaaagtggtctccgttttctgggaaaattcgtaaaaatcataaaattaaaaacccgaaaaccgttttttaagccttactccaaaaattttgaaa

SEQ ID NO: 4381 - DNA, 1590 bp, Heterodera glycines
  unsure (1)..(1590): unsure at all n locations
cgcagctgcggcggcggtcgttttgcgcagaaatgcctcgccagtccatgcccaacgctttgctgtccgccgcactctttgtgccttccgctatttcctgttttcgcctgtctgcgtccagcagcgggaaacgacggagtgtcacctaaaatgggacacattttgagtcagaaaaattcgaaaacgaaaatacttggtaaaaaatcgtataatctagagactagattttgaaaccactaattgggtcattaggggcagaataatgacctttaatgtgaccactgagccgacagtgaccgtctctttgtcgtcctccccctgcacttcgatgcgcgtgtcaaactccagccttggcatcatgccgagcacgtaaataatctgacgaatgggatggaaatgcaatttgtttaattttgtaaaatgttgaattttctttgtacaccttaattctgggggctccaaatttagtcggttttaacggtgaagccagccagaggactgattgtacggggggatatcactcaatctcccgaaacccgtaaaatccaaatgaaaatagagtttctgcgttcgattttcacaccctaagccaatcgagaatttagtattttaattgaaatttcaaacatttttcattgcataacccacatcttcgtattggtccgatgtgattgtgttcagcaaagccctgcgccggaattcgttgagctgtgccaagtcttggcaagtgataacccggttctgaaagtgccatttttaaaatatcatcacgaagacattatcactaattaattaaccaaattctttgaaaattccattaatttttcccggcgacggaccccagccatattctattttttgaataaccgtgccaaagatgcggtttgaaaggcaaaacaccgtcgatttacttgcctgtaccatgttcgcaaattacgccccccccctcccctctttttaatgtaaaaattggatttcgaatttgacattcaattagttaggcattctgtcccccggcccagccctcgccaaagcgtactttgcgcaggtaggcaatgttctgctcgcgcacgtgcggcaactgcagcagcgcgctgttccgtggccacaacgcctgcaccgtcatagggaagacgcgcaacacgttctcgagcgtgtcaatgctcggctgccgtgggcttatcggcatttggatcatttggatgagtacgcgcagcatttcctcgaccaactgcagcgaacggccgacaatgtatgcctggtctaaagaccgataatgaggaaaggattaattatcatgatgaagaataagacgatcattcaaaaattttgaatttcagtcgatttgtatttttcaaatttttacaaaaattttaggagtcagaaaaaattattctttgtcagctggatttgtggaataattatgcttttagttggtttggaaatacattgaaacaaagcttttccgaacgtatttttaatttttttanattttccaaacctttttttattttcctaagtttggcacccacccaagggcaaaatttctttgaaatganngtaaaaaatcgaaaaccctccaaaaatgcc

SEQ ID NO: 4382 - DNA, 1577 bp, Heterodera glycines
aggtttatctaactgttttactgtcgaagttgccgaattcagtcactggccgaaaacaccacgacgcgaccacgacaaatataaaaacaagcaaacgcaacgtaaaacaatttgaaaactcaacaaacaaaacgccagaaaaaatatttaaattaaatataaggcccgaaatttaagaacaaaaaacggtaaagcaattagctaattaagcatccaaaaactctttaaacatgaaataatcattaaaatattaaaaattttaaattttaaattgactcttaaacccaaattcagtgagttttttttcttccccccccccctcccactctcatgggctcccacggacaatccgtcagcaaaagttattatttttaaagcatcagatttatttaattatgtggaaatgataaattgctaaaaaatgaatattttatataatgggctttttaaataaaacattaatttgaaaataataatattatttaaaaccgattaatttcgtttttaaaataccaaatttaaattcaaagcatttactgctgcttctggataattttaatataattaagactgaaattgtttcaatcaaaggattccgacaatatttaatctgtcacaaaatgggaaaattcaaaataatttagcctaattaatacctttacccacaaataaatattaattcacgctcgctcttttgaatttatccatctgtcatctgcgttttgcttgaagctaatcagaaatcctctatttaaagaagacaaaattaaacttaaattcattttggaaaaattaaatatatttttaatgaagcatttaccgtatttttctcccgtccattaccgtatccttacataatgccaattttgtcttttataacgcttcacttatttcttttttaagtaaaaaatttcaaaatcaattaatcaaataataaatttaacacgaatttaaaaataattatttttgttttttctactgaaaaaatccaatttaaaattcttttgaaattgttaaaaaataaattatttgaactgttaaaaaataaatatttttatgtttttttctcattaccaaaaagccccatttaaacaattttttaaaatattattttatttaaatattaattaagctttcctaaataccaacaaatttgcgtaattcgtagagaaatggagaaacaacagcagcagcagcagcagcagcaaaaaagtgaccaaaaggagaaaattgatgagaagccgaaaaatgatcagccaaaaagtgatcagaaggtgaaaaaagtcgctgttgtgcggccgcgcgtcgttcggaagggaaacggtgagcattttgataattacaaattacagtaactttttcgatattttatatcaaatttattttcaaattggattggccgtaatggcgggattccgactgtgattgagtggcaccaaaattcggcattttctattcaattaagcttttcctttttttgtgtgaattttaccgcaaatgaacagagaacagatttaaaatttgaaaattcaaatgcctttttgttttttgttttgagtgacacttattagtgactt

SEQ ID NO: 4383 - DNA, 1843 bp, Heterodera glycines
cccccccccccccttatagtccaaattgatccctcaaatgcccttttcccaatggtacccctatgatccccttcccctcctccttcccctccggtcattgaaaggctctctctttctgttaaaagatggcaagggcaagcagtacaggcacagagagaggtacacgtgcacccgcaatgcacccaaatcattcaaatatataatccccagctgtaattgatgacgaaaaaaaacaacaaattaattggggtgggcggggaatgaatggtgttccttccccttcccccagaaagctatttaaatgccaatttttcacagcagaaccataaagaacggcaaaaaataaatttttaggtattttagcaataagaaatttatttaaatcaatgcatttttaaaaaacaattaaatcattattctatttttaattattttcagttttcctaatattaacaattaataattattagcacaaatggcgctggaagcaatggacttggacttgtcaactgacggcaacgacagcgagccatcactggccggtgattttgattttaaaaaattaacaaaaaaaagtttgaaatgggacagaagaaaggcacacatcagccaaccattggccatcctgacaatgagtggcgaaataaatagatttgctcataaattatcataaataaatatttttttaagatttaaaacggccagaaaatatggacatttctttaaaaatcctctattagaatggccctgtttcaaagctaaaattggaattttgcttcatttagtatttttttagcaccaattaaggcattttgacagtattttgcgatttttaagcacttaattgacaaccaaataaataattattcttaatcaattctgttgcagcacgtttgtcgtcagttgagaacaaccagaacaaaattctgcgaattctcgcggaacagaaggaaatgattgggaaattgcttaaggtggaaaaatgttgattaattaaaatttattacgcaaaaatgaattaataattaattccgaaatattataattaattgtgaattttcagattgtggcgggccccagcaaatgaaaaatgccgtgccgcacctaatgatcgcttacagagctttaacacgcttaatcttaacttaattttcatcgtatttttcatttttcttaaagcgataaaatattttaaatgcagagatggcaaaattattaaaaattaaaattgaatttttaaatgtaagctaaatcattaaaatgagagtgcagcgggactgggaccgggccgggaattcccggtcatcccaggtcccggtcccggtagggcaaccgtgaaaaacaagcactggtaagaatgggggggtctgagtgaaaaataagagatgaaaattggagttaaaggaaaaaaatttaaaaaaaattaatatattctttaaaagaaacactcccaagtgtgcaaatggcctagtggatagtcggcgctagtttaaaagaggtgcattttgaaaattttctgtcactttttttaaatataatttttttttgtttatttacacataatgatgcatattaaacattaacagcacaatatggcgagtaaaaagtatattcgcgattttccatctcaaaaaatttttgcaaaacaaaagggtcccccctttggtttttgataaaattcaaaatctgtcactttttaactagcgccaaatttgctttaaattttttttcaatttattaaataacgtgaaatgcgtaccatctggtaaaaaagcaaattcttcatcaaaataagcaacaaaaaaaattatatcaaaaaaaaagtgcaaaatattttcaaaat

SEQ ID NO: 4384 - DNA, 1536 bp, Heterodera glycines
cccagtgttagacaaaattgctcataacgccaaatagcgcaattggcgtaaatttttgcgcgctaattcaaaaattacactggtaaatgcattatttgtactgcataatttgatcatcaaataactcgcttcattcccaactaaacagaattaatttggtatctaaaaaaagattttgaaaaggagaatctttttctaagcgaattctaagcaatttgacatttcagaaaaaagttgtgggagtttcaaattttcattacgttataactcaagtcctaaaatgctgattccaaccgaaatgctaaaactaatcatttttccattgattcgaaatgtccaaactgattttgtaccttaagggagtcccaattccgaaacgcagctttattagttgagctggagagatttcggatggattaatgagtgatcactgataaccaacagcacgaaaagggtactaaatgacaaaaaattcacttaaaaactagaaaaagtcggcaaaaattcacttttcatagagcagcaaattgtgcaatatattctgatttggatggtccaaaccctggcaaaaaaatttactagtttcataaatatgatcaatttgtgtttttttttaaattaaaatttccacttttcgcactttgatttttcaaattgactcttaatccgaattctgggtgagttttattgtaaacaataaattgcaaaatttcactggcaaaattcgtttttcaatgtgtagaaaattttaggaaaaatttggtcttttcaaaatcaacttcggatggtgtgggaattttggattatcctaccccaaaaaagcgacaatttgagtccggaacgatgatgaattttgtcccctcctttccctattttaaactgtccattttgacccattaattccaaagtggacaatttccgagttttacttgattctacaaattaggtaatacacaaagaatgaccatcattatcttaataatgcgtttgaacaaatagttgaaacaatgaagggttttttatttagtgaaaaaaaataagtaaaaggaccaataatgctgtttattttacaattacccggggggcacaacagtggttttggtcatgggctgaattatacaaattgctataaaggtaaaaaaacaaaaacaaataaacatggggagtatatatgacgacttgggggaggggatgagaaaaataggatggagaaatagacaattcgtcactaatacatatatttaatattaaacgcaatcacacttaaattccgttcgagtgatggctttccggtccgcttacactgcaggaatttgcaacactgaggaacaaactgaaaaaagcggatgaattagtgagccaaacaaataaatgctcactgaccgttcaatttcggtggcacaataaacaaattcgtgcttccaaaagccgtagcgctggttgcggatcagctcgatgaatgtgatcaacaggccccacgggtgaggacggagagcaaccaaacgttcaaagagaatactgtgagaaaaacaaaaa

SEQ ID NO: 4385 - DNA, 642 bp, Heterodera glycines
aaaatagctgaattacgtcctccgccccgccgattctcccccatcgtccccccgaaattcctaaacaaacatttttcaaaaggtaattaatgatcttttttaataaaaaaaaattatttagttagaaacattttctagcaattttttcaaaattttaaatacccgggccattgtctcggtgaacgggtcgggaagacgcatgtcgcacggataagcgctgagcaccaagttgcgcaactgcacacaattggccgggatcacatcacaaagtatgtagtagtattcgcagagaatttctttaaaaattgaaagccgaatgatgaatggcggtgaaactgggtaaaacctggaaagtcgtgcaaaagcaccaacagcacacgcagagtgcccttgtagatgtaagcaatgggctttggcagttgaacattgcgcaaaaagggggccaaaaacttgagatgacaaagcagcagttgggtgtacatggcacttgtacgcgccaaatcctggctctccgagagcagacggccgatgaaattgcgatggccaatgatgtccagccaatggtaggcaaagccgggcacacggcgaggctgcagcagaaacagcacttgtctaaagagaacaataacaatgtaaatatgg

SEQ ID NO: 4386 - DNA, 5928 bp, Heterodera glycines
agttaagatgtttaattctgtatgatttataattttaaatgaaaaactttttttgtattttctttgttaagctattttcaaaaaaccattggattaattattagctttcagaggcgagacggaaagttttaaaactctttaaccgaaatataattatgaatttcacatgaaaaatgatgaaaatctctaaaaaaaatctcattaaaactgttacatgaaaaatgattaattaattttcttttttacagtattatgcattttctgttaattttattgtcactttggatagttagaatctttcaaaatgccatgagttttgagaatcataagactttggcacttaaaaattgtaattaaatgccaataaaattatcctttctccatccataaaattttttattttattgttaaaattataagtgaaaaggcatttactatttatgaatgcataatattgcaaatctcttaaaaatctgtcaaaaattccaagagtttctcagcctttgacccattgattttcaattctttgcaaaaacattttcgaaagaaaatttttggcgctatattaaagaaaaactcaaaatgttaatatttaatgtgacggaatggaaaattttaattttttggaaaaaattcaattatgctatatttttaaactaaataattttttctaaaattcaaaattgaaaaatttagacactagaatagcgagtttatgaatttttttcggacgtctgaggacatcagcttaaaattggcattgttgtaattctgggttcgtatgattcctcaaaattcttgacatctcaagacatcagttttccgatttccaaatcaaggcaaatctaaaaaatgagacattactgcaatgccgatttgcatgtcccaattttttattttgtcctgatttagaaatattcaatcgtgtatcctgagatgtccggaatttcgaggaatcattgccaattttggcatgtcccaatgttttaaacttgtcctgatttggaaatggcattcttgtgttctaagatgtcctcagttttgatgatcatgagaattttgtccttaaaaatttgtttaaatggcaaatgaaaactaagacattcattcactctctctacccataaatttttttattacaaaatatcatcgaataagcagtttttaaatgaatgtttcatattgcaattgcaatcacttaaaaatctcaaattaaaaattgccacgaaaggcctttgaccctctgattttcaattcttttggtatttggtaagacaaacctccgcttaggcctcccaaaatttttggcgcttcctttacatttttttgtcttcttgtccccgattatgctctgatatttataaaacaataatattccaggaaaatgatgaaatcacttttattttttaccatttttttccttttcctattatttgtggttgccacgccaccagcttcgaaggaaccacgaaatgttgaagagatggaacagataaacaacgaaataaaggaggaaggaatgtaagaaaataaattagaaaaaaagaattttgaaaaatatttgctagagggaggtcagtattttgaaaaaagcctgtacttgctggacataaattcaatgttggaactgaaccacaattttatgcataaaaatccaggaaacccaggtccagcaaaaatcctggcttgcccaaggcctggacatggatttttaaaattggttttaaaaagtaacaaaaggataattaatctgttaattgtttataaacaaatttaaaatcctatataattgacaatattaattatatttttttattctatgtaataatcatttcttgattcttaaaatatacattagtcacttgaataacaaattataaattttgtcctctaaaatccaactggacctggcctaggaaaatacaggcctggacccaggccctctccgaactcttatatttacataaagtttcaataaattaaagtgattccgataccgatgatgacggtccggcatcaacgccgtcatcttctgctgctgccattggtggtgatgaaggtggcccaggaacgggtctgtatcgtttcggcgccgccgtttcggcgccagcccttgtttttggactataactttttttgttgtcgatcaaatctaacaatcttggtatcattcgaaagctgaacatgtttagaagctatttctaagcaattgcttagcgattagtcgcttactaaaaaagttctaactgaaaattgcaaaaaagtcaaaatttttgtgattttttcttaataacttctttacaggtcaaattttttttttggttttttgtaggtctaatagggcttctgaagggctttagaatgataccaagattattagatttggttgtcaaagaaaaaagttatagtccaaaaacaagggctggcgccgaaacggcggcgccgaaacgacctagtccccccaggaacacccaaacgatcgccaaagcaaaattggcagattgccaagaacaaatttaagacttatgtgtacggtatgcgccgtaagcatgactatgtgcgcaatctgtacaagccgagcaaatacaatatgccaaaagtgtggggcggagaagtgaagcggtcggatcagctcgaagtaaaactttgtttttggtatataaacttgtgatttgacattagttgtttccaaacctatcagttttacagaaaatggtaatttttaaaaatttacttcaatttatttaatgaatttgaccaaaattttctaaaacatttttaaatccaatgcgaacaaaaattaacttttcgagttttcatggtgatccattttatgataacaaaaattcacaaaaacaagaaaaaataaatgttgttatttaagccaaatacaccagagaaagttggccaaaaacaatcggaaacgcagtcgaaaaaggagccgaaaaatgcgaaaccgacggaaaaatcgacacagtaagaaaactttacaaaaggaacaaatacgacacagaacggacacacctttaaacaatattttaataaaatttaaataaaaattcaaaaaaaaaaaacaaaaaattctttcgtgtttttaatacggccaaaaagtcgtcgtacaaatgaacattaaaagtgatttaatcaaaattaatttgattaattaacattttttgtattacatttgtccaaacaggttgcaaatgctgatctccaacgaaaagctgttgacggtgatgatgaaatatgtggagatgaagctgaaggacatgtccaagcagtacaaggagttccatgaaagggtaagcacagggacaccattagcatgggaattctcatcaattatcattcattacattttttggcaacgaagaagctggcgctactttaaagtggcgaatagggatcagatttatacggatgataattccaaaagttaaaaaatatatttaggaaataacaaatatttgtgaaatattggaacagccaaaatatttatgaaaatattgagtaagaattgaaacatttgcagtgctaaaaaatgaatgtttataaataagccaataattattcactggttgaagttgcaataagcacttttctatgatatgcctttttagaattgataaaatttaaaaatttaattttagacattaatagggattaatttagactaaatgttttctttcatttaaaggtgaaacaatggaaagatgacgtgcaattcataaaagcggcattcggagaggataaacaaatgtacaaaaagtacatggaaatggcggtcacttggccagagaaaaagtcgaaagggacaccggaaaaagtcccaaaatcgttgaagcagacccatctggacaatttggcacaaatggccaacaaatttgaggagttccgtcaggtggttaagcagtggcctgactcgggctgcttcatgacattcccgctggagaagaacgttttcaacaaggtgagaattgccagattttattgagttttaatttaaaaacatctatgaagagcagacaattgtaaagaaattacctttaaaattttttactgacaagtccaaaaatcaatccacaaaaggttttcctgttcgaccacgcgctgacgctgaaggaagatgatctgcagaaggaattggccacgggactttacactcacgcggaattccgcaaagaatcgccggctgatttcttcaacaacccggactggtcacagaagaaattggaggatgccgaaaaggatgacgatgaggatgaggatgatgacaaggaggaggaggaagaagaagaggacgatgatgatgaagaaggtgacgtgagaatggcgaccaacgcattgttggaggtactgcttgggagggacggacttgtggatttggacatgggaggagagtggtgttaatggagcaaaccaaaacaagtttaatggccagaaaaagtcagcagttgggatggagctgagaattaagaaaggatttggcagggcgtatcttttggctttgagtgcgtgtggtttaaggacaaaagcgatacgcaaatttcatattgaacctctttttaaaatagtgcttcattctcctaaaaaagctacgtaccatttaaattaaatccgaaagtttctcttatttcttaggcacttttgaaaggccgtgatggattcgggaaggaggcaacgctgaatctgcgcaatttgccaaaatgggacgggaagccgaatcagagcaaaagcatgtggcaaatggcgaagaaaattgtgcggaatctgatcaaatttgttaaatggcctttacgtattttttgggaatatagcaacaaattgacgagaaaggtgagagagagagtaggttctgttacaaatacaatttattcttaatattttatgaataataaataatacgtcagtattcagtgttaaactacagtaagatccttttcaaattactgtattattctgtaattcccacaggtgcgaaacgcaatgaaaagtaaggaagaaaaagaaaaaatgagaaaaaagctggaggaggtgaaaaaggatggcatgctttacaaaatttaccaaatgttggacaactcaaaaaacaaggcggaaaattttgatgaaaaagcgaagaaaaacatggaaaaggaggggatgaagccggacgagccgaccattgaccactcggcacacgaacagctgacagacaaagacaaacagcagcacccgttcactttcctgcagggtgaatgatttggggggggagggtaattatgctccaaattgggtaaatagtgaactataatgccataatgagcattaatgaggtaattgaagatcatactaattgatagaaagaggatgagagattgtggagcttaattagcacaaaacaaataacattgaatgcttacttgattgtcactattggaatgatgtattgaagggtaattaaaaaatcacaataattgggatttggtggtgcttttaggggtaaatgagtaaaatttaaattttgatcatcaaatatatgtatattagagaccggacaagagggtcggtcggtcggtttcagttaaaaaccgaaaaaaaaaccgaaaccgaaaaaaaccgaaaaactcaaaaatttgtcggtcggtcggtttcggttaaaaacccgaaaaaaaccgaaccgaaaaaaaccgaagaaaaattttcggtataccgtttcggtttcggtttttttgaatttttttatcttttcccaaaaaaacaataaaccatttttatcaatagaaaaagcgaaagatcacctctgagtaaaattgtagagctattgaagctcatcaatggtgtataagttgggaaaataattgaaaaaggcagccaaaaaacgtttgttagcttcctgattcttcttaaaaactagggttgctccccgacccctgggggggggggggg

SEQ ID NO: 4387 - DNA, 4990 bp, Heterodera glycines
  unsure (1)..(4990): unsure at all n locations
gcttcaggcatggcgctcagttcagcggtgagatgtgcagagacaatggcgcccatgacgaacatcgtttgcccttccacggatcgacaccattccgccattctgtcgacgaagcagggaagcgagcgatcttcggtcgatgactcacgaggcgcaaccggaccatacccagcctaaaaccaaagcaaatattagttgcggaacgtaacgagaaatgaagcaaaataccaaggacaagagttggttcgactggtcttcttggggagtcgaagcaatgggtgcgtcaatgttggctgccggtagacgcctatttccaaacaaactgatcactcgttccatgttttccctgttttcctcatcgttgtcttggtgcgcgctttcgctgtttttggtcatcattccttcgagcagctccagcaatgtgttcacagtgtcgatacccggcttctcgtgtaactaagcgattttaacattcagatcaacaaaacattgatttaaagaaaactcaccggaattttccaaatgcctctgacaaaatcttttgccaagttcttcttgtaaatgcttttgacgataaacatggcctgctctgtattgtgctgattgttcacctgttcaaaaatattccatcttttttctttacgatttaattacgcgcacctgcaaacactccctcattcaaatcagtggacggttccgaggcacctgcagatggcggcgaattccaatttggatggatcaatgaaaattttgtcgtttgcgtggtatcttctgaacatgtactgatacaaatatgtcggcagcatttcctcatttgaaccacgtaagtgtcggagagaagtcttcagtgcaccccaagttgcctcaatgccttgcgtatgcacttgccggtcttgggggtctacaaagaaaacacggtgattcacccagtggtgatcgtattgctgctgcatgttttgaatccctccgtaagcggcccagccatcagacacaatcaatgttcccggttcaatgttttgagcaattaacggcaagagcgtagcggcatcacgttccgcgaccgggaaaaaacgcactttgtttgtgcctctctccaacatcccaaacacccaatcatattggcgttgcaacattcttcctctgttatatttggcccttaagtgcgtttttgaattcacaaatgaaacgttgacaaaacacgtcaaatccaactgatcaaaaggcaacgaattaaaacagcaacaaaaacaacaacaatactccacacgacgaattaatgatctcacagcaaatctacgacgaatagaggcaaccaatgacgcagaaaattaccaacaaaccacaacatgttctcaaacaacaaattttaccgaaaaaatttcgactcgtctatttctactatacgtcccataccgcccaaacgctcttgttcttgcatgcgaacaacccaggcctgaaatagataatggcgccaaaattaggcgctagatggtagtgatgctcgggtctcggtatcgtctcgggaaattttggtctcgagcatcactaccaggtggacgaatccgagccctcgtcatacttggcataaatctcgcatgaagttgtagaaatcgacaatagttgctctcgaagcaatttcattttctctcattacagtttccagtttgcttgttgggtgttgagcccaccaataggcaagacgaatcagcgaggtcttccagtgatcccggtggcataataggtccatcatttggcaacaaaatggtgagtcttgaccgtggtgcctccaatggaccaagacttgcccgtaacaatttggccgttgagtttccttggtcctcactacacaaaccaaattgcttgcagatcgccgtgggtttaagctcgtccagcgaaagcttctccaccttatagcaaaatcataaaattatatatgctttgcttacaatagcagatagcattttgtctgcaagtaaatagtagcaatcggcactaaaaaatgggacaagtcgacagtaactccttaattcatctctgatccatccaatgccttcgcttttcacttctctgatcacgctgataaatgctgtacatgcaaaacaacgcatgctcggctcaacttgtgaaacttcaaaattttgtttcaaaatgaaaataattctaaaaaccggtcgccttctcaaaatttctcttgcaatattgttgctcaagcggacattcgtcaattggcattgatgaagcacatgacgacatgtaatctgagggcgttttcccacaaaaatagcaacaaccttctattcctgtacggatttttttaattacacatttcttctcagaattaccagtcatataaatgtaagttgtgttgcgaatgtaacggtcggtttccgtttcatagctagattcgttaacgcatcggcctttatcgtagatgttgttattgtcagggcatattccacaacaatgccaagggttcgcccttcggtatccgaatttgtcaataataaagccgtgccattccattgcatgagttaaagcgcaggccaaaagaaaaagagccaatcgaaacattgccatagcactttgaagaacggagagaaaatgacggctgacagctttttgccgacgaacggagagaaaatgacagctggcagctttttgccgacgaacggagagaaaatgacggctggcagctttttgccggcaaatggagagaaaatgacggctggcagctttttgccggcaaatggagagataaatgacggctttttgactacgaaaagagagaaaaataaagctaactttgcctgtttttgaatggagaaaaatgtgttttcttgagctggtagttggatttagtgcaattaaatgtttaaaggtttttaatgaaaaattgattggacgcataaaaattttattggacgcataaaaaatgatgggacgcataaaaaattgattggacgcataagagtcgattggacgcataaaagtcgattggacgcataaaagtcgattggacgcataaactgtacttgagccaaaatattcattaactttgctttgatcgaaaactcagaacaaaaacagtgaaattttatcgattgatttttactcgttcggtcaatgtgttgagtgagtgagtgcatttgtttacgtaatggtgagccagtgacaaaggcttggtcatatactgtaggtagagatttacccaaatttagaaatttttaaactagcttttggaaaacactgttatctagtaacataaaaaatagggacttttacagtgtgttgcaaaaaaagtataaggacagattaaaagtgagcaaattcctaacaaaaaccaacctgaaactgataaaacaagctaagataaataacaaaaaaacaaatgtttttattatttctattgatttcgcgggcagaaaattgcagcttttccttgtcctttattttccttatatttttgcaacacaatgtacctaatgggatatcgttttataattttggattatattaaacaattttgatattgtatcataaattaagaccgcaatcacttaaacggtaaaaattggtgagaaacagagcaaatttcataccatggaaaacgggtacattgacgtgacatctatcgaagaacaacaggaatatgcggaaactgagcatcaaaatacaaggtaatgtcaaacagcgacaaacgaaaaagttttatagtacacatgtgaacagcattcttttttgttgtatttagtgcgttttgatcgtgttgcaaaaggtttttgactttttgttcgattccgggttcggaatccgagatccataacgcgaaagcccctagaaacatatctacgacttttgaaaacaaaaaaaacattcaaaaaaggtgtaccatctaaattagatatttcccataattcacagctctcatctcaatggcggtccgtccgacgttccaaattgacccgcgaagtggcgatcgatcggattttggatgaacgcggcaaaaagggtgcaacggaacatcagtaccttgtcaagtggaagagtgtcaagcagtgctgggtcaacgcggacgaactgaagaaattcccgtcacttacggatgcgtttaaggttctcttttttggcactttgagacgcgaacaattgaagacattggttccctctctgtttaaaattttaaataactcatataaaacgccttccctggtgttttaattgtctttgatcacgaatctgacatacatttcgaccaattccgaaccttggaccaagctctaacaaaaattcggatacaaaattttcacattttacttttgtggataatgttttattttgtgccatccattttcagaagaagaggggcaacatactcaatttcgaggaagaggaatttgacgagatcatcagcaatggcaccagcaagcgcgacaacagtccgtacaccgaccacgactacgcaggcacgcgccaattggcgacggcgaagggagcgaccggcaaacaccaacggcagaagggcggcggagggacggcgaaagagccgaaaaagaaaacggcacttgtcagtgggaccgattcgggggtccgttcatcggcacggccgcaccgtccgaccaaacgttttggtgggcgataattatttggacaaatttgatacattttcacttacagacagacaatgaatgaattttaaggattgagtttatttggtcgttttttcagtagaggaaacaaacgaatcattcattcgtgggacttcgaaagtgcgccgaacatcgccacgcaaacatggcaagaaatcgactgcggagggaggaagcgaaggggaagaatcggaggatgacgggaaggagtacagcgtggaaaaagtgttgaagaagcgtgtgaagggtggaaaaatggaatactttgtgagtggngcgatatgcaaatgggtgaaaaacagatattttctctaaaagtttaacaaaatatgcattacgattga

SEQ ID NO: 4388 - DNA, 3842 bp, Heterodera glycines
  unsure (1)..(3842): unsure at all n locations
ccgaacatcttcacgcaaacatggcaagaaatcgatccttcgaggtaggaagngaaggggaagaannggaggangaccctttggaggacagcgnggaaaaagaggncaagaagcgngngaagggnggaaaaagggaanacnnngngagnggggcgacangaaaaggggngaaaaacagaanncncnaaaagnnnaacaaaaanaggcannacganagacnnnaaggcncgnnnaaggncaaaggggcngggnangacgacggnaggaacacnngggaaccgcgngagagcnngaaacacnnggaagggnncaagcagnacgagaaggcgcaacaaaaggcggcggagaaaaacaagnnggaagccgaagagacggaggaggacgaagaagaggaagacgaggacaacgaanacaaagnggagaaagngnnggacagacgcgagaagggcggcagaggggagnacagagngagncggacgnaaggcaanggnggaaaagcaccannngcaaannagaacaaagggaagggctatgacgacagttggaactcgtgggagccgagcaaaagcgggaagcattttgaggtcgtcaaacagtacgagaaggagtggaaacagcaacaccagcaggagaaacagcagccggtgtctgcaaagcgttcgcttcgtttgtcggtgggtcacaaattgcaaagcgacgaaaactgcacaaaggctgtttggtgtattaagcgcaccgaacaaacaccgacctcaaagggcactactccgtcctcatccgtcagtgtgtcgaccaagcgcattcgcgtggtggtccgaaaggagcaggacgacggaccggcgcacgtggaacagaccgagatggacgctgtctcggtggagaccaaagagttggcgcccaagacgccctccaaaaagaaaaagaaacgctcacgctattgagcaccgaagaagaagaagaaacagcagacagaaagcacgatcaaaaaacatcatttccaccgtttcgcctatcgcttcttgattttttaaatttgttttttatttatttaatttcacttctcagatggttttcgtcttgttccttaaataccaaaaaaatcccttcctccaatcaccgccattttttttgatgctcctttgaacatcaccattatttattctgcgatgcacttacgaattagtgttggaagaatttgacgaattgttcacttctgtcagaatttgataaacacacaaacaaaagggaaattagtgacgtaaactgttagtattattcaattattaagtatttaatctgttgcttaatgatgcgtgaaacagcctttgttaaaaactagcaatgaaattaaaaagaatgacttttgattttgaaaagagaggtgacaacgccgacgatgaggacagctctgccgatgaatgttcttcaagcactggtagcggtacaccaaacagcgaatattcggttgggcatggcgagcggcaattatgccgaatttgcatttgttggttgtgatcccttattttttcaattgttttttttaccacaaattgggtgccattgctataaaggatttaattcgaacccttctcccccatgcatgttttttcaaacaatttgtattcattaaaaggtggatgagataatcgggcacagaattgaaaatgggacggacaaatggagggtccgatggaaagggtgggcgccgaagtacgacacgtgggagccgcgtgagaatttctccaattctatgcatcttctggacaaatttgaagccgaacgacttgccgaacaatgcaaagagaatgtgagttgctctgaacgtaagcattctcattaaatagtggaaattattttatttattcattttgcgtttctccgttaatgcctattattattctctaattgtgcattttaaaatatgggcggtgcttttgaattttgcataaagtttactgtttttaaaggctctctttttaaattgttattcggttaaaatcgccatttttctttccttttttttctttattgattattgccttttttctgtccctccgttactgtttttgttgtatcctttttcatcctttcaggaggctgttgcaacccatccaatgtccaataataataatcagtcggattatgtccaaaagttgcgtccccatcgttcgctgtgccttcctccgacttccgccgctgtgccatcggccggcagaaaaggaccaaagaagaaaggaagtgccaaacgaacgacggcggcaaaaactcccgtttcaattccacttttggaggccaaggcgatgctgcacacgtcgagagtccgagtttttattcttgtgtaataaattggcaattaaatttaataggtatttgggtttatcatgtccattctacgatattttttaaagttttatgggtttcagtagaaaatgggctggttttttggcattttctctttactttgtacagtaaataaaccaaatcgtttacgtttagatgcccaaggacatgtcggagcgtgcgaaggagtgcaaagaaattcggaaattccttttgaattgcgtcaaacggacgaatgcatcggcgaccgccgccgcgcctcgcgtgctgtacatcagcggcgtcccgggcactggcaaaaccgcagcagtgctgaaggtgtgccaatgccgctagtcataattaaacagatcggtatttatgggtcacaattttgggataacccaaagagatttgccacgaatttgtctgcagtcaatggcttctttttcagtaccgtcatttccgtttttgcagttttattggattagacgcatttgggacccgaattctccgcttcacctcatcagaaagcagttttaccccaaacaatggtttttaggtgcaaaaagaattgtgttcggaaaagaagacacccaagttcgactttttgaacatcaacgcgttggaactgtccgacccgcggcaattgttcaccaaagtttatggacaagtacaaaacaattgcacggggacgaggaagaaaatatcggcaaggtttttattgggggaggggacaaacaggaaatttaaaacagaattaagaaatgcacagcaattccttgacgaacattttgcagaagagcgaaagaaacgaacgcccattgtcattttggtggacgaggttcgtctaatggcactttggatttgccggaataaattccaccccagggattgtttaagaaatcgaactgaaatttagcgccataattttatgaattctgaaaaaagaggggaaaagaccaccctaaaactcgaattttgtctccccctcccgaaatgggccggccttccactgaatcacggctatgaattttcttccccctccacaggtggacatgctgtacaccaagcgtgaggatgtgctgtacacggtgttcaactgggccaacatggaccactcgcgctgcagcgttgtggccatttcgaacacgttggacttggcggaacggttcttttcccaacggattgccagccgaatggttaatgggcatggttttttaatgaatggggtcatgaaaattggtcgcaaaaatttcagtgatttccagggcaacaatcgactcagttttcaaccctatgaattcaaagaaattgaggagattatcagaggtcggctcaccgaatgccctgaaggcgcattagaccccaaagccattgaattggcatcaaaaaaagtgggcattttgccatttctcggcacttttcttgataactaaatgctgcttcatttaattttttgtgcttttccccttaagagaagggccatttccggcgatttacgtaaagcgtttgaactgata

SEQ ID NO: 4389 - DNA, 578 bp, Heterodera glycines
taaaaaaaccattggcacattttgcgatggaaaccgaatacaaattatagaaaaaagaagaagaaaaaaaaaattaaaaatggaaaatggaaaattattttttccggaatcaaattttgtattcatacaggcatccgaaaagtttcgaacttcggaaaacttaaaaataatttttttgaaaatttgtaagtttgttacatcttcaccaatccattaaaattcaaatttaatttccgtcaacaaaagggcgccaggggaaaaggcattctcattgcatttcactctttggtttgttttgtttgtccagtgaagtgatgcccactcgtctgtgggactttgtgggcaatggcataaaaggcgccttggaagcggcagccgatggcaccaaccgacgtcggcacaattcgtccacgaatgccaatgtcgtcctcgtcaccggcgaaggtgatggtggctcctcctccgtcccttcgcatccgttgggtcaccgacgaacaccgatggcacaacagcagcagcagcaattgcgacactctgacggtgccaatgccaatgaaaatgttgcgcagttcgttcat

SEQ ID NO: 4390 - DNA, 4014 bp, Heterodera glycines
  unsure (1)..(4014): unsure at all n locations
ttttctcggattttaataatttctaagaacttctacgtttttcaaaaaaaaatttacttttttttctttgatacaaaagttttatatattttttttgctttggcaattttttacatggggaaagaaaactttcccttgttacgaagatagatcggaattacttagttttaaaaccatcaatttgtaatactgattcgaccatttgcagggagtgtcctttcttcactgtgaactatgccaaattttggaaccatcggcagaagcacaagcgcgcgaaccggttcacctgcaagcactgttccttctcctccggctcggtgcaatgctatgcggagcacatggaactgcatggggacacgggcacaaccgctacgatcacttccatcatcaaccaaaacattggcaacaacagcaatgttgcaactgaatttggcatgatgccagaggcattggtggccatgccgaaacatgcaacatcgacggtgacagcaacaaccgcaacatcttcgtcaggaattcgatcatcgccggaagcggcaagcagcggcagcagcagcttggacggtgccgaaacgttgtccgaaaaaaaattgtctatcatgccgacgaaaattgtccatgaaaagagcgatgatgaggaaatggaaatgacgacgacggcgtcgatttcccaagctgttgctgcttcgctcgttgatgaagcggtgcattttcttgtttttgtttctgatagttaaatgcggggttgagcctcgagctccccgatcaccgacatttttgggcctgctcaccgatcttcgtcctcactgacggtccccgattcccgagaatttcttccggggctaattttcgaaagtatttgaaataaaagagccagacaggggatataaaggataaaggcactgcattgcggaaacaatttatcgaatctatgaaatttctaaaattcgatttgatactgtataccgtacccaatcgtcccgcacatttttaataggttttttcttgtaggacaagtctgacaagcagctcgatgttgtattaaaaccttttgcgcagacgaaatccatgcttggtttggatgttggtgagtatggtcttagtgattatttccttgttaaacaaaaatcaattttttcaaaaaaaaaacattgattttttccctttattttagaaaaaactgctaatttgtaaaaaattagaaaaataagctaaaaaatttttagcttttttaaattttctctgggcgggggcgagtatataactttaagcatgttaatttattatttagaaattaatttttcttcaaagtttgggtttcgtttaggttcttcctcctcttctgccgctgctgctgatttttcgtccacttcattcattactacagcaatgttgactttagcctcacaatcagcaaaaactctttgctgcagtgaatgtccatttggtagaaaaaaaaaattttaaaacgaaaaatttataaacaatttttttcaaaaaaaaatcaataattttctcaattagacacccattgtgcaacatatgctagaaaaagtaccgataaattaggggttttacgattaataaatttttctgaaaaattcttcttttgtcatttctacattccgcaataaaaactcaaaataatatacaatattaattattttttaaatttcctcatattccaattaattacattaattattgtacaacagaaacggtgcactcggtgctgctcaaactgcacatggaaatgcatcggaacagtgaatgccgtccgttcacttgtgcactgtgcagcttcggctgcttttccgccgattcattgcacgcgcatttggcactccacgcgtccgcaacaacgctggaaggaggcggcagcggcacttataataatgagagcatacagcagcgaatggacccgccgccggacacgcaaacttctgctgctggcggtccaattactgatggtgggctgaagggggggggggggggggtcggtttataagtcattttttatagatttttttttctaattattttttttattatgattttttaaattttaatttgtggcttgtgacaaaaaagaaatcaattacctattttatagattttctagaaaaattgaaacagtaatattatagttttatgtgggttagaagctctttttcttcttttttacacaattttaaaatgaatttttttaaatgtttatatattttttactagaaaaaaaaactgaaccctaaaaatttagaaaacaaaaaaattttcagaaggggcagggagggtacgatgctggggtggaacttttgtgcatccccatccctccctctacaatatcccaaactacagtatgttaataataatatttctgttgattttgtcttttttcaaaattttgtcaccattttttgaaatgacatttatttttatttcttctggattattcagctccattttctgctgtgctcaataacgctgctgctgcagctgctccatcagtgccaacaacagtctccacggtgtcttcatcgttatacgcttgttctcaatgcaattttaaatgtatgagttaattcatacatatgcaaattaaatgccatggtctcccgtgtcaactactgatcacaggcccataaacagaacaaaaattcggagcagtaatccgaagaattttttttttttttttgcacttcgggccaaaaaaatgatttgtcattcggggtcaaattaaaaaaatatttataataaattggggtccggcgatgcaaaattcaacgcttatttgttaggttctgctgacaccccttgtgttcgttcgtgtatgtgttttatttacattttaggcgctgaattggaaccatttctggcgcatcgcaaggaacatgttcaggtagtggtgataatatgtaattgttatttttttcttgatttaatttagttaattatttttttatttagcaaatacataaattccctttacagctgattcaacagcgtctaatgacaatcatcaaacgtgcagcagtgatggaaaattgttgttttgggaatggagcgacaacgataaaaatggacaaaatgccaaaggcaaacggtgccgggaatggacgaacggttgacaaacagcattactgtacccgttgctcatttcgttgtgagtttttttttgtataattaagcaccgtcgattggctgagattcacttactccttggaaatttggcattgtgataacatttttttaaaaaatcgctaaaaatttttattttttttaattttctaagaaaaatttgtactaaaatttttttttaagttaaaaaaaattttaatttattcccggctgtgtttcggcgactgtgattttgattaattatccaaacaggtgaaaaaaacactatactgtaatttgtcattacagggtcaaaatctaaatttaaggctgtttgttttgtcttataaaaaggacattaagatattttaaatttatttctttctttttttctttttatttattttaaggaaagtttttttaaattcaatttttttcacaatttatatttgattagaaagaattgcataataaatttcgtaaaaactttttaacttgaacaaaaaaaaatgggaagcgtattgaattaatgtcctgagttcaaagtgaattaatgttctgaatttcaaaattgagatccatttataactgctcatttctattggactgttcgttcacaggtgacagtgttcaagcattcacacgtcactgggaacaccatcgcattgacaacagtcggcctggcattttccagtgcagcgcatgtgactacagttcagacacgcgcaatgtggtgctgttccataaacacaaccatcatttgggtcagagtttttgaaaaaaaaaaaaatttgtttatactatttataaaacatanaaaatgtgtataattggacgaaaaactcgtcaaggnngcaattgtgctgcccccgactcgaactaantgttttttaacca

SEQ ID NO: 4391 - DNA, 5186 bp, Heterodera glycines
  unsure (1)..(5186): unsure at all n locations
ttntgggaatggagcgacaacgataaaaatggacaaaatgcctaaggcaaacggtgccgggaatggacgaacggttgacaaacagcattactgtacccgttgctcatttcgttgtgagttttttttttgtataattaagcaccgtcgattggctgagattcacttactccttggaaatttggcattgtgataacatttttttaaaaaatcgctaaaaatttttagaaattttacactatactgtaatttgtcattacagggtcaaaatctaaatttaaggctgtttgttttgtcttataaaaaggacattaagatattttaaatttatttctttctttttttctttttatttattttaaggaaagtttttttaaattcaattttttcacaatttatatttgattagaaagaattgcataataaatttcgtaaaaactttttaacttgaacaaaaaaaaaatgggaagcgtattgaattaatgtcctgagttcaaagtgaattaatgttctgaatttcaaaattgagatccatttataactgctcatttctattggactgttcgttcacaggtgacagtgttcaagcattcacacgtcactgggaacaccatcgcattgacaacagtcggcctggcattttccagtgcagcgcatgtgactacagttcagacacgcgcaatgtggtgctgttccataaacacaaccatcatttggtcagagtttttgaaaaaaaaaaaaatttgtttatactatttataaaacataaaaaatgtgtataattggacgaaaaactcgtcaaggggcaaattgtgctgccccgactcggactaatgttttttaaccaaataaattaatttatttttttgtcaaagtggaacaaatttgttatcattcaattaatcattaaggtttctctattttcttgtaaaatttcggaaaatttatcatgttccaaaaaaaaagttatggatgaaaaaattttgatataatttttgtcatgacttttttgaaatatggtatataaaatttcatgatttgcctataaatagagaaccctaaggactattgatgataccaagaatgtttaatttgtttgagttttttaccgtataattaattgcaggacattcctctgacatcgctgtgcaaaaacattgaacttgttaaagaacaacagaaacgacaatctgttgctgatgatgatgttgaaaaacaatgattgagtggccttattaatcaaatgatgcatgatgatgagcgagggattttgacttttatctgatccagttttttatcgataattcattcattatctcatcaggaaaatgatggcctaatttttcccgatcatccccccgggtatattccattcttttttttgaacacacacttttatttatacactcacttgctatttatattttttcattcttcagaaaaaaaagtttaataaagtgatttgattatttaaaaatttgattatttacttgttttattttgaatattcattattttcttttattttgtccgaaaaatttcttttatggttattgattgataccggagcttgaacatgatcaggacccggtccggatttctttgggcccgatccagaatccgagtatacagtcatggtcggtcaaatatattgcatcaacgccaaaataagcctctactaaccccctgggggaaaattttccgattttaagccacattttggtgggatcagggatgctgctgatccattgattttgtaaatttgtgagcatcttttccatgcctttatttaacatttcaacagaaaaccagagtcaaccctcgcaagtgttctcctccattttagatttgagcatttgtttaaacaaaaaaaaagaggaattaaatattttaatcttatgaaccaccaaccaatccacgtctatggagaccctcccccccccccccctccattagagcccataaccctccaatccgaccgaaattatttattcatcacaaccactcgaccgccctttacataccaaccaatatttatgtatgtatgctgatgttgtggagtgtgcgtgcatttctttcttcattttgtttgtcttctctctattttcattgttcattttttttcaattatttttccgtattttgaaatttaatggtaaatttgatttgacttttaattgttgaaagggcgccggatgaaaaaaggaaaaatataattattatcttgaatatatttttttcaaaaactttattcatataaagttttctaaatatgtataatcaatttttattttgatttgagttcctttaaataaataaattacagtttttaaaccttttttaaattttttttatgcggatatcgaaaagtccagcgacctgagaaaattgacccatactaatatatcaatatcagtaaattggtctcttctacccaaaaatttttcgtcagcggacgtccttgtttttttttattagctcgtttcgtcacctcgaattgcaattagttttaatttgtcataatcactaaaaaacaaaaatgttgttttgtttcaaggacggacgagtaaaattgtaaacattcaaatggattgttgtttacacatttgaaaatataatattatgtctgtacatttcattaaataattctttgagattattaattatttttgcgatttaccccccacctttaatttaaaaaataacccttttttctcggcttttcggggtcgctgatgacgaatctgacagccatttcggccattccgaacaccggacccaaactcgaacaaaaaatcgaaaattcaaaattttcgaattttaatttaatatcaaaacctgcatagaataatcattttgatgttggcaacggtttatgactaaattaggcttttttaataaattttttagatacatattttattttcatttacatttgcttaacattgatggacctgcaacaaaatgggggtgccccttcaccttcaaatgttcgtccaaagttggcatcatcaaaaaagaatgtgatcacaattggcaaggtgaagaagcgggtcactgagctgaagtgttcggaagttcgatggttctacaaaaacaaggaggaagacacaaaatgggcacctttcaaaggcacgaataatttacaacacataattttgaaaaatttgggttttttaatttggctagtttaaaattttttaaattttgggtgcccataaataccattttgactatacaaaaagatgtttttcacttttggggcccggattttaatttttttttcttttaaaagaccgcgcagaattgcacaaatatttgttccattatccattttaaagaatccttagctcaaattaggtcatttatgccaccaaaaaattttaggcgcgtagtttttgcaattatgcgcgctctgttttgttttaaaaaaaattcaaatccaggccaaaaacgaaaattaccatatgtgtgcaagggattcttcagcccaattgagacagggggggggtctcgggatcgattttcattcgaaagtccaaatttcttgaggaacagtgggagggggggggggggggggtatcggtggtgtagtatacacccgcgaggcgttgcaatgtggccatccatggcaatgcgcggacatcatcaacggtgtatccttttacgacctaattaaatgatcaacaaatattaaaatatgcctttattattatttcaattatctaatgataatagatcccccctccctccttaattacatggctaaattccgtgtcctcccgcgctacgttgatcattgaaaggatcaaagttcgaaattccgcattccgaatatcttgcgctggaggcgacaaaatttgttcgcataatgaaattttttgccaatatacagacgaataataacagcagcaatttggcaaacattttttgtaagattttttctacaaaaaattaataaacaaaaaaaaataaaaatgattttcataagaattatgatatagaatttttgtaaaaaagaagctgatatttataggaaaatagtataaaagaattcttttgctccttttaaatgattacaaaaaaaggtgaattgaaaagccaaaatatttcacaaaggaaatgggaaaaacatatttattttaaggttttactttacgaatcattatttttttagttttcatttaacgaatttttatgaaaaattttgccttttcaatataagaaaaattttaagtagaatttttaaaatttgcttttaatgattagttatttttttatatgaaagttttcgatttcacattattatcaataaattaaaaaattattttggttcttaatattatacatattattcaaaacaaataaatattcttcataaataatcaacaaaatgttttctgtactatgaattttccttctaattaattccttttttctatttcctcaaaagtcgaaatcggatgacaacggttcgtcttcctttccatggccaaccgaactttgttggccagggttggcaatcacatggctcggactcggcacattttggtgcgcggaatttccttgaaaataatcttttaagttttcaaataaatatttatttaaaattatttggtttgcctttgcttgggtgtccaaaatgcacatccgtaacttcaatgttcagtgcttggctaattgctttgattgcttggctttcctgctcaaattgacttttcaaactgtgccattctgtgccggtgcccgcatggccagcagcagcagcggccaagtcgaacatggcacgggcaaagcccaaattgtacggacactcgtcctcataagtgatcttcattttcataaaggcttaataaggtaatttgcgcattttaaattaagtattttctcataaaaatttcccgcaaaaattattcttttaattattttccataaaacgggttttttcctataatttgacgattaattactcctcagctgccgatcgatttcgtccacaatttgtgcttctcctccgctggggcatccgccgcgtgaggacaaataactttttaacccatccacagtacttttcgccattgaacatactgtagacgcgtcctcaccggcagcagagaaagtgccaatgtatttggacatcacagaaaccacttgctgactgcccgggcagcacgggaaatctgtgaaat

SEQ ID NO: 4392 - DNA, 3946 bp, Heterodera glycines
acggttaataaatttatacaagaggcgtataaaaagactatatgactacaatttataggcggaatgatcacagaatttgcgggggaactaatttgtaaggttaaatattgaaaccaaaaatgcaaaaggacagaaagaacaatgattaataaaattattcataaattgggctggcaattatgtaaataaatattttttcctggattattcatggtctaaatagtaggaaaacattttcttttttgtgtttgcgaacaaaagtcgggacttttatttacatatttcggggttttatacatatttggtatgattaaatgcaattttataaaattaaaaatatcaaattataatttcatgggccaaatattttggtcgtgatgtcaattattttctgctggttttcatgtgattaaaattgaaaaatatttattaattttgtgaaggaggcgaggaacaaatcaaagcgctattgaaaaaacttatcccttttatcctcttttgtgtatccactggcgcaaattgcttagaaccggcttttccttggttcacgccttatcaaattatccatttttcgacaagaattgtgagcgctaatttactgaatgatcactttgctttttcacttgtgatcgaagcgagccaaatagtctcagtgtgggcgaaccgaaaaatccacaacatgaggaaggtcgaccaagtgttttctctatgaatcacttttaacgcattattgaaccgattaaattaaatgaagtgtgattgatattctaatctattggattttttaaatttattttgggaaatttcatccattttgttttaagggtttccatttttcattttgtacacttatttctgacccataaaatttcattcttttgaatcattcaagacaatgaatgcataatgtattcaaatgagttcgaaaatgttactcttaacgcgcaaatatcagaatcgctggacgtgtttatatttaaatgcctttaattgctacaattcttttattttttccaaccttaaaaatatgaatggctatttaaaaaaaattggtagcctttttttcttcgctctttgcatttgtttaataattaaaacaattaatgtaaaattatttttagtcactctttttttatttaatgcttcttttttgcttcaggaaacgcaactcgcagcttttcgatgtcatggatctaaaaaagacgaaattattttatttattttgttaattatttatttacttggcaaaatttccgacaaaatgggtcacctaaaacccacaaattcgttgcagtcccaaagtcggaaagagcaaaaatacatttattgttgtctttccctcgcttaaggatgagagtttcctaaaagaatttaaaaaattaaaaaatattaaataatgaattaaaattttagtgaaattaaattttcaacaaatttatagccaggttttggcgtatatttatgaatcgtataccagccgaaacgaaaaaaaagttgtgtcaaggttcccccactcagactttttccggatcaatacggggaggagggggggggggcttaaattctgaggttgggaaaaagcaaaaaaaaaaaaagagaaatcattaacttttgggttggacatatcacgggattggattatttaaggtcgccgaaatgtcaggaagtgttagaatttaccgaggctgagaactgactcaatataaataacttttgaattaatttatattatgttctgtaaaatcttgctttaaataaaacactttataaattatttttgtctcctttttaattattaattaacaaattctgtcaaatttcccacctttgtcacttcgtatttatgtccattgatcagaaaactgatcgggccaacattctgatcacacggaattgagtggtcagacaaatttgcgtcgtaatggttataaattttggtgacctcctcccgtgggccaagcaaaagtgaagttccggtgtcgacaattgctgcactttggcccccattaattataacattgctgtccaatttaatttccttaattgggtaattaatttcattgaatttcaattaaaaatttgcttaaagaatcacatcgatttcgaacttccaatgtccgtagttgtttggaataatgtcaatccaattgacaatttcaccacagtgttttttgtccgcatcgcccaatgtgaaaacttttcttgcaaaattaaatttgcaattgtgcgatctttttataaactatttttaaattactaataacacttataatatggaatgattagatatattataaataggcaaattaatttttttggtaataataattcatttaacgttattaatttatattataattaattaattaacattgttcacctccccctggcttccaatgcacattcccttcagtggccaaataaattgaatacaatggcattttgagcgcaccctttctgtgggcttggaccaacaccggaggaacattattgcccgaagcgctgtaacttaggccaaaaatgccactgaaacccgtttgttgagtgtccttctgaacagtttggccaaaataaatgttggccaaggtgaacgcagatgaatcggaggccaagccaagctgagaaatttgaattttattattagaatataattttagggattttgggtaatttgccatggggaaaccaatcactcgccaatcccccctacatatgctcattaatttttcgcacaatatctcacaaacttagaacttgaaacccaaaaatacctaaaaaaaattccagttacaaaatttaattaaatttgaaaatttaaaagtaatttgttattttttccatttaaacacacctttaccacatcttggccaattgttccggctgaaaatccgaaaccgtacacaatcgaaaatggctgattcgtattacggtaagtggttgaaacttcgctgttaaattttgtcgcattttggcatgaaattggcgttgttgggtcttccattttttgtatgttgctgttttcgagctcacaacatttggcatcacattgccgggcacaaaaaattgggctatttttacagccctcaaagcaaccagcggtgccacattccgaatcgaccacccaaaaaagactcgaaccggtgtccaattggacacgaaattcttgtggaggtgtgcctaacaaaaacaaaatttaaaaactacaaatgcaaaaatgccaaagactgaaattatgcgtttttatatatgtttttgttaaatcaatgaatttaccaattgatatttgtataacatattcaatatctttgaagtcaaacaccgttgcattatataggaactaaaattaatggaattttattagaagtttttataaaattaatttgtttattgtcaataaggaaaaagtccacaaaagggaaaatccgcttacattgaggacaaaaacattaattaaaaatgtcctcaagaagcgcataaacagttaaacgagatcaccgccaaaataaaaatataatgtgaaatcaatacaaataaatatttaccaaatcacttttagttttaatgaattaattcgactttaatttttcaaataaataaaaaattactcagaaatacgtctaatctgatacaaattttattaatatctttttgaatgattttacattattttgaaaatggaatatcttttcatttcgttgttcagcagctgatgagaataattttttatttttcttttgcgttttgtgcatttgcatttgataaacggcagtacagtggccataagcaaaaaactcagcaatgaaaacaaaaagaaaatacgtaaaaataaaaaccatttttaatttttcttcgcttttcgcaattttataagaaaaattcaatcataaaataacaattaattattatatattttttatcatttgtaaaggttgacatttgcgttgtt

SEQ ID NO: 4393 - DNA, 1786 bp, Heterodera glycines
cggctcctgaaataattttatataacaaaattggcctaattaagtaccagggattgtcccgattttgatttccggctgtccaaacatggccttctctcccgcgtaaatgatatcgcacatcatagccaactaaataacaaatgtttaaacggccaaattggcgaaaagtctccccctcccccccgggtttctttcacctcacatccacccccgagagcgtgtccgttgaccgccgcaattgtcggctttcgtacagtcgcaacttgggaccaattctccaaaaagccgccaccgaaaacctcggcaaatttcttcggcaccatttccttaatgtcggcgccggctaaaaagttgaagaaaattacaacgacaaaaagcgaaagaaacgcatagaacggacacctgcgaaagccctttcactgccggtgagaacgatggcatggactccgtcgtctttgtccaaataagtgagggaatgggcgagctatgaaagaaacggcacaatgaaagaaaatattcattttttgtttggtaaaaatcaaataatttgaaagagcggtaaatgcaattgatgggaccaccaaatgagtgttacttattgttaacctcgtccatcaattggctgcacaatgcgttcagtgccttcggtcggttcagagtgatcagtgcgacgacgtcgtcggcgcccactctctccactttgatcatttcgtaattgggcataactgacaatggcacatttcaatggcaaaattattttgaagagatttgattttaaagctatcatccataaaatgcacccttaaaacttcgcgtcctttctttttgacaagccaaatttgtcgcttcgcattcattggaaatttcattgatttgaatttttgtgaattcgtccaaaagaaaggaggttttatttgtcattttttgttgtcagaaaagggaaaattattgaccaaggaaaagaaaagtgaaaatgaagagttaaatgaacgatttgttatcatagaatttagggaatgactgataaagttgcgaaaatgaagaatccaagaaaaactgtatttgcatgaaattcccagccctaaaattagaccacagaatattttgaagataaacacaagcaaaaaatttcatttccaaatctaacaaaaaattttgtcgatttttttttcatttaaaaataaatattgaacctgccgttgaaaatttccgagcctgttgtatgagagaataggaggccactgccagcggttgtctaagagataaaaatggcattaatttggtgaacattttgatgagtttaggtgtaaagcaataaaagaaagacgacgcctgaaatcagttcatttaatttgtcaaatcatgcgataatttccctatgaaatgggccgatgaatattttatttctctacccacaaagaaaaaatgctcgcaatcagtcgctgcgttgtggtcccttcccccccccccccctctctccctctctttctccgtttgggcggacggaggaatattatcgataaaaggagacaacaaaatcgaacaagtcacgccaccactgacataatattgtttgtaaaaacaaatggtaggtaaatattgttcatctaggaatgaaccggggtaaaatatggtcaacaaggacttttttgactccgtttttgacccaactcgtttttaggtcgcagagaattcaaggttttttgggtcgctaatcatcaattgaaaattctataaatctgacatcatttaaaagtccggcaatggtgcagttttgtggtttctg

SEQ ID NO: 4394 - DNA, 2096 bp, Heterodera glycines
  unsure (1)..(2096): unsure at all n locations
cccgttcccggaaaaatttttttaccgggctctagtttctgcgtaaaataaatttaaaaatttaagaagcattttttctaggatataaaaatgcgctgattaagaatctgagctcggattttgcaaaatcattgatttttgtctatgatttctcatcaagtacctaattttttctaaaattttattttttaattttctttccgatgaatttagggttaagaatgcgttatcacgattccgagctctgattctgcgaaatcaatgttttttgttaatttgggaaaaaaacctacaaaatttcatcaattatatgtagaaatttggtgcaccagaaaatgtcgcaatagaaaagacaatttcaatttttcagaaaaaatttaaaaaaatttaggcttgggtttggtttagtgccacaaacgatttcatgaaattctgctgtgaaacagttaaaaattacgtagtaatgatgaaaaagcatgaaaacccatctaccaagtcataaaaaagcgattttagtaagaaattggatttttagaaaacatcaaaatttgaccaaaacaagccaaaaacacattcaattcatggcaaaatttgtatcattcaaagatctcgactagtcaattctatctacaccatgttgtatacggttaaaagatatgaaaaacatattggaaagcatctaccgagcaatacaaaaataattaacaacatttatttttttacaaattttttttactataatatcttttaacagcatacaacaactcaaatggatctaatccttgtttcttaatttctcaaaataaatgaaatttaaatattgttttattaaccgcttaattagtgagtttgtttaaacattttcaattatttttgtgcccacccgcgacattgtttttgtccaccacagaacattttccatccaatctctgctgagcgttgtcctttttctgctgtttttgctgcttttcccctgccaaaaatttctccaacaattggccaacagaaactgaaatttaattgcattttggtaaacggtcagctgaatgttaatttagaagaaattttgaaatttacggtccgttttttcaattttaccatttctgtcctcctctctcttctcctgctgctgattttccaattgtttgatgcgttccgccaatgaattgaacacatccacagaaactacaatatgaatttttaaggaattatttttgaaatgcttattttaacagtaaggctcggggtacggtactggaaatttataattatttttaaaattttccctaccgtattttttctcaaattgctgcttttcctgctccatattgaagacttttgccttcaattcaatgtgttccgtcatcagtttctgcttttccaactctgctttgagagccctctaaatttaaaaaagtgaaattttctctgttttagccacttcgtcctctgaaatttaatttttattttgctcacattttcagcattcagttcaccgttattccacagcaatttcgtttccttcaattcggacttcgcaagtttttctcggcattccttaaatataacaaataattacagcccaataaataatttgtaatttgtgttcatttcataattgaatggttttggcaaaatgccatcaaattgttcgaggaataggtcggccctttctccttttaattttatatcattggaaaacctttaaaaacgaatggaaattttgaactaaattttccataaatctttctctgtttttggcctcccctcccctcccgccgcggtttgatcatttgtccattcaaaaatggcccaccttcagcagctgctgatcagtgacgaacagttcagctgacaattgatcactcaaatttccgtgccaactgaacacttcgtatttgcccacttcttctgctgctgatgctgctggtgctgataaaagttagattttgaatttattttatttttaataattattttcttttttcgtaatttttttaaaatttttccattactttgatcagtttctgaacgcaaaaatgtatctggcgaagcgatggatgatgacattttttcaaattaaagaaagntgtatt

SEQ ID NO: 4395 - DNA, 4320 bp, Heterodera glycines
ttatttttcaattaaattcagctgtacgatctttacaaagatgctggactggtgccaatcgaaattgtcaccaatggcattattgctatgatctgtttttccggcatcactctcaacatgttgcttgtctatgttaccgtcaaatcaaagtgaaatgcccttagatttttgatgccataacttaacaaaattaattgaaagatgcttaatctgagaaaattaattaatcaattggaggaattatgaaataaatttcattgaaaactttcaattttgtcttgatccaaaatcaataaaaggaaggataaaaactaaatattaaaaaaacaatgctgaatccgactgtaagacttggacagaatgtaaaaacgagaaaaaattaattaatttttattaaaattttttaatttcctctaattaattttgtgctttttgttgtactgttttccgattttaaattgtcaatatagccatttatggcatttttcaataaaaaattttaagggccctccattcgacttgcaacattttgatcgcaatttatgccttttccatctcatttattctgatcggaaattcggtcacatttttcattttccttttcggcatcaatttcatcagtctccaattgtgcttttacatccaaattattccactcctttttacctcattcgctattctattacaattatgcatcggaattgaccgtctgtttggtgttagcttcccaatttggtaaattttccaattaaaaaacgaattgcttaattaaataattgctttttaattaggtatcaaatgggtggccgcttcaaacttttcaaaatttttattgccatctgttgtgcaagaactgtatttatcaacatttattattatcattatggcagctcaaagcattggggaaagtttgtgtgaaattaaatatgccaattataaataaaattaaagtaattttaaaaaagttatttccctaattttgaggtctattaaatgtataaatttgcccccttaaaattaaaaataattttggtatcttaattaaggtcattataatttaagataaattttatgcccctaattaagaccagtgatgtgctcaattggtgatccggcacaccagccagagactaattcaatgtcgaatatattagctttactaacatattgtgctgaattcacatgttatgcattgatttggctgatcaagcatttccgtaatggacaacaccacggacagtcatttgcgggttgatgaaattaattacccctaatgaaattttaattgctttgttaattggctcatttagaatcggaaatgaacaaacgtttaatgatatcgctgagtgttattatgtcaaccagtctcatctgctttattggcgtaataatattaatttatattgtaaaatttttggttaaatatttttgctaataaaaacccttaatttaataattatcagaattcttctttgcgaaaataaaaaaattatttgtatttatctccaaaatacaaatgattgaataatataatcgagttacattcttttatatgaattttggattttttgtttgttggttttatttctggtactttgctcactattacattcaatgttactgtatattacagttcccatttaagacttctgtgttctttaatggcataatgccattgctcagcttaaacatttttacaattgaatacattgtttggcccatttgcaatggtctttttttgatggcatattccagctgtactcctgtgcttttcctgtgcaggtggggtttataattaattaattcccaatttaaaaaataattaaattaattaattttttcatattttagcactgaataccgcaaagcatttcgcaaatatgtttgcagaacagaacatggattaactgttgttgtgccattgcataatatgcctgcttaaaaactttgtttttttttcattttgcataattaattcggactcgatgacgtcatttcatttaatttttataatcaatgatcaacaggatttgataaaatatatttttcgcgaaatatggccagaaaatatggactaaaaaatataattgaaaaaatatagacattttttcccaaattagaggtgatatttcttcctttcagtattccagctgtttttgtcctaatggccaataaagctgaagcaacttattcccgagtccttgaggtgcacaattgtttttgctctattgacaaattcagcattctgctattttttataggttttgaatgcacgtataggagttggaccaacttctgttatgttagacttcgaaatgggttactattaatttttaacgtatatttattaaacatttagccgccaaaaatgcatatacaactatttttggagaaaacctacaaattcgtttttgcttgttccacttaggacaagaaattaatcgtagattgaagaccgggaaacttagccactattacacaacaaataatgaatacaaaatcttggttcggagtttggctgcgctctcttttctggaggaaattcgagttgtgccagctttttacttgcttcgacaacgagcgaatgagctcggcatacaagttgttccaaatgcaggacaaccagtcgcaatattcgattactttggacggtattgttaaaataaattggattgtttattcattgactcttctgtagtcactatgtggctggtcacgatggaagacctccactgtttcctgttcatacctggaatcaccatgatagtgttcttcaggacttggggcgcacaaataacgcccaagaagggttccatttggctttaagaatgcaatttaacagtgtgcatccgccattatcgaagtgaaaatcgcgtttaatcagcttaatattttaattatcagagttatcactgttctgaagaaagaagagcgaatcgcagccgataagctgcggcagtatgagttggacccaactcaagggataagaattcgagaacggaagaaaacataccgtgaaaatgatttggctatcagaaatttggttgaaggctttgatgccattgagaacccaaacgaagatgagattcttgctcatctcagatcgttgcaatacagacttatgcgcaatgattttgagaattgggacgacccaaatggtgattaattctgttttcacatcccgttggcccttgggaaaggcactttaaataaaaattggaaaaaggtctactgtagttaaaaaatgtattgtggtttgtctattgtgttgtggttagtatgggctcaaaattctgcgcctcctcgcggtgagtccggaaacagagttaatttttaaaatattaattaatttttttgcaatggaattaactctggctaaagcagacgtaattttgtctaattttgtggcttagaattaaatttttaaatttttttttgttttattgaaatccccaaatgtcgggtccctaaatgtcgggttgccaaatgtccgtggttttcttaagtgtcttttgctcaaatgtcgttcggtccccaaatgtcgggtccccaaatgtcgggatccccaaaagtcgggtccccaaatgtcgggtccccaaatgtcgggatccccaaaagtcgggtccccaaatgtcgggaaagtcgggtccccaaatgtcgggatccccaaaagtcgggtccccaaatgtcgggtccccaagttacaaatccccaaaagtcgcaccacggattctgagcactggtgattatgcggatgtgcactttttggtggggacggagacgaaaaagaggcgagttttagatagagatcggacatgtgccgggcccgagttttggggtcggcattttgctaagaatctaagaaaaaggaataaaattttcaaataaatttgtttgtcttttggggagggaataagcaaattgtgtatttcagtgcaaacgtgatcaaaaaatcggaaacaagtttttatggctctttttaatttcgagtcaaactttaaaatattgctgtataaatatttaattttccataaaatttcaaaatttatgagaaattttaagaaaccagaacgaactttagccactagcccaaaatcagaaatcagataaactagcacatttgtactttctcagacttagaactctcgtgccagtcggttacaggcaaggcaccggaaaatggttctgaattttattgtaaaaatttccaaaaatcaaatcaacagaacgtgagtgattgggtggacttatcggccggtcatttccgcttttttgtcattctttcttctcccacagtaaaatcaattgccatatcacttt

SEQ ID NO: 4396 - DNA, 2275 bp, Heterodera glycines
atatttaacaatctttgtatcattcgagagctcttcaagtgctctattagcatgcaaatttccagaaaatttcgttaagtttaaaaaaagttcgagccaagagttggaaaatttcgttttttgaattcttctggttctaacttttttgaaccttaacgaaatttttcaaaattttgcaggctaatagaaaacacttagggctttcggatgataccaacaatgttagattttgtgtacaaagaaaaaaattatagtccaaaaactgggctggcgccgaaacgcagtggacccgacatggaacagacggacaaacactcaacttttttattacctatataggataacttataaattacaagccgtaacttttcagcaacaattgtggatatttcttgatcacaaagtcatggttcagcagaatggcgtttttcttctccaactgtacaatataccaaacaatgccattgtgttgggtttttccgatgatttccactggcttctgaccgaataatttctgttccatttttgacagcctaaaacggacaattaaatgcgtttacaaaatttggacacacttaatcttttggcatttagtcgacttcgcatgcaactttttataatcagacgcaattgccatcccttttctgacttgtcactgaaaatactgtagttttaaaaaattagcaatttaagtataatctaatcttttggagctaagataccaatgaatgcaattaaaacaagcaaaaaacactttttcataacagctaaaaatgttgcgtgaaaacaaaaatggcagacagttcattccccgtcttccgagtcttcttcttcctctttgatttcaatgtccgtgtcactgtcctcttcggtgtcgttttcatcggacgacgaacattcgacattcctcacatgcagcttaatgttgaaaatcaaattttgcaaggaatatttacaatttgggactaaatcagaaggtcatacccaaacaccgccctccccctccaacctaagggcgtactcttttaaatagtaatacaaattgaactcaccaattccctcttcctcctcttcgctgtcggcggactgtccccctctcctccgtccccttctgacgactcctcctccttgagttcgttgtcatccgtttcctctccgtcctcctcatcagatgatgacgacgtttgtccccgtcctccccttccgccgtctttcgttttccgtcttccaacttcgtcttcttcctcctccttttttggctttacttcctcctctttgtcttcattttgcccttcacttttcttccgccgcactttcactttgcccaactgttcgtcaaaatcgctgttgttcttcaattgttcgataatttgttttcgctcttttctcggctgtccgaccatttggctgactttttgctccaacagcgtttgacgttccgccactgcgttaaaaagttgagtgacaccactgaaaaaccgggaccggtataactcattgtctgggactgtcccaggaactcggattggatggagtaccgcctccggacgacgaaatttggatgagggaactcgtggagggtaccaaggaaattgaattcaattgttaattacccgttatcacgcggcaacactttcgaatttaatttggataaaacttttcaaatattcccctcttttcctgttaattcacctcgtcgcaattcgctgcaatttgcgctccttttcccgctctgttgcataattcggcttcacataaccaattttctttggatccatccaaaatattaattatataataaatgaaaatgaaacaaaaaaaagtattattgcgaaaggatacgaattttacaaattaatgagacaaaagatggtagtaattttacactaattctaattatgatatgttaataaataatattttaataccaacaaaaacttaggtaattcttcagcaaaaatattacgcaaaagaaatgacaagccaagaaaagacaaagtaaaacagcacaagcggataatagaacagaaaccgtcggttcggtggttcggagccggccaaaaacaaagttgaagctgaaaaatgataaattaaatggtaaattaagggggaaaagataccgtagagagcccaagcgaaaccagaaacagtggcaagtgcacgaagaagcaaattggcggaagatttgtgccagaaaagaagcgacagacttttgatggcaacggacgctaaaacgtacggcaaaaggcaatatccgatgacacacaaagcttgg

SEQ ID NO: 4397 - DNA, 1265 bp, Heterodera glycines
  unsure (1)..(1265): unsure at all n locations
agttcgggttagggattagaaattagtcaaaatacatgccagattcgtgattagcgaccttttaaaaccccggataacaaattatcatggttttttatcttaaaaaaattttgcaaaacaaaagggtccccccttttgtttcaaaaacggccacttttaaagtagcgccctgtatttttgtttgtgccctctcacaattgtttcccaaattggctcgtccaacgtgtcgaagtcctcctccaatcccaccacattgctcttccgttttgtttgtgccgaagttccgctgccaatgttcccttttaagtcgggctgcacttttgtgtccgtcacattgtcccttttagaagcggcttctttcgcctggatctccttttccaactaaagaatatattattggtcattgttacaaattcaattagaacctgttcaaggtcaacagaaaaggacaaatttgtagtcattcacaaaacaggcgaataaatgaaaaatggtctaaaagtggggatttgccaatagcatccccaagtgtcacgccagccactgaattcacaaagctttttttagcataaaacaatattgtggcaccacattcattgatatctttttgctggtactagattttaattaatgcttcattcttaagtgccgttctattttttgcttcaatcagttcggttttacgtgggcactatgggtacgtcccgctgtgtagagaaaagcctagtactatctcgtcggttttttttctttgtaatttctatcactttggcgtactatatattcattttaattatgtaaaaaaacatttacttctctctaagaaatcttttttcccgttaacagattttctttaaattttgcatatcgatagagaaaaaaattacgaaccaaatataagtgtttttagaaacataaaaagggttagctaaaaagatacggggtgatgaaaattttgcatttctttttcttgttttggcgtactattttcatgtctctagcaacatgaaaaaatcgaaattcgcaaattctaacagttttggttataagggtacaaaatcactttgaacatttagaatcaatagaaaaaagaataaatttagcatttggttgaaatcagcagtttaggacttgagttataacgtaatgaaaatttgaaactccaataacttttttctgagatgtcaaattgcttagtattcgcttagaaaaagattctcctttaaaaaaactttttttaaataccanaatttgttcagtttagt

SEQ ID NO: 4398 - DNA, 7019 bp, Heterodera glycines
  unsure (1)..(7019): unsure at all n locations
aaggagttttcctctacattatggggacctgctcatatcgttttgacctgtccattcagctcaaagaaaacctgaaaatatttgcacaatgatcattaagtctcttcccctgacaattagctcacttctcgctcgcccctcgagttcaattttccctcggccaacatttgaatgttcagcactttgccacgctcaatctccacttggatttcctccacaatatccattccggcgaagaacactttggaattgagcttgtccaccggtccatacttttgtctgaactgttcaaattcgtcgaattctctcggaaacatcgccgacgacatggcctaaaaaaagaatcataatcattcattcgttcctatcttcctattcggttcaatgtacatcaacgtctctcagattccttccgtgcttctcctccagggtccgtttgtgactttcaaaatctaacgaaggcaattccgcgccaggccgtccctcaatcctcggctttcctctcaaaacttttgtcctncaaggttcggngaacccatacggcggctgaccaatttgntcctgtnnaaataaaagaaatgngaattcacaaatccttttctttcatttacctgcatgaattggacaacggacttcgggaaagagagttcctcggcccgttcaaccaatgtctctttcgtgagtttgttctgcaccataaactggggccaagtccccgacaattttcgaagatggagtaactctaaaacgtttcaattgctcttcgattcctagtctcaattcgacgcacttgataatgtctccaagtgccaaattcgcctcggcgtacattttcttcacctcgtcgaacttctcgcccagccccagagaaaatgcctaaattttattttatttttgtaacaaagtcgccctatgcctggaattggagattcgtatattgacccccggggatggcgtggttgtacacatccgagttgccacttttcattgtcaccgtgcattcgaagggttggtaaaattgacgtgccgtctcccaataagcgttgtatcgcgaaatcgagtccatttccaaaccttaatttgagttatcatagatcaaataagcatttgagaaccggtggagtgcggtgtccgctgcaacgaagccacaattgcacccatcgaaggctgagaagtcattccgctcatcgagtcgatagccgcgtctatcgcgtccgcacccgcacgggcacattcgatcatgctggccacacctgcaccagaagtgtcatgtgtgtgcacgtgaatcggaacatccgggtgttggtcacgaagtgcagtgatgagaagtttggccgcttcgggcttcagcacaccggccatgtcctcaaaaatgaaaacgtgtcaattggaaaattgctgcccatccgaactttaatcgacagaatgtgcgcattcgcattcacaagctgtttggccaggttcagatagtattccaaattgtagcgttgtgcgttcgggtcggatacatcgccggtgtacgaaatggcagcctcgacaacccctcccgccttcccaacggcctccatgccaaccaccatattcggcacgtagttgagggaatcgaacactctgaacacgtccatcccgctcttgacagacaattcacaaaatctgcatatatgtcagagggtaaaagccacctagcaatatatgaactcacttgtcgagcacattgtccgggtatgacgagtatccaaccgcattggcaccccgaaaaagcatttggaaaggaatgttgggaatcaacttgcgcagcaactccaaccgctcccaaggacattcgtggagaaattgcatggcgacgtcaaaggtagcacctgaaaagcgaattaaatatttaagtgagttaaatgctattggttcataccgccccacatttccatagagaacaaattcgcaaatttgtgagacacaaacggagcaattttcgccatgtcgtaagtgcggacgcgggtggccaacagactaaaggaaaggaaaagtcagcaaggacttgcacctcattttctcgcacccactcgcgtcgaaaaaatcaaatttaggaacagacctttggtgtgcatctcggaaggtcgtgtccgtgatcatgcaccctttgttcgctcgcaaagccttcgcaaatgcttcgggtccttttttcaccaaaatgtcgcgaatgccaacaggcggttgatcatgcaaacctgaatgagagaaataaaatgaaattggacaaagaaattttatttccgttacccgccggaacgacagggacagtcggttggacatttttcggcttcatttcggtgaccaatggagtaagagaaccgttgaccttcaactgtcccaaataaaacagcagcttctgtgccctgttttgactcggtttgaagctgaacagttcgggatgttcgtcgatgaaatacgtgtccacaacgccagtgcggaatgcgggctgttccagcacattaacgaggaacggaatgttcgtctttacgccccgaatgcgaaactcctgaatcaaagttgtccaaaggatggattatttaaactaatattataaaaagttgttgggtcactttcaatgcacggatcagcttggccgaagcctggtgatggtctcctgcccgtgcgataacctttcgaaaaatgaattaaaacaatctctcggattgtcgccaaccttaacaagcagagaatcgtaatggggagaaatgactgagccggcgaaggccgaggcaccgtccaagcgaatgcccattccctcgccactgcgaaacacttcgatctgtttgtgaacaaagcaaccaatattgcttttttacccagcgatcagtcactcaccctcccactgtcaggctgaaacccccgtgccgggtcctccgtcgtaacacggcactgaattgccgccccattgacatgaatcgagtcctgacgaagattgatgtcctcgagagactttccctcagcaatgcgaatttgagattggacctaaacgaaaagtaaaacataatcgaaaagaaaatatgtaataaatagtaaatataccaaatctacgccggtgatctcttctgaaagcgttcaatgaaatgtaattaaattattttccaattgaaaaacgcacccgtgacggtgtgctccacctgaagacgtgcattcacttccatgaagtaatgattccccttagtgtccagcaaaaactcgacagttccttaaatttttatgattttacagaatcatttcgtgatcagattcattcgctacactgaccaacgttttggtacccaacatggcgtgtcaatttcaaagcatcgtccaacattcgctgacgtattgccggatccaaaacaggtgccggtgccagttcaacgaccttctgatgccgtcgctgcacagaacagtccctctcgtacaaatgcaccaaatttccgtaatggtccccaattatttgcacttcgatatgccgaggtctttccacgaatctgaaacatcaaacatgcttatttgttattgccatagccgaataaaggaagttgtacttctcgacaaacagcgaaccatcaccgaacgcggccaaagcttcggaaaaggcgcggttgaacgcatcttcaatctgtgaaaacgaatgatcttcgaaagacggtcacagtaaataatttaaaatgccaaattattacagtgacccgctccccattccgccgaccaaaaatggcgttggttcctccatttgcttacctcttcctctttttcgattttgcgcattcctcgccctccgccaccgtacgccgcctttacaatgaccgggcatccgtactgttgcacaaactgtttgacttctgcaacagttgtcaccggacctggcgtaccagggacgaccttaaacagggcaataatgatgaaaaagtactaaatattcggtttgaataactcacattaactcccgcttcgatggctgcctgacgagcggcgacctaaaaagggcggtaagtatattttgaaggcgctcctccgaactttgtctcccattctgcgcataacttccggcgttggaccgatgaaaacgatgccgttgtctttacacgcctgtgcgaaatcggcacgctccgacaggaaactaaaaatattcaaagtgtggaccgatgatcataacagtccactgacacacccgtagcccgggtgaatggcctccacatcgtttcgaacggccgtgtcgacaatctgttcgatgttcagataagcagcaacaggcggaagccctgaaaggcaaataggtttttgatttgtaatgaaaggttgaggcaagacacccacccgtcccgactaaatacgcctcgtcagccttgtaaacgtggatcgaacgtttgtcctaaagaactaaatgtcttataacaccaattgttgttcaatggtacggacttgttctgagaaaatggccactgaagttttgttcaattcggtcaatgctcgaaacactcgcgtagcgatttcgcctctgttcgcgaccattaccttaaattaaattgcattttttcggaaataaattggccagcgtaatgcctttttgaattcgcggttcggctgcgaggaattgcatctgattggagtgaggatacgacatttcaaataaaagcgccgagacggactaagcaattggcatcgaaatatagacattttctaaagataaagtggagaaaaacaaatgcaaaatgggaccaaagagtaataattgtgcaagaggacaaaaaaataaataaataaaggcgaactgatgggggtgggggtgaatgggaagggagggaaattcacatgaacggatgaccgaccgtcaaaggctcgcctcattcattggacacaccccgcccaaatgagaacgtcaaaatcagctcattctccccatactttcagtgcccaatcaccgctcttttcccaccgaaagattcagatccaacagttatttgaagccaaagagtaaatcaataaagcaacagtggtcagaacagaatcctttggtcagttgttaccgagtaatcggatagaacagaaattggttctttggcaacaataaatgatctgggcaatgagaagtgggcgggggggggggggggaagagatgacagaaaaaagcgatttaaattaaattatgagttaaacgggaaggcactcttcaaattgaaaggaaacgccgacggatggaccacaaactgttgttgttgttatcagctcaaaagagaaaagataaactgaagagatgatggatgataggtaaatcaattaattacaacggagagaataaatggggaagggtgaaagggaagcggacaaaactgaacaaatgaaagaaatgcatgcaaataaaaaggaaataaaataaggcaacattgaaaaggagaaactgccaatgcaaccggtaaaataaacaaatggattcatccccgagtaaacactttgggtaaattctttaatgaatcgtagtacaaattgtttgacggaaaagcctattctcgaataggatgataaataataaaaaaataaaatttaatcatttcttttttgcacattcccttccgatcactggggtttttgtggtactcgtggtcaaataattcagtgggacaattgttttgttctttcagttgtcgtcagattgcgagtcgggcgaatgcattggcgacggtgagtagagaccgctggtgatttctgagaagaaagactcgtgatcgttggcgtcctcttcggattcctgaagacggattcattcaaaagtccattcaatcatcagttttaaaaacgcacaactgaatgtactacaaagttggccaattcgtcgtcttcttcggaagagaggtcggaaacgaaggctctgtttgacctcagcgtctgctgaattggtgcaatatttgtgcttaaaaggacaggacggacctgtccaacctcataataaaagtcgaatcgttgcaatgtgtcgaggtcttcctccgtgtccgaatccatcgacccgtggtcgggatcaccgagaaagtcgggaagaatcgtcgaaatgcgctcgcgttttttcggattttggtacgagtcacgcaaaggcagcccactccaacactgacaatgagcaaaaattataaataaattcttttttggattttcactttaatgattttctcgacaccgcaagacaaaagcaaattgctgcgtggtccgtacttcacatggttcacaatagagcgatggccctccaaaacggagtgaacattgacagtgccattggcgaaatcgtctgaaaagcattgcaaagatatagaaaatgcctaatttttattcgaaatgccccactaaccccaattgctcggcactttccacacgtaaatattccaatcgtcacttcctgtgaccaaatactgatcgccagcaaaagagcacgattttattgtgcaaatgtttgagtattttgggtctgatagccgcaaatgctcggaattttgcaactaaacaatgaaattcggaatttggcaaatactataaatgtgattttgtacattgaaacaaattgggttggaacggctgatagcacaaaaaagcaattcacctgaaaatgaatcactttccgttaggaataaaatgctttaaccaacccgagggggaccaatcggcacaaatagcgcttttcgtgatttttcccgcctcggcgtaagtgctaaaaagacaaaagtgtatttaaattaaggacaagcgatgtctgattgaaatacctatttcggcatttttgttacctaatatatagcaaaaaaacaaaaaaaaacaaaatatcccaaaaaaggattccctaaaatatatcatttcttggaaaaaattttggtttaaaattgtccttattcgaaagaaaatgttaaattttttggtgcttgtgtgttatttgtgggcagattttcaaaaatttttatgtttttcgctnataacttttttctttggcatccaaatccaagattgttggtatcattcgaaag

SEQ ID NO: 4399 - DNA, 1705 bp, Heterodera glycines
taataatttcatttataaaatgaaatataacaaagttttctgattaagtttttatataacaaagtttctgattaagttttatgtgtttgctatcaaaaattgttaatatttttttattaactagttttccacctatttggggatttttgtacctatttattaactatttcgcgatttttcttacctaaaatcccagccctactaatgagtgttttcaaaattttgaagtcggccctctttggcatttgcaattttctaaagattcccctgaatttgactgctcaaaagccattttcagtccaatcaaaattcacttgttgctcatcctcaggtcgtacaccaacagccccgtctttttgttgcacactgccactatgttatggttttgcgggttccaaacggcacaaaaggctgtcccttcctggcgcagtttggtgcacaatccgtcgccctcattccctcgcaaatcgaacaaatacacattttggtcctccgaggctgcagcaattacattgtcatcggagggcttaatttgctcgtttatttgcatcgcctaattcaaattacatgggtcgctatgtaataaatggttgagctggccctgtacgaacgcagtctttcccgcgttttgatgtcatgcacgtgcattcggtggtcattgccggccgagtaaatgcgctccgtgtggtgggaaaagcgtaacgaaaagatgttcgaatggtgaatggctttcatgacaacacagttttctgcaggcttttcgctggtgcagcagtcggccgtcctccacaaacgaacccgcaaatcatcgcctcctgaaaagtgccgaatccgaccccatccccttgtcatttatccggctctttaccactaacaatccattcttcggtgggcgaaaagtccacggcattcacacagccggtgtgtgcccttaaatcccgctggtacaacaagccctttctattctgttcgaaaatatttctcatgcacaaaggtcgtccatttatttccctttcgtaaatcagtccttccgcagtctgtgcaaaacaattgaattttgataaggccgagttagccatttttactggagaagaatttggcttgattagtttaataggcgccaattcatcaattctgatcagtcaattaatgagaaagcagagcactttttagcaatcaaaaagatgaaatcaaacagaaaaagaattttttgtcggtggaatctcgaatttcttaacatcgatagaaatggacagaattggaaattatcgaatactcaaacgacagaatttaatacataaaacagacagaccgaaatgaaatttcgattcacacacacacacgattgttgttaaattctaaaaaatatttaagatcggttaatgagaagcattccatccatcaaaactttctcaggttcaaacagctaaaccatcaagctgccattccaagttctgaaaattggcaaattgcttttttaaaaaatgcggtgtctattatttacctatttttgtttcttcagcgaaatagcgaacgtcaaactcagggtcttcgcacattttcacaatcagtggtttaatctccgtgttcatgaccctgaaacaaggaaatagggacccatcactaaggagaaattaatttttggtttttttgaagttttcgaacccatactttgttattttaaaattaagtattaaattaatta

SEQ ID NO: 4400 - DNA, 3521 bp, Heterodera glycines
acacaaaaaataatatggccatctttcacaatttaatagtttatatagttttctctctccgtcaggacgccgatttctacaccctctaatacccggattttgagatttcttaagacaaaaacgaaatcttttagttttgcatttttgagaatttggatttccaataataatttaaggaattccaaaaatcaagagtgttcatcggacgaattctatttttttttttggcaaattttatttgaaggaaccgattaaattccatatttttgagctatttcaattaagaataatgctttgttgttttgatcaaatttaagctgccagtaatttttaaatggataatatattggcgaataaaaaagtgctaacatttttgcgtattgcaaatgaactttgtggtgttgggaaagaggccgcttttgttgtttcgatggcttgcgctggtggacacattttacgtgatttggcgcttattccggtgagtggtgacggtaattatatgactggtaattttgagaagaaattaaaattttttgtaaaaatagactagaaaatcttggtggaatattgtcaatgcaatacaattcgatgcaaaaaattgaatggacgcataaactgtacttgagccgttacagacccgagtccttggaacaacacttttgttcgctgtcagtcactctttaaattacaggagaatctgctgaagttgcttcgtgagcctggagatgatctcgagttcgcttatcggctctatcagctcacattcaacaaaaagggaaagaaattattaaacaaactttgtcacaacagccctgtcaaaattggcaatatcatgcaaattgctgaaatggcatccgaattggcaaccaattacagttccaactgctcctacattgaacatcgtcgtattgatgaggattgccgagcatttcgacccgttgatttggtttgaactttaacaataatgatgtgtgtttagctagttgtaaaagctttcagcgtaacgtcaacaaatttggttttttggtaatttcggcactttcatatgctttttgccaggccttcgatgaaaatatttgcaatttttacgacatttacggagatgggaaaggctttttctacaaccctttgctcggttgtacagttacggtacggtcatcttttatttaactatctgtttttttgtctatttttagctttgtgacaatagtttcgctcgacaaactgataaatggccaaaaataaaccaaagtcgcattgtttcgtatagattctcgaagaccaccgaagacaaaaacggaatgttggaggcattttttgtctgtcgtcttccgatttcgctcattcatcaatacccaatcactgaagtttgttttagaaatgctcactttgtaaagtgaaattgagaaatgctatattgatgtagtttagctcacttacctattgttagaaaactcaataagttttggggggcatacaaatatgctgatcacgaattaatattagtcccggttctataactgttttgaagttgtcagaccctaacaataagaatggtagcgattacttctctcaccgagaggtattaaatgaagaaaatctgagttaaccttattcttcaattttaccaatgctgatgactattaaacataacagctcaatcaattcaaaatcaacattggcccaatggttgctgagaaattgctgtcctctgactttgttaacaatctttgcgagggggaccttgccagcttccaggggtacaacccggccaccggccttttgtccatcgcctgttccgcacgttccgcactcaaattgcgtcaactcaccgacgggacggtgaatagtctgtttgaactgctgaacacaatggacaaattgcgatggttcgacgaagaatcgggtgctttggtaggaaatctttcccttactttttccgtgattaatcactgactattttcagatttcctttggtcctggctttcaaatttctcaactgaatgcaaatccatctgagagggagaaggacacaatcgtcgtttcgtacatcgactccttcgaacactttgagcctatggttcaccaattgactgagttttctttgcagttctgcgagagtcgagtatttagctaacatttgtttctatttacaattggtttctttgtcatcttttgcagaactgtaagcctttgctcttcaccgattgtaagtctcgtcgctgcttcgtcactttgctcgctccgtccatcatcaacgacctcaagtcgtccattgactcacttttgcaattttttccgggtgtttcggttgaggtgtgttttgcactgtttgtatcattcgttggcttttgactttttttagaccaggcctggcaatatttctgaatattttgctggttataatgccattaggtcaagtggaagcgttttcgacaactcttcttatccgaccgattgctgtgcgatttgttttggcaccatcgatggccaatttattcgcctttccctttgtggtcatgtttactgtgacgattgtttcatcggactgctcaaaaacgccatccaatttcccgtcagttgtcaatccggatgtttgtatcagattctgttcgaggacattgcggttagtcatttgctctgacgtacaatacggatgccatttaactgttttctcaatttgtccatgattaattgtaaacacaatctttcagttgattttttcgcggaactttcgcggcgttgacgaaattcagcaatttttgacgccggtgttccgtctttctttgcactctttccttctcgcgcaccgtgaccaattcgtgcgctgtcagtcggagggctgccattgtttgatgccattgtcgaagggaacggcgaatggagccgttggcagtccgatgatttgcttcggttgcaaaatgaaacgctgcacattgtgcggggaggcagtccaccaggaaatcacttgccaagaggtaattggagcagcaacggcggattcatctacctaaaaatgtaatgccatttagcgacaagaacaaaagttcagcatcgaacatccggacctctctgcatggaaaaagtgaggcggttgaaacaattcataccgatttcgtttgttatataataggcttgcagccaaatttgctaattatttctgacaaattataaaatttctttcatttcccgttttgtgttcaagtgaacttccttctcatcgccgtctttgtccgaatgtccattgtaaaatgctgattgaaaagggtcccgggtgcaaccacatgtactgcaagcagtgcggcgtccacttttgttggctttgcattaattttcaagttcgttggttcctaccatccatgaaaaggatatttgtgacataattttgtttttcgatttgttaatcgttaatcccccccccccttaggctggaacaactgaagaagtctacaaacatttgcggggaagttcaccgttccattggcgagccagggttctttgacgaagtacttttacccttt

SEQ ID NO: 4401 - DNA, 3233 bp, Heterodera glycines
ttggtcactcgttgagcagtttggctacgagagggccgttgcggtgatgaacgtcgaagtggcaccggacggccatatggtgacggacccattctacgcacaggcaatgatggtgatcgacgcgttcagtgtgtacggactaagggaggacgacgaagagacgggcgacgacgcggagcgagaagacgacaatccgttgcacaaatatcgtgacaattggacggcgatgttcaaccgattcaaaaaggtgctaatcatacctgtccatggggggggggggggtaagagaagagaagcaggaaggggataggcgtcactagggaaaattttgaaattttgagtacaatattttaaattttcgatgttgagccagttttttaaaagaaataaggattttaggagcccgccgagaaaaaattttttgagtttatgaaatttctaatgaacattagcccaaattttcagaaatttccctctttttcccctatgtctaggattttgatgggcacgtacgacgcgacaattgaattcgaattgaaatacgaagaaatggagggagtgaaagtgattcgcaatttcattatttatttattgccgttgatttcctttttcatcacaaatttttgctccattttcaatttctgttatgaacaaataccagaataaaacttgggaatccttaaactttgcataagttttgtcctgcacattcactggcttcttcagtaaacagctgttcttcattcgtttcccatcgctttgtccgtctgcggacactccgccgccccccaaatgttttccggccgatttccaatcgatcagaatttccaattctcaatttccatccgccgatcgtttgcaattcgattgcacattttcctagtcaagatttctccaaagttttggttttaataaattcttcctcccccattattattaccgcaataattttttgtttatgccgtggaaagtggcacaaatggccaatcaatggcacttttgctggtccgtctgccgtctctctcattgccccactctttctcccctcattagtgtcccttctatttaataatgcccacctttttgcccatttcctttgggcttccgctcgcttctttcatttccgttttggcttttattagcaattaattcttaatttttacaatcgattagtgttaaagtaattagtgagtaagaacaaaagctttaagcctgaaataagaagaatttccataagaattttccccacatgaccatattttaaggcctttaagttaattttaaaaaatatatgaaaaaagcggcgattggcgccgccggggattaatttcctcttctgtttccttttggattttgactatcaaaatcacaaattttcttacttaagattgtcaataatgtttaataatttggctaattaattaatttaaaaacgaacggaattaatggccgacaaagaagaaagtgccggaggggaacaggacgacgtgtcctttctgagaacggtgaggacaaattctgaatttaattttaaatggacagtcgccaaattaaaactgatcagtgaattgtgatttgtgtttgaagtattaataaataagctgtggggccgtttggccggggggggggcttttcccctttcccccgagggtccgcccgcgccaaagcaacaaaagcacttccgctcactgaagaggctcttcgcccacccaaaacaaacagaagaggaagttgagttaagaatgtgtcttttgggggcatttgtgcagcaattttcggatcattcggtcgttcggtcggcggcgttttgacattttgccaatgagtcgattttttcttctgaccgatagcagtaagtgtggtgaggaaattgatgagacaattgatgatcagcaccatcagcagtttctctcaaaggtctctctctccattggaattaaaactttttccctttggaaatgcctttctttttcctccatgccattgttttacatttacctcccccctctccctctcgcccagggtgacatcgtctgtttgacctgcttggtatccaacagtcaacgggatggggcgggtgccgagtcggaaagggtttgcctttcctctgagggtttcggcaaccgaatgtgcgcgttggaaaatgtgtcggatagagacttccctccggacattgcctcgtgcatgctctacatcgacaacgctctgtcaatgcgagctttgcaggagatgatgaatgcggagagcggcgaaatcaaagggactggtggcaccggagggcacaaaacacttttgtacgggcacgcggtacaactgaagcatgtccaaagtgaaagtaattgcggcaagacatggctgctgggatttggggtcaatgtcgatgttaattgccaaattgttcattagtaattaccggtgctaatgatttccctgcgcttttactcttgactcttttctttgcccctttttatgattgccctttcccaagtgttcttggcctgcttgtcctcgtgttcctccaatgataaattggctttcgacgtcggtgttcaggagaccaacgcgggagagtcctcctggtggacggtatttaaagccttttttgtgctgccacttattcagccacaaaatcagattcatccggccagcaaacagcgatcggaaggagagaaagtgcgcgcgggggacgacgtcattctcgttagtgtggcaacggagcgatatttggtcagttggcacggcacaataaagcaaaaggcggaccaccgaagggtctccaaatcgctgttcccaccccaccccaaatcatcgtttgtgaatgccgatggcatccatatttaagcacatgacttccatgggtggcgagcagtggggggcgctgccaaccgccgtttaccattctcattttatggtaattgcttcttttcatcaaactctgtggaacgtcacttcggtcagctcgggaagtgttcgtattcgaaacatgggtaagggaaaagggcacagaataaggacaatcgggcgaagaagggcacggggggggggggaagcggcacattttgacgacgaaccgaaaggacggcatatttttaagcaaaaggatgtcactccttttgggggaatgaagtaaaggatttggtggttgtttaggctctttgttcggcaacgacgtcgtccgactgttccacggcaacgacgagtgtttgaccattccggagaatggagcgaatatc

SEQ ID NO: 4402 - DNA, 2386 bp, Heterodera glycines
agaagccggacgagaaggaggaggagggcatgggcatcgccaccattcgctacggcgaaacaaacgttggtaactcaacaaaatgaggggggaaaggagggaatacggcactctccggggcttgtccaattcgaacggcactcactcgaaagggcacatttttggtttgactgattgttttcataggcttttatccgacacgcggacaaagaattgtggctgacctatcaaacgttggaggtgacaaagaaagggctcggcaaagtggaggagaagaaggccattgcccacagtgaaggtcagcaacagaaagaatgaggacaatgggaaatgacggggaatagcatttgatcatttggactttttgatcattgcgagatggcatttgatcattaggaaatggcatttgatcattgggacttttttggcatttgatcaaatgcggaaatggcatttgatcattatgattttctttggcattaccccttggcatattctcccaggacacatggacgactgctacactttcttcatggcgttggaggaggagagtatgtccgcccgagtaattcgaaagtgttcgtcggttttgaaccgatttttgaagtaagtcaaaggaaaagcgaatgaacaaacaaaacactgacttttaaacagagggatcgaaggattgcaaacggaaggcgaagaatcggtggattggatgagagtcgatcttcaagaagtgctgaaggtgggcgaatttagcaaatttggacggaaattggagaaaaaccgaaaaccattgtaatgacaatgaatgacttggcaaataccgaacctatcatactaccgtattccctgttcaagagatgcatactgtctcactacactgatgcatttccgggaacactgtttggctttaatgagtgagctcttttagctgatgcaagacctaatcacttactttgcccaacccaacgacgaattggacttcgaaagtcgccaaaatcgtttccgtgcgcttcgctcacggcaagatttgttccaggccgagggtgtgctgaatatgattttggataccatcgacaaattctccgttatggaagcgatgccaaactttgtcggattaattggcgaggaaaatcaggcaaaaaacgaaatggaaaagtacgattggtccatttgtttagctaatgtgggaggaaatctccacttatctctatttgctggtggccgcgatgatcaaaggaaaccattcgaactgtgcccaattcgccgcgctgcttcgccttgattggctcttcggccgcctgtccaaccctcagtcggccgagggcattttggacgttttgtactgcgtgttgactgagtcgccagaggcgttgaatatgatcaacgagggacacattcggtgagggggggggagacaaacggacagcagagaatggcactgttaattcatacattgttcttttgcagttcggtgatttcgcttctcgagaaagtgggaagggacccgaaagtgagtgatgtccaatttgatcagtagtttgatcacaattccctcttatctctctctttcactgatcactcattttctgatcacttttatcgttttgctgtcttttcccatttgtccactcatttcttaatgttcttcaggttttggatgtgctatcttcgctttgtgaaggcaacggaatggccgttcgaagcagtcagaacacaataacggattatctgttgccgggaaaggaccttcttctgcagacccaaatgagagattatgtggccaggtgggttttgtgccgttgcccatttcggcccattagacagctttccttactgtcctcccctcacattagcttaattccccattaaaattggctgatcattcattatccttctcccaatttgtctaattggctcatttcattttttgccttcagtatgatgccaaacattctcgttggggtcgtcgatggcagctcgttgttcaagcgttggtacttcgaagcggaagtcgaacatgttgaaagctatgccaaccagcagccttacctgagggtcggctgggccaacaccgtcggcttcaaacccttcccggggcccggcgacgggtggggttgcggcggcgtgggcgacgacttttactcgtacggctttgacgggatgaatatgttttgtggtaatttgcacgatttgttgagctaattaacttccccgcgaccaattaagcgggcaaagcgcggcaagtgggccaccgattgctgcgcaagggcgacgttgtgggctgcgcgttggacctgatttcgaccgaaattcgcttctctctcaacggcgaggtgagtaaattggcaccaattggagaaagcaaaagtagaataatgacagcccatctact

SEQ ID NO: 4403 - DNA, 1617 bp, Heterodera glycines
cgggacgcatttggccaccaaatggtccacaaaagtgtcgatgaaagaaacgcgacaaaaatggcccggcatttgggcatggaatggagaggctggaaaaaaaaattgtggagaaatcagacccaagtgacttaaacaggggagcagctctgtatttccaccccttatcccgacaaatttattgaaataattgaaaatttttttttaattttttacaattagattttttagtaaaagttaaaaaaaacagaattttttaattacaaaaaactacttaaagaatcaaatatattcgttttacaaaaaaacaaaaattttaaaaacttttttttaaaaaaggtttgtttttttaaattaaaaaagttgaaaaaacaaatttcttttgaatttttaacagatctttacaatttcaaaatgttagagaaaactataaaaaaaaatttcagttacttttttaatgggaaactcccaaaaaatttaaaaaattgttgatgtggagagagacctagtgaacccataaacatcgggtcgggtttcgggtcaattaacaaattttaataatatgttcaaaatcgatatgaatttttttatcgaatgaaaaatcaataaaaattttctgcgtcgcgctttttcaatgtaaatttcccgaacaagaggaatgtctggcgatgccgataggcgccgccgggaaaaattttgtaatttataatacgatttgtttacagattttgccaaaaaaaataaccaaatctttggtaaatttgcggttttaggctgtttaaaaaagaaaaaataataatttttaagtcgaaatattttttattaatttaatttcaattgaaagaatttgaagaaaatataaaatattctatcccagtggggaattgaacactagcgaaaaataaagaaaggcagaaggtatagccaataaaccacacaaccataagaacgaacactttaaatgtaaaataataatttaattttttttcaaaaatttctccttctccatcaatttccttatccacctaattttcaccaaaacccctttcttaccagtgcttatttcgacccgaaacccgaccaaaatcatcgggtcgggtttcgggtcgagaaaaatgtcgggtttcgggtaacccgcggcaaccctgatgccaataatgttgaaattggtcatttataagaaaagttataaaatgtcaaaatgcgccgcattaaatggccccaaataggtatgtttttttaggaggccaatcgtttgatgcgagaatgtgtgcaaatcgttgtcgcctgttgcgatgcgcccgtttcgaccgcgttcgacattgagggactttcttggggtaaattaattttataatatatatatttatacgtataatatatataaaataataatatattatctgtatttttgtctgcggaaagttgtcaatttccacgaattatttttgtcgaaaaatgcctcatttatttacgtatacattttattttcaagttttgaatgcgaatcaagctcagcttcctctgattgtttctttggtggatgaactcttgttttattttttaattttggcatttccaattttaaaaataatttatacgactgcataaatttct

SEQ ID NO: 4404 - DNA, 4268 bp, Heterodera glycines
cactcatttcggccctttcaaacccaaataccccaaccctttttggcctgaacttggccattgccccaaattcagagctcatttgatccctaaaaaaagggaggggaagcccggttttctgcaaggctcgcctgtttcctcatggagcattggatgaagtcaatgccgaaattgattgtctttcgaaaattgggcgcaattaacccgattgagttcagccattgggcggctccgattttggcagtgaagaaaaagagcggaaaaacgcgagtctgcatcgatttttcgaccggctaaaacgatgcgatcgaactgcatcgtcatccactgccaaggcctgaggacatctacaacgcagttggcggcgctaagtttttctcacggctcgacttgcgtgatgcctatctgcagttagagttgtcggaagcctcgaaaaatctttgcgtgctcaacacgcaccgaggcctgtttcagtgccagcgtttgccgtttggagtcaaatcggcgcccgcgatttttcaaggattgatggacaaaatcatcgccggaattccaggtgcattcgtctatttggatgatgttgtgatcgccaataaatcactgaccgatcacacctcaacaattttcgcggtttttgacaaaatcagcgaatacggccttcgaattcaattggaaaaatgcagtttccttcaaaaagaaacgcttttcctgggccacattatctctgaaagtggcattcgacctgacccatcaagggcagaagccattgagaaaatgccggcaccgaccgacaaatcaacgctccgatcattcctcggcgcactcacttattacggaaaatcatcaaaccgatgcgagagctcagaggcccgctggatgaattgcttaagaaggaggccaaatgggaatggggagttgagcaacagaaatcttttgagaaagcgaaagaaattatgctttccgatttactgttgactcatttcgatccagaattgccgatcgtagtcgctgccgacgcttcgaaagatgaattggcgcgacgataagccacatctttccggacaagagtgagcgcgtcattgaacacgcctcttgtaccttcaacgcggcacaacaaaactacagccaaatcgaaaaggaggcacttggcttggtcttcgcagttcaaaaatttcaccggatgctgtacggtagaaaatttacgctgctgaccgaccacaagccccttttggccatttttggatcgaagaaaggcattccgatctatgccgccagccgacttcaacgttgggcgttaatactctccaattatgaatttgacataaaatatgtcaacacaaattcgtttggaaacgccgacgtcctgtcgcgactgattgcaaactacccacggcccaacgaagacattctgatcgccaacatttgcgaaaagacagaatgctacgtcaacttcgtttttcaggccaaagttgagcaattgccgatcacggccaaagaaattgctgatcagacgaaaacggacgaagtccttcaacaaatcagtaaattcaccaacaaaggatggccacaaaaatgcgaagacactgatctgatgccattttatccaaaaagagaccaaataaccgaaatcgatggttgtctcacttatggcgaccgtgtaatcattccaacgacacttcgcagacaaattctgaaatcccttcattttgcccatccaggaattgttcggatgaaggccattgccaaaaaccatgtttattggccagggatcaacagcgaaattgagcgcactgtccgccaatgcgacgactgtcaaatggccgcgaaaaacccaacaaaggcacaaattcagccttggaaagcggcagacgaagtttttgagcgcatccatctcgactttgcgggcccatgcgaagacggccaaacgtatctcgttgtcgtcgacgcctattcaaactggccggaagtttgggagatgagttgtgcaacaagcgaaaagaccgtcgctatgctaaaatcgttcgtccatcgaatgggaattccccgagaaattgtgtccgacaacggaacacaattccgatcagcggaattcgccaacttctgcaaggaattcgacattcgtcacacgttcacgccgccatatcacccgatgtcaaatggggcggccgaacgattcgtcgacatcttcaagagggccatgaaaaagtgccgaaaagaaggcaaagattggatccaaaaagcacttttggcctacaggacaacgccaagtgcagtgctcgacggacattcaccagatgaattattccttggacgccggatgcgaaccaaaatatcattggtccatcccgccaatcagaaaattccgaaagtggatttgaaaaattttggaaattttcaacaagattaccgtcaaaatatgaaaaggcaattcaacaagaaaaacggcaccaaaaccatcactttccgaaatggagagccaatgttcatttggaacttgaagggcaataaggcaaattggttgcctgcgaccataattgagagagttggcaactctccgacttatcgaaccgatgttccgacacttcatcgcgcagtctaccgccatgccaaccaaattcgccgccgtttcccagtggacttggagacgccagaaattggccaaagaaatggacacattttggccggggaccaaacgaatcgggcccccgttaaggagattcaaaaagccaaatctccagttggccaatgtcaaaatgcgcagcgaaaatcagcacgcgccaagagggcacctcagcgactggacatggatccatcaaagccgaagtacgacctcgtccggccatgaatctcgcgcaggagggacttttctcaagaagggaggtgttggataaggaacacacatattattgattgtatttccctttctctccctctctattgtctctccctctgcccccttgaccagccccataaatatgtctccttttccctcactccgggcattctcccattcattccaccatttcattattttatttatttattccctgctgtcctccatatttatttgtttaataaattatttatttatttatttgacaacattgattttggtcgaagaccaaacatttttattgttgtagcaaatacacaacaaaaatgaattcaaattttgaaatgcttttattttaaattacaaatttggttaatcattcaggtctcgtggtacggcatatttaattcgttttttaattacattgtttcttattttgatgtgataattatgagtcatttttcaggttttttaaacccattcccgcttaatgtgatagtcggaaattttttgctgttcgacagtagaatttaaaaataatcaagtttaatatttatttttatatattcaaatgacaaaaatttattttatttcactaactttttaatttgaaatttaatttaaatttctccagtttcattcttctcgagaaattcagctcaaaattcgatttgagagctttcgattgacagcatatttgcagggattcacattcaccttcaaaatttgaaaatacaaaataattagcatacctaattaacactttacgaagcaattaaattttaaatcgcattcgcttaggcaatttggttgagcagcataacaaattaatgactaataaaaccaaatgatgaggtgaataaccactgaaaaatattttattaaagtgaggaacatacagaaaataaatgtgccgacttggtgacacaattttgacatttttgtcaattcgccattttagaaaattgccatattttggataattaagattgtgtaattaacactaattaattaatttatatttttttgttgtctcaataattcgcctgtttagtctcatttaatctattgtaatccataagctaattgaccattaaagcttcccgtacagttgaccgatttataatttttaggaatagaaaaatttaaaacatttcgccaaaaatagacaaatactgtaaacaaacagctaatcaaatttgtctttgttctgttgctgttcattcaacagcagtggagtgctctcctcatctctgatgccgttgctcggggctctcttgccggacatctgtgaaaattggcacgacaattgaaaagccaaaaaaaccatggattggaaaataatgccagggagagggacgaatcgcaaaaactcaaattctaaccccccttgggggggaatcagtaattatttgataattggtgtctctcccta

SEQ ID NO: 4405 - DNA, 4237 bp, Heterodera glycines
gaatagcagagcccccaccaggctccttctcgtccccggtcgcgcctccccccttaaatgtcggactttgcctcccctgctgcccgtccattgtaaatgcgtcaatgttctcctcataccgtaggtcttgctgtgccttttgggtacagaaacgaactgtaaaatttaattttaaatgttcgcataatttggcgaaatgtccgaatttctttacgtttattgcgccatgccactttgagtacaatgtaaactgaaagattaacgagaaaatgacaatttcaaatgagcaaatttttcattatttattaaaatttattaaaaatttttaatttaaatatatattaattttattattatttaacgttaaaaaaaattaatttctttacattttgtcagcatatttatgggcgacggcgttgccgaccgtttgttcatttgtctgatcagaatggcacgcccgaacttccattccttgtcagattgggcctgaatgcgctgataggtgtcgctcatcattgcgatcagcaaattgatcaacacctgcgggacaaatcaaattatttcacaattttcaaatttaattattatttttttaattgatgggcacaattgcataagtcatacaattagaagttaattaaaccatattgaaaaattctcaagttttaattgcttttgataaatttttacgcgtccttggattttacggattttcaccgttatgtccttggaactggacatgtctatacttggaattgagtttggccgatccaagcccaggcactaaaattattttttctttatgatcacaatttatgccaaattattaataaaagatagaaattgtctaactgatacaaaaaatatttttttacaaattttatgatttttgcgttatattttattttggtactaaattttaggttttattttcagcaaatgttttcatttccctggtttaaaatggcataaaatattaaaagagaaaaaaaagtttttgtgatttaattaaaaaatattggataatttaaaaataataaataaaattcgcactcacaatcaatgtgaccatcatgtaaatgccgaacaagaacttgagcacaatttttgcaaaatcgggcaccaaatggagcgggggcctgtgttaaaattagaaaaaaaacttcaaaaaaatttcaaatttttcacatgctgtccggctcgacgaggccaaacagcgagaaaaacagcatttccaaggtttggctgggcgatgccaaacgcatcagttcggcactgtcctcgtccaccggttggtaggcgggcttaaaacaaattgaaattcaataccgtattcctaaaatatagcccgcccctaaattagtgcccccccccccccaaaaaataaagaagccgcacttttgagggaggttgaaaaatagagcccacgggggttctatttaaagaaataatctttaaaaaatttttatttcgaaattattttttcctgaaattttcttataaaacttgaaaaatttctaaattaaaaaaattaaattttttttccggatgggaaatggatacggggtggtctctgcaaaaattttggtggcttaagctaattaattaggtatattacttgaaaaatggaggtgacgtggagggtaaagccggcaacaaaaagcaaaagaatgaccagaaaacgggtcaggtcgtacatcaggtctaaacagcattgaattgagtgtatgcaacatttcaaaagtatattttatttttttttttatttcgtaactaaaatgatgacatttcggttttaattgccatgaaattttacaaattttactgcaaaaattgagaaaaaaaccaatagggcgacagtgattcttgagtagttatgccgaattttttgtcaaaaattattgccaatggttgtgggaattggcaaaaaaaataaaaaatgagattaaattgtcattattttatttcaagaaattattattggggaaaaaattggttactgtatttataaaaaataaaataaaacaaaatgaatgacccaccacggatgattattgcccatgggccgaacagatggtgtactgtaagaaagtcgagaaattctacaaaagcaaacagcagggcgaaggcgagcaactggtttttctggaaaatacacaaaattcaattcataaatttaaaaaaatttatttatttttgagaatttcgcatttttttcgtgcttgaaattggcgactttgcagtccttgaagaaatagaaattgtattttaaaaatattaaagtccttaaaaattcagagaatttgtactctaaaaacatttaaaaagccgtaaataaagaaagtttgtacttgagaaatctttttgtttccattaatttcccacttttgccctatttttgcgtttttttggtctttgaaaaatattgaagtccttaaaacaaagataatttggtgcgtgaaaaacactgaggtccttgaatacagataatcaagtacttgaaaattttttgaatttccattaaattgccattttccccatttttcagcttttcttctgttttttttttgctgaccaggtaaagcattgtgcgcgcaaagtgcagcttctcgtcgctgtccaaattggtcaaataaatggcgggccacagaaatgccaaaatatgcacagcaatggcaatggcggccaacaccaaaatcagaattttgaccacgccgaggcccgagccaccgccgacgttggacagctcggagacgaggttgccggacagccaaagcagcagcagccactccaccgagttcggcaccaccgaagtggtctaacgacagggagacggaaattaaacggaaattcataaaaatttgcaaaaaatggagctccaaggggtaaggtggaattcggcaccaccgaaatgaccaaacagagagacggaaaattagtaaaaaaaatttgacaaataacgtagggaggggcggaattcggcaccaatgaaaggcaaaaatagaaaaaataggaaaaaattcagaggatgagaaacgtcaggagttaagaaaaatggaatctaattatagtgaaaatttaaatgaacaaaaataattagcgtaaaaaagaaattaaattaaattaaatatttttatacaaaaatattatatattttttaagcttacttcataaattttgtgcgttatattcagcacgacaatggtcaacagaatggtgaaatacacatgagaaacgatgtggcaaacaaatttgataattggggcacgacctgagaaaagaaaattggggaaaaagtaattaaaaggagaggcaattaattaattaaaattaatccatttttaatgggtttaataaaaaattttaattttaccaatccgtgagtccaacggcagtgaaaagtaaaaccacgccggagggcaaatgagcacgaaaaatgcaaatgccacggttttgccaaaggaccaatccacacgacccgtcctgatcaaaagcgaatgttaattagacaaatccaaatattaattgacccgatttaaaggaaataaatgtaaaatcttttttttttaattttaaaccgaaaacaatttttttttgaaatttaactaataaattttgccagtaaataaataaatacgcatcaatttcctttctcaccatatttccgtgagatagcgctgcaccgatgcgtaggaaacaacttctttctaaatatatatatataatgagtacattgttttcataacaattcgttaaaaattccaaaaattttccactacaggcttacaaaaaagccctagtttttcttaaaaaaaggtccaaaattcggtcatttttgacaaaatctgttaaaaatcatccggcggcgccaaaaaagggatgaaaattgtcaatttcatcataaattttgttaatttccaagaattttcacggcttttgttagaggccggaaaattcaaaaaaattttcccggcggcacttttaggctccactggcggatggaccggaggaccacctgttcattttcgatcagtacgtccagcagcggcggtcctccggtggtccttggccttcagcaacagcgcagcattatatctttcaaaatgaaataaataatttgccgcattttcatttaatttattgcgactttgctgccgaaatgccaagcaattccacccgccaattctccccaaaaatggccccatacctctgcaaaattgggcaaaattcaaaaaaa

SEQ ID NO: 4406 - DNA, 2374 bp, Heterodera glycines
cgggcacagaagtgaatttggacaaagcaggacacgtcgcattcgaagacgaattccaaacggtaaaagccggaggaataaccgccgccggcacggccaactctaaggggagcaaagtgaggacggcaaaattggggggggggggggagggaagcggaaaacggagtggacgcagacgaactttgtgaatttgacggagtcctttcgcacattgaccaacgcgttcagaacaccgatcgaatcggtgacgcctttggccgagaaagggaactgaattcgaaaataaaattcacatcgaagagtgatttttagtcaatgaacatttttggctaatttaatcacgagtctcggttttcggtttgcttttcaaacttttccatttctcttcgactcaaccctttctcggcaaatcaatgcccggcacagttttctgaatcatcgcaccttcactgatttgctgcccaacagctccaagtcctgctggtcaccaaacaagaagctgaagaggggacgcaaatgcaatgggacagtcgaaccctccgcccttcggctcattacacttccggctttgacgaatcgtacagctcaccgcccatcagaaagtgcgagccgaaaaatgagccgccgccgttggcaccgctcggactaccgcgaccgcccgcctcgccgctgcccgacaaatcgggaggagccggcgcatggcgccggcggcgcctgccgaacccggcacggaatcggcccatttccgctgactctctgcacaatggaaaatgtgtaaaatccaatacttttttgtgtttttcatttaatttttggcaatttaactcgactccccctttacgggctcaaattcatttctccctcaaatcttttgaccaacccctgctgattattgtcgttccgttgctccaaattattcgctgtttgctgtccgaacggcaaaaaagcactgagcagaacgaacagtcgtctgttgagaacaataaaacataatcattcagagataaatgatacgaaatcaaatattttattctcccgtgcatttcgtctcaaaaatattgtaaaaacgcaattttcatctccaattttgcttcgaaaacaaatcggcaattgtatcattaacgtctagagattgaaaatttgctgcttatgcttaacaaattgttacacgaatcctttttcatttcaaacagaattttccgctttctttgtgtttatataaatcctcattttttaattctatcatttggtcaattttctgtacctaatccctgccgatggatttgtatctgcattttcgttgtcgttgtttctgttgccattggctgctccccgaaaagcgaccagcagttgtcccattaaaattcgttccgttttaattattaatttgttgtttatgcgataatcgaaatgggaggaacagaaaacgcataaccacgaaaaatgcgaaggaatgagtcgcagcagcgaccgacgaagggcagccggttcttccgatcagcctgatcaatctccacctacactcttttattcaaagatgtgctacttctacatatgtaatgttgctgttctgttcaattttttgaacatttagaacacaacgtcagaaaacatttaagcataaataattaaattctatttgattttaaagaaagccgaatcccggacaaaggcttccctaatttggatggaaacccataagtttctcgttgtttttcattatacctacaaaatatgtgcatcctttaacatgacaaattcaccaaggtagaaaattccaataattcaaatttaaattcgtttaaccaaatttagttcctttgtaattcgattaataatgttcttacatttaaaggggaaagcatcacatattattaaacataaaaaatgattgaaattactgtcaatgatcgtctgggcaaaaaagtgcgaattaaatgcaatccgacggacacaattggcgacctgaagaagctggtgtcagcccaaattggaacaaggtaaaaagtcatcgccaattggaaaaacttctgaattctctccccttttcaggtgggacaaactcatcctgaagaaatggtacaccacttacaaggtgagcaattgcgtaacacaccgttataaatatttaggccttattttcccatccttttgcttttcaggaccacatcactttgcaggactacgaaatccacgacggattcaattttgagctatattatcaatgacttgctgcgcgcgtgttcattacttttgtgatttacattacattttccctaataaattgcgctgtgttttagagaattttgagttgttagtttcgaccctaatggttcgaggctaatggcatatttatgcatccttcactaatcaa

SEQ ID NO: 4407 - DNA, 3197 bp, Heterodera glycines
ctaattcgaacaagaagtcgtaaaagtaaaatttttttctttttcatttttagtctaaaaatggtttaaatgatttttacttgaagcactgatgactttcagttcgtttccgtgtatttaaacaattttgaccaaaataatatgaaaacaaaaattttacttttacgacttcttgttcgaattagggtccgggatttgggattggccgaaattgatgccggattcgcgatcagcgaccccgaaaacctatagattggcttcttttattctgaaatgtaaaaaaaatatttgtatatggggcctaaactgcacaagagccatgcaaatttattgtcaattttattatttaaaaacatctcaatatttacaaagaagtgacttttgaagtataatggaaaaataatattaaatgtaggaacagtcacttaaattgaaaatcaatcctttctcactatcgcataaatttcatttgtctaggatgaatatccggcaaatgagaaacagtttttgtccgtctcgcagacaacgactttgtgcaaaagttcgggggaactcattgtggcggagagttcgttgtacaaaaacaccgaaagattttccgttgtgctcacaattccattgtcccttaaagtatttgtaatttgttaaaaaaatgccaaatatgactgattataacctaaagtagggcaagtccttgtccaagtgtttgtggtcgacctgctccaacacttcgttcatctctcgtttcaaatcggcaaggttgtacacctgcaaatgcaaacagaattcgtttttgcaatggattataaaatgaaaacccaaaaaagggtaaaaataattttcatttctaaatcagaaagaattgtctgctcccgattcaaaaagaaatttgggtatccgcgagaaacacaaatgtatatccaattcgaatttgctgacatcccaatttatgtttcgtccaatattcgactgaccattccggtgtgctggtccaccggccctttcagcaccactttccacgtgtaattgtgcccgtgtccgttcccgttgttgcacttgccgaacacctcgcggttcaaataatccggcaaattgtcattgtgcagtcggtgcgcggccgaaaatgtctcaacacggcacattttgacgatgggctgctgttgttggcgttgttgcgcactggccgcaaccgacgactgttgcataagcactgacaacgacgaagtcggtaaaatatcgttgttgttgttattgctgctgctgccggttgggatcaaattggacgatgccgtgatggcatcgctttttgacggcgctgttgtaacgcggctggaagagcattgcctctttttggctgaccacggcggaattgatggaatagcgatattgttgttgttgaacttgtcatcgtttgtcatatcatttatggcagagacgttatcatcacgcaaagtgttcataaacatggacaacatggctaaacacaaaaaggcattgttgcaaaaaacagcgaaaaatgaaaaagcaataaataactacaacaattaccatggctgaggcccaggctttctttgagcgctccgctgtcagtgtcaacggaaggcataaaattggccatttgtttttcgttggaatgttcggaaatgtcaaattttggcgatgaatggtcgacgaaattggagcaaaattcagctgcagctaaaaaagtcaatgaatatggatgaaatatggggtaaatcttcaaaaataccaaagtcattgcgaatcatttgtccgtattcatcatcgtctggtgctgcttttaccatggccaagtccaactgaaaaagcaaatgttactcagtcgtccaaataagggattgaagcagaattttcctaacatttagttctttagggttttttggaacgaggtcacaacagaaagccaattaaatgatataataccatcgatttggccatggtccgtcgttgctggcgtcgttgtggccgttgctgtgctccctgcttcgccgctgcccccgcgactgcctccttcgctccgttttccgtcggtgttgtcattctccgctttcgtcccctctgttccgggttcggcgtcgtcgcctgcgcctccatccgctggtggtacagttcgctgtgtttcgactttaaatggcaacgcaaaatgctggtcgatttcgctgaacaaaatggtggcattaaaattgcaaaataatcttctgattaaacaagaaatccaggctgaaatctaattaagccctcgactacggcttcactacggaccagggagtccttttttatttgaaatttttctcagggggggatgggactgataagctccgccaaagcattggctcacctggaccccggtccctcaaccactcgcagtttttgcatttggctcggtttccgtctagcttctcaaaccaataccaccacgacactttgtcatcttgagacggagatttcctaacagttttcatcctcaaaaggcaaataaagaaaataaaaaagaaaatttaaacaaataaagtcagccattaggacagataaatgaatatatgtcaaaatttataacatagatttgtttttcaacatttacaaaatacattttaaaattggacacatacaatttaacaatataaatagaaagctttttgcacgcggtcgaattcttcttcagtcggaatttgcgccaccgaccaaaacgcgcccatttcgcaaggtgtcgaaaatgctcatcaactgatcgcacacaaatgccttcagatcggccgggtgtaattgttgcgcagcgaaatgcgactccaattgggcgaagtccgacacggacaaatcaccgccattctcgggcttccgttcaattgtgatttctgcttaacatacaaatgaatttaggaaatgaattacccatttatggctgagtgaatttaaaagcaaaacgaattaaaatcggtaacaattaatgcaaaagaccattgggtaatgcctgatttgtccaaaatgacctgccgtcccttccgttgtttgtcctttttccccggcattttccgccccttttgagcccgccgatgccttttgccggaagaatgggaataaaaagtcggcacacagtttcagtgcaacattgtcgcacacattgcctggctcgcaaaaggattttccgacccaaaatggaaatttaggaatttatttag

SEQ ID NO: 4408 - DNA, 2708 bp, Heterodera glycines
  unsure (1)..(2708): unsure at all n locations
gtcctgcataatgtccaaatganaatcgggccgagtggcactcatccgctgcccatccatgccgaccaacggaggcttaaatttggaaatggctacaaatcactagagcaaaatttaggaggatggcactcacattaatcaaaaaggcaggaattgcggtgcttaaactcagccgtttgaaaatcttaaagtaaaaaaacttaatcattttttgacattgttaacctttgcggtcaattcggcagtttttcgctggtttgagccaattaacaccttaattgctaatataatatctttttacatcatttttctcacaatgtccgctgcattttgtcgtacatccaacgcaaaataaatgggacacaaatggcacccaattggaggcggcggtgaatcggtggaagtgacggaaggcgcagtttcggcacgggtcacaacgccggccatttgatacatttccatggagaagtcactgaaaagaattagggagggacaaatgacggaacatggagaatgattgcacctgtcgaattcgtattccgaagaatgttttatctcaacattttccatattcaatgaccgcagaatttccctcagccatttctcgaactgtagcgcacgactcttaaaaagttgacacttaacgaattgaaataaataaaatttgaatttgccttcatttccgtccacggacacttcgcgtggtcaagaaaagcgtccaaatcggagagcaaaattgtgatgtgatggccaaaagtggacagccatttgagagtgaacagtgcgctcaaatggccaagtgtcagccgaccctttggagacaaacgccacaaaactcgaaggggacgaaagtcggtggacgacttgttggaggagaacagaaattcgggtgaagaaacacgaacggacgaagcgacaaacttaaggagaaaataaagggaaaaagttaactcgaaatggtaaaaaatcaaaaacacctccagggattggccaaagggtgtcgacacgcatttgactccgtccagtgccaaactgtccaaacacaaatcgtccatcgaagtgccctcgtccttgtactgctccaactgcgctatgattttggaggacggatacgcttttgcaacaatttcctcaaaatgcgagttgtcacgacaattgcgttggactaaagaagaaaaaaaaggatttttttttattattatgttaaaggaaagcataaaataaacgcttaaactgaccggacgataaaattgtgttcaaaaaattcttcaaatattcctttagggcactttcggaaagatcgccacggacaaaggcatttcgtatggcatcaaaagagtcaaaaaaggtgccattgatcacaatttgagcctgtgcaaatgtgttagaaattagaaatacataatagaaacaaaaagaacgaaactatacaagcggaaccaatcttggcacaaaatgcatatttggcactttattctagtacctcagactgaattggcacaacaacatgcttgaagaatgccagaactccattttcgtcgccaacgccggattctttagcatcggtggacaaagttgacggcattttgggacacgcggcagaatcaattttggcactcaccgactcgggcgaatccaacaaatcaattttggtgttctcttcagaactgaaaatgatagaaaaacgatgaaaagcatttttaaaaatggtcatgaaattcaaattgctgagttaaattaaaaaatgcctgctcattttggagccggtgaggccgggcaccatcgggattcatcaaatggaaacgcttggcaaatttcatcttcagcagctgttcctcgcacaaaatgaatattttgcgctgatccacgcccccaaattgaccgaccactttgaggtgctgttcgtccaacgcttgcagcagagggtaaaggattccgctcaacagagggtcgtcaacctggataagaaatgattcattgtaggataaaatagcggcaaagatgtcactgtaaattagagaacaagccatgggctgggtacggtttttgcaggatccggaactgataatttttcgaaaaatccggtttttgagaccgggcccggaaaccggttgcttctgaaagtgtcagctcgaccggcccgacagatttggaaatctttgtctctacaataaattcatttgccaaattgaagatttaatccaactccatttcccacctgcttgacaacttccgcgccagcccgtgttgcatctcgaagactgactaaaccacaaaaccgcagcagatcctttgtgtaagtcctaattttgaaagggtgtttctcgcagtaaatatggtcatcaaaatggcagataaataagactcactcggtcaattgatacgaacgtccgcgcacaaaatgcaatttgccaatgggcacattcagtgcgtttagcagcgctttgatcacacattcgtagtaaagcacgcggttttgaagcaattcaatggagcttttcatgttgtcgaggaacgcgtgaaggtccgcaaaaagaatggtcacctgacagagatacaaacatttaaatctaaaaacgataagctaacgttcgtttttacccgaatatcggctcgcaaaaagtccgctattttttggattggaaccaaatatccgaccatggggaagtgcggtggtggcggtgcccctaatagacgtggatgttttt

SEQ ID NO: 4409 - DNA, 1309 bp, Heterodera glycines
tggcggtgcaccaatagacgtggatgtttttgcgcgctccaatttgtttcgtgagcttttcatcaccaatcacttcttgcagatttcgaacaataagctctttccgtttttgttgggcatcattcaactccattccgacagattcaaagaaaaaaggccttaatttaaaaaaacaaatgctaaaataggtaaacgaaaaaaattggaaaaattcaaaaaatatctatgttcgtaactttgtgacaataccacattttcgaattaacaaatttacggtaattacaaaaaaaacaacaatgattaaaaagcagtcgtctcatcaacaatctactgtcaatcgttctcttcatcgcttccattgttttcttcactttcacttgaagaactgtccaaacggggcgttgttgaatttgtgcactaaaatgcataaccaacaaatggaatatacatataacaaattatgaagaatttttaaaaagaaaatttcctaaattagaatcctatgaaaacgaacagatttagcggaaagtgttcgcagtctttgcaaatgctcctcgagttttgcttccgcctccgcccctttgtgtgcgccccttccgacagtcaaatcggccaactcaaccaacaatttggcggtgggctccaaagtgccatcgtccgaaatcaggctgaattccgtgtccaaaatgtcctccatccaatcggacagcgcaaacggacaaatgtccttgtgcttcagcaaatgtgcactgagcacttcgacaaaccatgcatcctaaaaatggaagaatgaccggaatttgttgggagattaactatacaatttaaaggcttttagagtcgataatcccgaatctaactcaattcggaccccgaaaaaagtggaaagtattttttgtttaagaatgttcgacctcgttatttaaattcgggttaggggtccaggttcagaaaagatgtgtcagatattttttgaacttatgaatacccccacatttggtttttgattttccataggcgctattttaaagagtgaacttttgaattctatcaaaaaataaaaccaacaggggggagggacccttttggtttgcaaaattttttaatatttagtcatgaaaatttattccctgtggttcttggggtccatgacctcgaattggatgtcagattcgtgatcagcgacctttaaaaccccggataacaaatcctcatggatttttatttcacaaaaattttgcaaaacaaaagggtccccccctgttgtttttgatataattcaaaagtttactcctttttaaaaagcgcc

SEQ ID NO: 4410 - DNA, 553 bp, Heterodera glycines
  unsure (1)..(553): unsure at all n locations
attagagtaaancggataaaaatatctataaaggttgtcctcaatccaaattgcaaaacagcgatttccacacgggcttcagctatgctatgcttcgtttgctaggttggcatttctctaatcctgtgtttaatctcactgataataagggttgcacaaattacggatgtgccgctaaaagtagccttagtaacagcataagcatgttattggaacacccctcctaccattatttcatatttctgtcataaggctaaaagctagatattgtagcgaccagacttttcatttgatctgttgttttacgaaagaattttgtggttatgtagtggtgctaatgtatttctttaattttgtattttgtctatttcatcataaacaaaattggaaatattttcgaaacaaaaacatggtacagaaaagaagcttgactttctgtacacgtagatgggctgaattttggaatcgaatacgctacaatgcatcagtatttcgatttgttacgatgacatactagaaaatgtataaatcaactattttcagaagattgcga

SEQ ID NO: 4411 - DNA, 6337 bp, Heterodera glycines
tttaaatttttgttaaaaattgccattttattattaaataaataaagcttaaaagttttttaataaaaaaaactatccttgtttcatagaattttaccagaaattttttaaatttttacaatatttccataagaaattttgaaaatgtaaccctattttcttgaaaatttgaacatttttggtagaaattctgtaaatatattggctaaaatcagaaaatttggtctttttttaaataaaatctgttaacaattcagaggtaattttcaaaagttttcccggcggcgcctgtcggcaccgccggaccgcccttgctcccgaaaagtttttggaaaaagcgcaccgcaaaaagtgttttaatagcaataaaaaattgtcaaataataatttagcatttattaagaaaaaaatttctgtaaaataataattttgaaggaaataaaaattaaaaatttcttcaatacctgatttcaccgggtacccgatgcccgacccggtttaaaaactaatacccgacccggtacccggcttttcaatgcccggtaatacccggacccggtttttacccaaatacctggacccgtgcagccctacttttaaatgattattttttttggtactgaagtgttcattttcactggaactcagttgtccacactaagattgcgctgtttcgacttaattccttgatttttagacttagctcgtcaagagatgataccaagtttgtccgaattcgacccttttaatttgtcagcacctaatttaagtgtttttgtgcgttttgagccgataccgcattcggaaattttaccccccggccttaagctggaacctggactatgaactcacggtcccaaaacatcgccccgccggtccattttccaagtcccggtggtgctggtgcgtttcttaaatccgccaatgggtttggaaaaaaaaatgggtaatatttataaattcatagcttggctcaaattccaccaaattaatcttaagtgatattattcaatagctttaactgttctctttcagaatataatttttcaaaaatttttccttaagtataaaaaaagttataaagcattgaacatgctatattttttgcaagtatcatgcatatataattacaatcatttaaaatttaagtgtttaaaatgcaaatgtcgcaaaattattttatatattcgatagccctacgaattctctatttaccttttaaattttagaaaaattcattgagtttcaaaaatgttctagccaaaaaattctcatttaagattttttaaaattttatgccataatttttttttaatttttacttaaataaaaaaaattatggcataaaattttaaaaaatcttacgcgccagcacggtcccggtccaggcaaatcaaaacttacgtaatctaattttaactcaaatttttttaagttccggattccggtcgaaaacccagattcaggtccaggaaagtccgattacggttttgcaaaaaaatcctggtaccgtaatgctctagttgtgttcaatcggacgacacccaactcgtcaaatccaacattgttggtatccttcgataaccctaagtgtcctctattagcctgcaaaatttcgaaaaatctcgtaaaggttcaaaactctcgaatgatatcaagatcgttggatttggttgacaaagaaaaaagttatagccaaaaacttgggtccgtacgaaaacgaccccgacccgttgttttaatatttttattttcgaaatataaataacgattcgccaaaaaaaaataatttatatgtttaaaaaaattggtattcaaattccatatacaatttttatttcattaaattaaatgattacaaatttttcatttttcaacttcatctttttatcagaaaattgaaaaaagattattgcttaaaatcatatataaaagcttataaactgcattaaaagagtaggggttgtttcggcgccagccctagttttttgacaatgatttttttgattgatatcaaccaaatctaaagcatgtgaagggctttcgaatgatactaagaattttagatttagttgacaaagaaaaaattatagtccaaaagctagtgttggtgccgaaccgtgggcgccgaaacgaccatttccctagtaattagatggatttatatttaaatcgcaaaccaatttaggtccaaaatcattttttaatactattcaagatggtgcgcggactaatcaataaatcgcgtgaagaacaagttgagcaacagcaagaagtttctatcgcaaaatcgctaagagtgtattgcattctcaaaatttaggtcattcgtagcctacaagaagagaaccgttcgttaaaaacattgtttcgacgtgtctgtgcgcacagcaataccatcagttctgccttactaatgttcgcagaagatcacccggacactttccttcagcatccgattcttttggtttgaaacttttgtttttcctattttgggttattttcatttgtttccgggacaggaatccgagtacttcccaaatttatcctttgtcggtagaaattttctcatcaacacccaagttttcctaaaaatgtaatcctctacctttcggcggttttgtatgtgtttttgggtctcaagtttcgagtgttttcattctttttcgggacgttttgcattttccacccattttcttaaccccccactcaatcgcttctctgccaggtgcagccgcaacaacaaaatgtccccacgccgagtcagctgcagttgttgccaactcgccatgacaacacgtcgtttagcgactcatggccaatactcggcggagcgagccaaagcctgacaatgcgtgcaagcgagacgtttcgaaaaacaactcacccgccaccgaatcttgggcttcatctgtttggcattcaagaagtatttcttaggatcacaaacaaacaaaaaatacacagttgcgggtttcactttactcaatcaattaactgttctagaaacattcaaatttaacattcttggaatcattcaatcgctcgaagaattcgctaatggctacataattcaaaaaatttcttagcttcaaaaagattgaaccaaaaaattcaaaaaccgactttcgaagtcaaagaatcaaaaactgactttctaaactttttttaaaaaagatcccgctatgggattgaaactcaaaaattttgcggacggcattccgcagggataaatcccgcgcgggatcccccgcacctggctctaaatcccccttccctcttcgtcaacaggaggcgaccatgcccggtggaactgctgcagtcgagaacgacgccgaagtgacacaggcgagaaaaggtgttttttgacgggcacacaaagttataaaacttaacgcattccacattgtgtgaatgctgattcactgttctgttccgagaccttggcttcggaacggagtccaaaatttgccgggaatcgaaaccaaaagccgggaatttgccggttatgagagacccccgaacatttaaacagcactaacgcttttcattaataggaaagccgagcccgaagaaacaccgtccgtttcgcaatgttttcaaagctttgggcgacggcgtgtcgaaactgaagttctctacgcgaaagcgcccagaggtttttgagtcctccataaacacacatccaaaatatacgattgatattaatttttggggagcagctcgttttcccctcccagaaatttataaaaaaactgaattttttaaaagaaaatatctcgaaaaaagatatttgaaaacttcaatagcgatttttaaaggtttatgatgaattgctgttttttctaaaaaaaattttaaaaaaattgctgtaaattttttctagaaatttactttaatttttcggggaggcgaaggtattgcaccctaattttggacactggcttaaaggccgctatttgccaatctctcctcccttccctcttctctcatgtgcagaagcagcagcacgggacgacactgtccgggacggatcagcgccgaccgcaattggcaccgactttcgatgcctcgattgccgagcagtcaacgttccaatgggcaacggaaggtcaatcatcgtctacgagtcaatgggcaacggaaaaacaggacgttggacagtacaaagaattgcccaagtttgggcacggcggtgggggcggccaccgccctttctgaatttcgccacgtgataagacaatgccatgaatttgcgctttacattttaaacttcaattaacttatctcattttctgcgtattttaatttcattttattctttattttcatttgcttgttcgcttatgtttttccttgtgtcttatggataaacttaattcttttccttttttacacaattaccgcattttccaataatttattgcctaggctaaaacaaaaatttaaaaaaaaatttttttttcatcacttaaattcttggtccgcgcatgtcctcatttgacagatttgtttgaatggaaatccaagttttaagtatgcccttatttcgaaaaaaaagaattctgcttaatgtaggactttgacctgtattttctggacaaaaatccaggacaagcaaacatggtttatcccatggttcattctgacaatatgtagctgactaagtttttttggttaaaagagacaaaaaaaataaaaatttgtccaagtcatcttcggaattggtgctttttggcaaagcctgtttaacaatttttttttctaaaatctaactccaaagagtgtcatttagaaaattccgaccatccaagtcccaattgcagtgtaatagaatatttaaaacacatgtttattcataagacggatataccaagcagcgagaaaaagcaaaaagctgatgaataaaaaatacgcaaaaagcacataaacaaaggaaatggaaaacagacaaaagaaaattatccaatgagagagactgtcccaaaaagcacccaattaaacccgaaagcactaatttataccataaaaacaatttatggtgtttgtctttggggacagcctctgaaaattgcataaaatggaaaaaaaacaatttgccaaagaaatttaaatgaaatgaaacgaagaggaagaagacttatgcataaaattccggcatttgccaatgttttcatcacattttcaggcaaccgggctcgtcttcttcggcgtgtacacattgccggcgccggcactcggcgagttgggcggccgagtccaagttcattttgtcggcgacacagtgtgagtgagacgagacaaatgggcagatggccaaattcaaagcaaattttaaacgccaaacttttttctaattgttaagataatcttggttcttttgttttgatgaaccaaacgttggcacactaataaaattaagtggaatttttaataatgcttaatttttgaatttttagttaaatttaagtgaatttagtggtctgaacaattttaaattttaatgatgagaagattatgtaaaatttagataagttctgcatttaaagcatgacggagaatttgggccaagaagtcgtaaaacatttttttaccaggtatggctctttttgctctgcccacaccgatggcacagaacggtgtctttcctgcgctattcggcgtccaaagggtacggtaattgaattggtttttactaattgttcgatcaaatcgggtaatcaaagagatattagcgattctgctccagtaattcgaacgtttgcaaatttttgatggtattttttaggttactaagaaaaattggttgataaatgcccccatttgtcggcttttcccctttttagcgttttcttcctccgattaataagggggaaaggagagagagtgcgggaaagagagaaacatgaaaggaaaaagaatgagagaaagcggaaagataaggcgatagagaaagggagagaaagagagagagagacggacgggggtaataccaggggccttatgctcgtctcgcggtttagtaaaccacggttaacgcgttaaccacagtttcatattttgaaatttaaaaataattaaataaaaaaaatataattaaattattataataattattttctctttatattatcaatattagcatagatttaattaaaaaaccccgaaaactatcaaatcaagaattggttttctaaaaatttttggccataacttttttaaacacagcaaaaaattttaaaattttgcaaaataatagggggctatagaatgatactaagaatgtttaatttggatacttcaagaaaaagtttgctgccttaaaattgcccaatta

SEQ ID NO: 4412 - DNA, 2245 bp, Heterodera glycines
  unsure (1)..(2245): unsure at all n locations
ctgtaaagctaatgtaatgaacggtagcgctgatctgagcccggattcgtggtcagcgaccccaaaaaccccttaaaacttttcttcattaatttatatgacatatttaggcatctgaaaacgtatgttaaaaatacccggtaaacttaaaaagtacccattcttctactcgaaagaactcactgttttagtgaaaagtgctaggtaaataattaattaatttgtcataaaaaaaattcacccgttcaagacaattttcgggcaattcactgttttgacaagcggcttcaacgtcctcaatgcacgggcgacgacttgaaaaacaaaatgatgatgaattcattccatgacaaatttgtcacaaaataatgccaccataccttcttagacatcgttggcacaacagaacgccaggcggaagacgggcaaaaaacgggtcccattgaacacagacaactgtgacaatattgaaacgattaaatgatggtgaatgctttttgaattttaggaaatgtttttaaactttgtatagcatcattaatagggctgggatttttagttttttaactattttttctgcggatttaactcgacgaaaaatgcacaaaaaacacatttttagctcggaaattcttcgttttaacgccactactattcatcactaggaatcactattttgaagctttgccactaaaaaaaaattattttggaagttggccactaaaatcatttttttccactattttgccatttttttgtcactatttagttaattattttggggttttttgccactaaaaatcccagccctaatcattaatcatcattttttttcactgaaaaatactggataatatgcctgtttttctggatgtttttacatttcgggtttggttgaacaaagtaaattgcggtgtttttctttcgagttagaaaaaaaagaagaaagtcttacggccaccattcctacccctcacccgaattgtttttttaaacattcacgtatttgcaaaaatttttttttaaatcgctgaaaataaacacatttccaccatattttgtaccatggagattcgcgttgcacacaaaacatgggaccaattcatttggtgcaattcgttgctgttgttgttccacgacaccagggacagctgactgtgattgtgagacggtgttgctgttgttgttgtgctgctgctgctgcccatcggtgtccatggggtgttggtgttgctctgccgttgttgttgatgtacttgtacaacttgtggccgatgatgctgttggcgttgctgctgtccgtccagtaataacctggtcaaaaaaaaccaatggaggagggaatttcgggataaaattgatcaaaaaaacgctaaaaattttctaaaaaaaatttcgggcatgggaaagttattgcacccatataaaaagccatcagtcgcggacagaacggaccattgtcggcggcgacgtgtcaaaagcggatgatgctgccgccgccgctcctctgcctgccctcccagccgccgctgctgtcctgctcggcaacgaagcgcgcttgcgctgccggttgccgccactgccacccgttgctttgctgctgctcgccgacgactgcggcgtcagtcgctgggcgccccgccggcgcggcgatgccgcagacggtgctgcatcgcgcgcacaactgcacgtctccttgggcgaccggtccgcgttagtcacccgcagtgcatgcagcagcgtgcactgctggtcgccaacggactgcagatgtgcgaccagctggtcacgcgactcgaacgcacgcattgggcgccaactgaacaatttgggaaatttatggagtttccgtaacaaacgcacatgaaatttcttaactaaaagcaaatttttatccacatttatgtgtatgattttttaatttaaaaatgtttgactggctaatttttcgcaatttctgaaaaatccgagaacttccttaaaattatttttgaaatttaaaaacttagttatccttttttaaattttagacagacggagatgcttggcatcagggngtgtgcgaaaaccaaaaaaataattttcgaaaacgacacgaaatttcgcacacccctgcttggcatagtttttcgcctataaaaaaataattaattaaaatctattcgagaaattgnttaatgaattaaaagtttcatttctaaaaatatatataaattcgatcattttaggaaaaaaatcaatataa

SEQ ID NO: 4413 - DNA, 2493 bp, Heterodera glycines
cgcactttggccgaagggtgtacacctccgtcgatatgaggaaaattttctttgtcattagcctttttttggcatttttctcaatttgtcccatccctgggcccctccattgccattgcctgcagttccgctcgaaaacggtcaattgctggcgattggatccaatcaatgccaaaggctgatgatgatgatgatggtggtcctccgttcccggcagcatcattgccatcacaattattctgttgcgctgtcattgcagcggcgatttcggcccatttctgtcgcgccaactcaactccaacaacggcaacaacagcgcccgttggagcagtatttgcaacacaaccgccacccgccgaagacgacgacgactgtgccgtagttgttgttggcaatgcttgttgatgtttttgttgttgattgcgtgcaaatgccaaaaagtcagccgcccgttggtcaagtgcatttccgtggttgagaaagtgctccagcttggcattcagttgctgaactgctgtacaactcgtgcaccatttgagcccgtcagcaacggttttctgaggaggggggggggattgacaggatccgcctccgccggtcttttgctttaaaatcaactaactcacagccaactcgtgcagttcgacccgcttctgttcatcctcgccctccgcttcctctccctcctcttccggtgccattccctcatcaattgttgatgactgttcttccacaatcccttccgcatttttgtcgtcctccgtcttcgtgtccttttttgagtccctttctacctcctccgtcactttgtgatgtttttgttcatctaccgattgtttctgttcctccttcccatcctccccatttgttgcaatgccatttcccgctgtgttatggcatcgttcaatttgtcgccaaattgtttgcgcattaaccagccattgacagcgtgccaattcctgtgccatttttttggaaaatggcatttttaacattgcttaaactcaccgatttcagtcggtccaacccttcggcctccagcttcacattgaactcctcccgtgcctccgtgaccaacgcgtacagctcattgactgtttgttgtgcagcggcggcggcaaatgaccgctcgagtgccgcgtttgcgcgcgacttccaccgctcaacgcgatggcaaaggtcctgtgtaagaagaattggcatgaaaattgggctagaaaatccgcatcttgtcaaccaaatataaagtaccagggcttctgagaaggaccaggacccaaaactgaaccatgatttatgaaaaaaaatgctagggtttctagacttccagggactaaactgaaccaggccaggatttttggaaaaaaatgctagtgattcgagacgtacaaggacccaaaactgaaccatgatttttgttcaatggcaccgacctgaatgccatcttccaattctctgtcctcaagcagtgtgtcggctaactgttgacgaagacgaagcacctggaaaaaaatacaaatttagacataaatacacataaaatgaaaaccgaacaatcaaaaaaaaaatgttatatgtacaggagagagagatgacaaatttgcttacaaaattaacacttcaaaaataatttaatgccatttcccgcttacattttaatcatcatttgtcacgggttcgaatccgctcgagagatggtgagttttatttcgattttttaaaaacttattccatctaactttttttttcttgttattttatttaatgataaatttttgctggtcatttttaaaaagtatttttggctctagcatgagtttgaaaattttgtatgaattttttttatgaatttttgaacatttgcaattcgaaattgttcgcttcttggtaagattaagaaacctcggcatattcccagcgcgtgtccgccttttgacagcgtgtttgatctctgtaaacaaaaaaaagcatttaaggctgatcaattatcagcaagcaagcagtgtattaatggaacaaaatcagtttatggacagacctcagtcgaattttgcggttcaacattttgcgcacggcgttcgatgtgcgctcaaactgcacaatcgcctggttgatccgctgaatttgctcacagtgcgggaagcgagcagtgcgccactggtcggccaatgcgcgcatttggagcacatctgttgcaaaaaaattaaatgcaaaattttttttttaaatttttttgaaaattttctaacaagggaacattccgaactgtgactgctcagatcgctttaagaccacttttatcttgtagagcatattcgatttactattgccaattttcgggtttttttggccctgaccccaaaaatgatctgaaaaaagtgatcaaatgaaaatcccaggaaaaatttgttaatttgattatttttttcctcttgcattttaatgaccatatgtcatgggttcggatccgctggacagatgatgaattttttt

SEQ ID NO: 4414 - DNA, 3365 bp, Heterodera glycines
  unsure (1)..(3365): unsure at all n locations
gaaaattggcaatagtaaatcgaatatgctctacacgataaaagtggttttaaagcgacctgagcagtcacagttcggaatgttcccttgtaagtatgcaatttaaaaaaactggggggggggacaagttgcggattggatgttgtctgtaaaatctcggtatattgtttgacagctttttcggctcccgaaaaaatgcgagattcacaatccagcatttcaaaaaccatttcaaaaagtatcatcaaattttttataaatctccagaaattgggaaaacgttaggcatatgtaatgtacatataacagtttacactcaaccaatgaccgaccgtacaccatgctttataaattacagtatcactgatgcacccttttccgatcacaaaaatttttttttttttttgctaacccattttgtgctacatttattgcgctaaccaattttcttcctctgtctgctttccgttcctcccccgtcgttgttgttgttgtcgccaacatttccaagccgttcatcgccgtttgtttcttctgcgtccattttcatcaatttgccatcagttgtgccgtcaatgttgttgctgctgctgctgttgttgtcgtcagcttccgtgctgggcgtcttagtcgtgtcgttcaacagttgcgtgaccgtcgtgcgccactcaaagaaagcggttgtgcgctccgtgagacggtggacaagcggcaccaaatcgtccaatgtgtagcggaacctttaaaaaacagcagagagatggaggtccatttaaaatgttttttgcactcgccttggaaaatttttctaaaatttttatgaatggccgggggggcaaattttgaaaatgttggcaccaaaaaagcacccacttcaagcagtactgttccatgctgcactcggtgcacaactgctgcacatgcttcgcgcacaccatgcgcccgtcatggcgacagcacaggccggagcagaacagcgtggtacggcacacggcacaggaccgctcgtcgtccggaatgtcctcgaagcggcaaaaagcggtggcacacacaccggcgatggacagacggtgccgaaagtcggtctcccgcgccacaatccaactcagctcgtccagcgtggccatgcacatcgctggaggggttggagaagagggtgaagagaatgataatggatttattttaccactttttgggaattttctggaaaaaaaagagagagcaccaccaaccaatgctcagtttgtgcgcaacagtgaccatcttcatcaccagctcctcatgggagaacacacaagtacgacccacatttgcgtagttctccaaacagagacgacccatttttagctaaattaaaaaaaaaaatttttttcgaaaatcccaaaaacggaacccaatcgggcggtgcaaaattgacagcctccgcacagttgaggccctcgttgaaaccggcatggtacgaacgtggaaatgtgatgacaaattcgcccgcattttgatgcactttaagcggggggggggggatcaaaaattaaataattaattttaattcaaacggggtcctagagagtggattttttgggagaaatgaaatcgtaaaatccggcaaaaaaaaattgaatttattcattttctggcattatgttctccttacccgtgtacacatggaggccacggtcgatcagaaattgcggatttctgtcaaaaaataataatggcataaacggcttcaaaaatgatcaatttttatttaaaaaaacaaatacatgtgagtgatcatttgatgaagcaaatccttgttctccataaacaattcaggtgccgattctgttgaaaaaatgaaaatttatgatcaaaattccatggaaaattccggcacacctttaacaactttgtcgaacagttcggcctcttcgcccggcactccgtaccaaattttgcgctccccccaatggttgtagttgatggaatacagcataaaatgtggaaggcggataattagattccaccaaacagacatagaatttttggcaataaaaattgttggcaaaggtatgaaaaaaaaattccagaaaatcccgagcattttcaattgcttaaattcggcgtagaaatgtggatttactatgcccatgcccaaaaacacagtcttacaattagaatcagtgggcgtacacggattcggaatcccgaaaattctataatttttggggacagttagaaattcgctgtatctaaaatttttggagcattttgaactgtttcaattcggcgtagacaaattattttgcccaaaaacaataaggaatcagacgagggcataaccggattctggatcncaaaaaatgccacaattttttggccacaaagccaccaaacagcagacacagaccagtggtcctcgacgtgccaacaaaaggtggagaacagcatgccaatgtacacccatgggatgatcatgccggagatgtcggtggtcatgtggcacagcacactctcgcgcaccttcggcaaattgtgcaaattccacggatggttggcgtactgttggcgctcccgcgcgtccgccgcaacaccgcgcaccgacgcgtcctcacggcgcggaaaaccgctgccgactttgcttgaaatgctgcgcaacaaattgggggaggaatgagaggagcacatttgtaaaatacatacggcattacaccaatgtttggcatggcaacaatttcccgtcaggaaattcttggtttttcccgtccccggaaaatcgcatttgtcgagcaataatgcaaatacatacacataaaccatttagaaaaatttgtaaaaaaagaggatttcaaagaaaaatccaaaaaagttttggatggaaaagccgggggagagggtttgaatatagggattagggtcagaaatttgtcaagaattttagtagttttttttaatcgaattgtcaaaatttcccaaaattcactctctccttgaaaaaatgccaattcatccaaataaattgttggttagagttttaaggcacaaattccctagagtcctgaattgttgggagaaattccgaaaattaaatttttttttttcttttttttcataagttggggaattccaagacaaaaaaaaactcacaggtccgccccgtacttcacttggacacccttgtcaatgtcgatcacattgcgccaaaattccctttccacgcggtccggtgggacctcctgaatgggaaacggtacagaaatttaagaaaaaataaaaaaaacagtcaacttacgcgtggctcctggttgaaatactgttgcttataactgaaacaaaaaagaaaacacagtgaaaattgacaaaatgttattccaaataaacaa

SEQ ID NO: 4415 - DNA, 1846 bp, Heterodera glycines
acgagtgaggagcaaaagtcgatcaaatcaatcatacatttgcatttacctcccacccaaagagtcgaagcggccggaattacagtgatgaacgaagcgggccttgacccgggcattgaccacatgttggccatggtattgctgtgattgatcaaatggcaccacacgaaaccaccgtttaggagtgcatcgacaaaatccacagttacggtggcaaagtgcgttcattcgtcagttttgcgggcggactgcccgccccggaggcgtccgacaacgctttgcgctacaaattttcatggagtccgcgcggtgtgctgctggccataatgaacccggcgcgctatctgttcgattcgcgcgtcgtggacattggcggagggggcgaagtattagacgacctgtacaaaatcgactttatgccgggtttttctctggtcggatacgctaatcgagactcgactaaatacgcggacatttacggagtcagcggagagtgccaaactttgctgcgcggcacactccgatacgaagtcagccaaagcggacaaaagaaagccggaagaaattttataattaaagggttttgtggaggcagtcaaagcattgaaagcgatcggatatttgtccatggagcggaaggactttctgaacccaatgcagggcccagacatggcctggaagcaaatcaccgcttctctgctcaatcagcaagtaatggtccagcagttggcggacattgcaactcaatgggaccaataatatatgtaaaaatgggcaattgagcagtcattccttttcagccggacattttccccgattcgctgatgaattttgtagcggaattgttgggaaaggagaaaaaacgagaactgaaggcattggacgaactcggactggtgagatcgaccacagcaacaaacatcctttgatttattcggccaatttcagttctccgagggaattccggaaagacaaatcacaccgttggacactttggtcggtcagggaaaccacctacgctcattattttaatggtggtttaatgcctcgtttggcaggtgccacacttggctaaagcattggcctatgaacatggcgaaagggatttggtggtgctgaaccacgatatcgaagcacaacttccagcggggacattcgtgagaacgggcgaaaaatgcatcgaaattggacgattccccccccccccccgcaggaacggcatcggatcagtttggtcgcttatggcgaccaaccgaccgaaggcttttcggcaatggcacgcaccgtcggatacacaacggcggttgtgtcgcatatgattttggacggtcagcaaaaagggaaaattaaaagagacgaaaaaacggaagcatttaaggggaaattcagcagcgagggatgcttagacccgtgtcaaaggccgtgtacaggtcataaataaggggctgacggacaaagatttagagaaccaagccataaccagggggcaaattggcaaaccaccgccccccccctttcaaacaaatttaacacatttcggtggtcccaatttatatcacacttaacaaattgtaattgaattcaccttaccttcgcccctcctccagggagtgggaaaacggggaataaaatgggcaaacaccaaaaaataatgcaataattaggcccgcattgcaacgactgaaagaatttgggatcaaggcgacaacaaaagtgagcgtaaagcaataaggaaaccgaatgtgataatgaaagtgactaacataattaatgactgaatagtcaataataaccgattcatttgattggatttcaatattttgtatggatgaaatggaatttcgac

SEQ ID NO: 4416 - DNA, 823 bp, Heterodera glycines
tttggccaattccgacagaatatctccgatcattttgttctgaaatagacaatgatttgttgcatagtaattcaagcagagcatctagccaataagaacaattacaattttaaaggccaaccatcggtggatggcattttcgcaaaaaataaaagaaaaagagaacaacgtacgacaaaaaataaatgcattaaaattacctggtaatgctcaaattgttgagcaatttgctcctccagcacaatctgtcgcgctaatttcagctgttgctcactttttccaccaaaattttcacggaaaatagcgagtttttcgggcgctgttttggacaatttgtcgacgagtgcgcatgtgatccaagtgcacttcctctcggccaaatctgtcaaattggacttcccggtgattgcggggtccccgaaacagtccaaaaagtcgtcttgtgccttaatgaccatttcccatttacttttgcctgaatgaccaattagttgcctgaaaaaggtctcctattcgataagcaattcgccttagttctgtttgatttgtcggtgttcgatcggccaaatgaaatccgacgacgagaggcagaaaaaaagagtaatggctggtcttgtgctcaacgatggaggcgtagcgggaccaactgaacgtgtccaactctaagagaaaggcggaattagtaatccgattgaaacatccaattaattacacactcaccggtggtgtcagtgtccaacatttgtccaattacggttttttgtttcgccttaaaagaatgaatgattcgaaaaaaggatcgccgttttttctagtaacaaaa

SEQ ID NO: 4417 - DNA, 4449 bp, Heterodera glycines
ccctcctcgattttccgccgtccattatgtcatcttcgatgatgtaaaaggtttgcagctaaacgcgtaaggtgaaggatgaaaattatacaaacaaattgagaattttttttcaatctgatttttttttattttaaggtttgccattgaaagtgccaaaatacgatgcattttattcgcattttttagaaataaaaattcaaaagctgagctagtcattttttgcctaaaatctttaacaaaatccgctaaaattcacatattttaccggcggagacgatcccttttttgaaaaaacagtacagccaaaaattaaacaccttgaaaaaagatgtggggtcaaaaagccaagtcaaattctgttttacgtgtgataatctaacaatttcctccttagttactgccaaatttgcacaattatgataaaaatgcttaaaataaagttctaatttccacaaaaaatggaggagtaaaaagttgccatttttttttgaacttttgctatggcatttccctgactgtttcttactgttagtaatttaacaaccaaccatttcaattgtcagtgacactctaacggcgctgtcaaattgttcgtcggaaggtgacgaattcaaagcctgcaaaaacatttcgtccattaaaatttgttaacttcatccacattagtaatacaacaaatattaagtacagaaaagccgatgaaaaccaaccaaatatgttctgagtgccaaactgctccgcgcaaattttccctctcccatcgtatagtcaaaaagccggtggatgcgatttcggcacatcgtcgcctcggcaccgcacaaatccttcgtcatcgaagtgaccaattccttccgaattgatgcgagaagcgaacggagcaaatgttgcggatttgcgatggcactcatcaaacgctgagaatttgcaaaagtattcatctcaaagagagcaaaagaaattgggtggttaaaagggaaaatgattaaaaaaataacggccaaagaccgctggaggaagaaaagttctcctcttctgaaacgatgactaattcagctcttcctcattagcactctttaataatttactatatatatgtacgacttctcttttgaaaaataccaatacaataaaataaataaattagaaaggactacaaaagtggcaattaaaggcaaagaaaataaatacaaaaacgtcccgaactgcatgtccaaatcactttttaagaccaagcatggccgatttattttaaattaaatgtatgaacactcaagttcgggatgttctcttgtaagtggttaatacaatgtctccctaatgacaagttgcatcggtggcaaaagtcatttaaaattcgaaatgactggtcaaatgctttacacttcagtcgtcccattcgttgtcctcgggggatggacttccttcggacgatgagtcagaatcgcccagacaatgctccattcgctttcgcaaaattgcggccacgtcatttgaagtggcaaccgctcgtttctcctccaattcctcctgctgacggactttcctcagtttgacgccctcttggatttgcatcaacagaagggagcgattgtccttaaaatcaaatgtaattttcatggattttttaattttattatttttccgttcttcttttacttgagcgccgctcgtgtttgaagatttgcgttgtaaatctttcggctgttcattctcattttgtccaccgaaagttttcgtcccttcgtttgcaattttgagagaaaaattgggagggggtggcggaggcggtggaggaggcgccggggcattgcaaacagacggagggatctgaaaagcaattgctaaacatttacttttcatttaacaatcgttccctctgttacttgttgaatggaatggagttggttaggacgttgttcaataacagcaacattaatagattgctgttcatttgttatgtgccgtgtcgtccctaactccgaagtttccgttgatccattggtcgatatgaattcgaatttgcttttcagcggttcattagtcggagcggctaaggacgagtttgtagacccgacgggagaagaggatgaaacggagggagcaattcgagggaagttccttgtgttcactgtggaagacagaatattttgaggaggcggtggcaattcatcgtcctcatcatccagaaacatcacgtccatcctcgaagccacagcatgtgctgcgtcatttttgcttgtgttatcggtttgtgtcgtgttcattgcgtcggcttttccgtcaatggtccgttctttcacgcgaaactgctgattgctattgccagaagaatgattggaggacaaattaaatggtgagtgctcgttaggctttatttgcttgtgatgttgttgggtgacagttccctcatttgttgtaaccattgacattccgggcggagggtgttgattgtgagtaattctgttgccaatcatcaaactttgtggggtctaaaaaaataaagaaattaccaaaggaatagaaaacgaacttggtattctgcgggaaagtgcaaaacatccgcagcaacggaagagacagagaaatgagccggaccaaacccatggcgcagtttgtgctgttgggatttgccattctggtggccaatttgtggctcaaaacgcgaataatccgtagaacgggaagacacgtggtgggcagacaaatcattatgttgcggaaaattgtgttgttgttgctgttgacgtcgtcgttgtcgagacggactggtcgaagaacggccttaaaaatgaatcattcggtgccaaaaacaaaatcacaccaaccggcccttttcttctcagccaatcccccatcgcattccttcaaagttttatttcgccacaattcgaagaagtaactcgggtcagtgtaatagcaaagggcttccttttcatcctccctataagggttcaactgattgagttgtggaggagggtcgcaattttggtattgttcaagcaaagactgcggcaaggtctgacgatcgagcgaatgttggtcgattatgttgcaggacttaaaagctttgcgcatcgatgcctcttccaaaccaactaaataagcaagacaaaatgcataaaagaataaatatcatttgaaacggattattgcaaatttaagaccttggtccacgactctgctcaaattgttagtgtcctgagaatttgagagtttttgtgaaaggcgttcgacgcgtaaaaacaaagtgctggagcgatggtcaattttgagcaccctgaacatttcttttctaataaattcaaaactgtgaacaaactctcgatgaatttcggaaaatatttgttcagcataacgactcaatgaactcatttggcgtattaaatttgccacagcgccatttgcgacacattgaagttcgtcttgctgaactgaagcaggtaagcgatgaaggcacacattaacaggggaaactgagcgagtgattaaaggcatttattctaaaacttattgatgaaaagactaacacaaatgctgtttaatattatcagtagcttcggacacggaaaatgggtactaatgtagtttgggtcccatattttttcaaaaattttcaaaatttttttatgctttaaatgacattaaaagtgatttctgtgtttattgggtacaattcagcgatttgtaaccacaaattaaaaaaaatatccggtcctccaaatcagggatggacgaaatttcgtttcgttttcgtttcgtcctacattttcggcactttttgagtttcgtttttgtctaccaaagttttttcgtttcgttttcgttttttaaattttggattttcgtttcgtgtttcgttttcgtcagagcaaatggacgaaaaaaacgaaaatatttacacccttaagtttttgaagcgatgtcttttttgaatattcaaaatttaaatgaaatttttttgaaaacttgtattattttctcaaaaattcgttttaaaattccaatttttccccgtcagagctgacaaaaccttaatttttctttaaaaaaattggccctaaatcacaaaataggtcattttttacaaaactttaaccaaattgcactgaaattttcaaaatttttcccggcgccgcctatcggcaccgccggatccaccccccccatcagttcccaaaagtttttagaaaaatcgcgccgaaaaaagctgtctgaaaaacaaaaaatcatagggtttccatgaatggaactcctttgcaaatttaaacactgactcaccccctcccccattcagtcccttcccgaattttatatgcatcgggattttaattaatttttgtataagaaaactttaaaaaaagtttttaaaatggtctaaaaattgcaaaattttgagtttttaaatgcgcggccgcggtttttttctgtgcgcgctccagccctggt

SEQ ID NO: 4418 - DNA, 2381 bp, Heterodera glycines
aattgcttacgccacaaaaaatccgaaatgtatgtggaaaaaagtgatcggtgactgccaaatctcgctttatgtgcctgtttgaaaaaattcttaagcgttttcattaatctaaaatcaattctgataaaattttaaaaaatttgcaaatttttgaaaaaatatgggacccaaactccattagtactggaaaatgtaccacatcccataaaataaagttcagacattttgacgatggccctttcggacaatgattttcgacattttatttcgaggattccaacaaatcattttgtcaaattaagaaatttaaaatttttttaattaaaaagaaaaatatctttttaaatttttttttttgaaattattgtcaaaacaaatttttcgatattcctactattatctcgaaattaccgatataccgatacatagatatacaaaatattataaaattattttagaaaaaactatgtggaattttagagagaacaaaaaaaattacaaacttaattatgataattcacaattaaattaattattattattctttttaagtttttgttttttcgtgtatttgatattaagaattaataatagatgttcgatgtgctctaaattagaattgtcagtatacatatttgacacattgaacattttctggaagttttgctttttgtttcgcggctccccccgtcttctcattctctctcttccactcattctttgtcctcttcctcttcttcttcctcttctttcgcaatgcaaaaaacgcattttcttggctctttgccgaaatcccttaattttgggtataaaatgtgcgacagattaggcaattacagagaaaaagtcaaacccctcccattccaaaagacaagcaacaattggcagaaagactcaccaattgcaaagtcgggcgatggttcctcttccggttggaatcctcttgaatgtttacaatattttaagaatacttttttttgacttactcattccaaaactgatcgaaccctctttaaatgatcgggtgattaaacagaaaataataatttaaaaatggaaaagaaaccgacccattggagaacttttttagcagatcccttcaaacaaaagtcagtcattaatttaaactccaattcaaattactcgattttggccttttttacttcgggatggtcatttggaggagtgtcggtgttttgctcagtcgattgccgtcgttttttggggagagaacgcggcgttttagaaacacaaaccgaaaacgggggaaaggtcaaatggcaaaaataacagaagactgaccattgtgccaaattattaacggagagcaattagaaagaattttaagagcaaagctaaaaagagaggacactaattaatgaatggcgaaagggtgctgaagagaaagtgaaaaaggcggaagagaaacgaattggcacgtgaagaggaaagaaacggatgacgaaatcattgagggaagagagaaaaatggggggggggagagagtgaaatattggaaaatgcgcctaaagggcaaagggaacgaaaatgtgtcaaataacagacagagagagagaggacaaaagagtgagagaattgaggagagtggcaaatgaatgagagtgatgaatggcattgggaggataaaagaaacgagtgaagaatgaatgtttggcattgggaacagctttttaagcgtgtcccaatgcttttatccgtccgcccgcccgccccctcaataaaaactgccgacttttcgacacatttgccaaagattaaccgcgggacaatgaatgaataaatggatataaatgtgtatctttttcccttttcaacacaatgctttggactgacaacgattggcgaccattcacagctgatcgtgggctgttttgtgttcatttgcttattcccattgtccttttgcttcgtctattagccgatgaattttggttttcaaatcggagaaattcacagaatatttttcagaacggcgaatggaaaaaaataaatccgaaaatggccgaaggaaaattggacaaaaacagaggaaaaaatgagccaaaggataaatgaaagtgacaaaggagcattcggattgataagataagaatgaatgttaaataaaaatggggaggtaaaacttgtcccagagcaaaagggcgcatcatttcttttctccgtttatggcgaacattgcgtaggatttctcaccccttcattaattaggtattactaatgagattcttccctcttatcttacgtaatttatacaaatgtttgtttgtgtgataagggtgttccgcaagccaaaaaaattggtggatttgtgggaaagaggaagtaaattcttttttcgctcggaaattgcttctttt

SEQ ID NO: 4419 - DNA, 4132 bp, Heterodera glycines
  unsure (1)..(4132): unsure at all n locations
aatgacaaaatgatttccacaatttcccccgtcagngaagtnaagtctttgtggtaaatgaaattcaaaaggtttgttgaattatgtgcaataaatactttgtccttaacgaaatgtccatgcgaatgtttggcgcagatcaaatggaatgccaattcgttgttggcacagtccaatttgtagcaacgaatgcttgccccttttagaccacaaagtcggcattcggtcactttggccctccgcagcgctgcctcgacgtttatgagaccgccctaattttacagatatttttgctatattaaatgtaaatgataaaacaaaataaaattctcacgtcttccgccacatgcacttcagctgaccacaaggcacaattctaaaaaacgaattgtaaacaatgtaatgttccgattgttttttattcgttcaactgaccacgtgcacccatttgttcgcgtccacattcaaaagtcggcccgtcaaccgttggtctccgtccccaatctgttcacagaaggaacattggcgcgagtcttcgctccaattcattcgtttttcattcgtttgcaagtgaaccgctgcaaattgctgaagagaacaaccaaatggaagaaagtcaaggcaaaatgccaccgatttcacctgttttgtgccgtcgtattggcgcctgaacgactggacgagcgtcgtgtcgcaaatgttccagccgaagccgcgccatttgaatccgccgtcgtgcagtgcctgtgccaccctcttcttctccatgctctgctggatcattagcaatgcgggcaattccgacgatttgatcagaaattccctttgcgcgatcgcagctccgccgtcgatggtaactgttgcggcggttagtgtcattgtactgtttgctcccgaagttgttgcagtttgaacgatggaggccgaagcagcggcgccggaggaatgctgttgttgctcgccaaggaactttgcttggggtgtaaacccggcatttattcgcttggcaaaattatcggcactgatttgccggagagtttcgagggtcacctggtggaaaaaagtcattaataggtgagcttaattggtaacaaagttaaatgtgctaacattgtccacatatcgttcagccatttccaatgattcgacgctcaaaggtattcgaaacaaagccaagaatttgtagtagcattgcatcgaacagaaatgtatcttttcgtccttctgaaaagcgcaattttgaacgaccattttaaataccatttatttaacttggactattttatctttagacttactgattccgacagtaagcccagtcggccgtgagtgtcgtcaattggagttttgccaggcggaattacggagttgcagtgtttgcagatggttcctcctccgttcccttgcccattgtttctgttcgttgcggtcagttcagtccttaccgttgtctctccgatttcgctttttatcgtttgttgttgatgatgatagtacagtttatgttgttgctgattggtgctgttgtgctcggccaacgactggtaataaccaccaccgccgccgccgtcgttcctcggcgagtcgggcgtgtacggcggagtgtccaactcggtgatgtggtcaatgtgagggatgccgagaatttgacacaacgaatccacaaattcgtcccgtggcatcactgatgggtcaacggtgagcacaacgtccaccattcggtccaagtcccgaggttccttgaacaaaattgttgaagtttgtcggcattaatgcccaaaacaatggttgtgtacttcgtcaaagcgggaccagtgcggctcaagcggcgtctcttggcttggccccggggcacccaaaagggtcaccgatttcacaatcttcgaccgattgccaatttggtcaatggaaagaaagttgagcaatttttcgtcttcgtcgttgtttccgccggcagatgtcacagaaagacacgcgacgggagggaaatccttcacatcgtccgaattctctccattaacagcggacggagacggatcttcggtgtctcttaaaatcatttcaaattaacagtgtttaaaagggtgacattgcctatcattaatagggttcggaattaagtccaaaatttgaatttcagcaaagaagatgccgataaaaaaggttggaccggttaaaaggcaattgaaatcgggcaaatataaaattctattatataatttttggtttatttttcgtgattttttttgttgttgcctattttatgaattttttagttgactttttgttgattttttttcgtgacttaaattccatccctaatcattaaatagtaggcatctgatacattcatttgcccattttccctttctcttctcctctcactttgccaatgcgtccaaatcgacgttccaacaaatttcgcccattgttggcggcaaaagggtctcctcgtcgacgtattcgcgcaccgtttccaattcgtcgtaataatcgggcatgaacggcaatgtgtattcgccggtcgcattgccatgcaaaggcggctccgacccctcgtggtcagggagagcggactgatccggatacttcatcatctgcttgtcatttgcctggtactgctccatgtagttgttgatcggtggtatcaactcaacctgaactttaggagtagaaaatgaccatgttttaactcatttattcgcgtagaaattcccctccatccgtttttcttaccgtttttttgatgcgctcctgaatcaagtccaattcgttggtagtgtcgggctgactgcgtgttttggtctgcgtttgtcgcctctttttgaccttccctggacctaacaatgcgtataaaatgtaaaaatattaatctatatttaattggcatcacattgttgggcaatggcatttatgccgttgttggtattattttgttgtgacaggattttctgaacaagtaaattatcgtcagcaggtgccccgctgctgctactgctgtccatttttgcagcgacgaaaccaacgagaatatccacctgaaaacaatttaaaaacagttacaaatcgctgttttccccgcccattaccgtttcgtacacatctcgctcaagttgagtgcccaaagcagtgaatggcacaccgccaaggacggaagaacgcacattttccggcaaaggctaaaacagatacaaaaggaatagaaaaggaaaggcctagttggtggaccttcttccgctttctgcctcgtgttcctttcacttgctgttgctgtcccaccccaatgatgggtttttgctcgcccaatgttggcgttgtcactgtttgttgttgtcgttgttgtccgtgatccgatgtctgtgatgccactttctgctgttgttcaacaaggtgcatcgatgacaaaaatcccgatgttgttggctgttgctggtgttgctgagcattgcttgttgttgtgctgggtggtcgcgttcgttccgccacaactttttgttgttgtatttgcgtgggtaactgctgctgctgctgaccaaccaccatcataggtttctgctgccgttgttggctatgctgctgttggccgatcatcgacggatgttgtgtgccggtcatgttgcttgttgtcgtgttgctgccatttgggtcagccaatacggaagttgactgggcagagatcgcctgcgattgtttttgctgctgttcctttagccgttgtcgctgcttgtccaccagtcgctgctgcacttgcaacgcctttttcgcaacttcaaagttgttctgtactgctcgcacttcttcagcgtgtctgttcgcctcctccggtgccataggatgcgtttttttctgcaacagtcgctggcgcgcagcgagcgctctcttgtccttcttcaattgctcaagtcgtgcttcctgcactttgaaatcctgctccaaatccatgctttgttgctgacgcttttgggtatgaacaccacccgctggaagcattggtgggttaaaaggcaatgatgctacagccgaagaagataaattgtgatggtggattgtcatagatgttccagtcacggcattgttgccgcactgcttggacgggtcattgcagcaaagggaggaggttgtctgttgttgt

SEQ ID NO: 4420 - DNA, 5047 bp, Heterodera glycines
  unsure (1)..(5047): unsure at all n locations
ttgctgctccnccttgaaagggtgcatccggctgttgttgtccaatcaaaacagagatgctgttcttggcgttggtggttgttggttttggactgctccctgttgccccatttgttgctgctggttgtgagcaacttctgtcgaaactgttcgtcttcctcgtcgtcgagttgttggacaattggcccggtttttcctcgcccattcaacgaatctgaattgaaaacagaaatgaatgtgcgtgcatcttgttgagtggttgaccaactcttgtctcttctcggggttcaagtctcgccaaattcggctgatcattcgaactctgtccgtccaaatcgggaatttgtccttcaaatacgtgtgatgcacctcaacaggaaaacgaaagaaatattttaaacagaaacatccgaaaaagggaaatacatttgcataaagcaccgccgcttttgtcgccttgtcccccaagggttcgtcttcttcccaacgttcagttgtaagagctgaagcactttgcttctgttgttggtccaccattttcccaccaccgtccccattgtcaattgtctaaatatgagtgagaatgcaacacaaataacatggcattggccaaaaagcacttgttgctgctgtccaatgggtggttgtggtggtgcattgttctgcaagaacacagccgtcgccgttgaggacgccgccaccattggcggtggtccgggctcgaacactcgactgggcgttcggattgatgagcaggacgagggcgagaacacctcggagacaacactgtgcgcaaccaaattggacgaactgccggcattgtaaccatctgaaaagaacacatggaaataatgtgccaaatatgggggagggcaattaatgaccgctaattgggtcgattgtgttgctactgctctcaacggtcatcggctcgtcctcctctccaacaattaggtccgagaagtcgagtccctccatgtccaatccgtccatgatgttctccaccaacggaatgtcgcccaacatgtccatctcctgctcggtgcgcaacagttcggccgaatgttcggacagttcgctggcaaatttggtgccgctgacgaccggcaacacctttttgtagtcgctcaaggttggctcatccacagtttgttccgccagtgttcggctgtcaaccgccgcaacaccgaaaaacgattcctgacaatttaatgtttagaaagttttgaaattcgagaatcgaaaaaaatgcaaaatagagatatcaaacattaagtaagcaaatgcacaacccacctgaatttgtggcgggtacgcatcctccagcagcggccttttcagttttcttggcctgcgaatccgcggctttccatttgggcccaagtcctcctccaacatgttggcacccatcatttgttgctgttgttcgtcttcggttgagttcatcggtgtcatattggcaccgctgcccatcaaaaagggaagtcggcttttcggagtgcgaacgtaaaatccgccaacgcccattttgagcattcgtcggcccggcccaccgccgcgtccaccaccgctgccacagccacggcctcggcccgcaaaaacggaggcgatcaactgctcttgcaattcgtcgctcaattccatgtcatcttttaaataacagagaaatggataattttatcagatttaatatgtgttacatttaccaaaccatttgccaactgtgtaaaagtgtgccgtccaaaaattactcttacagttttttacgattttctcacaaaattgtctcattgtcagttccagtatgaaagtgacactctcccccgtgtccattttggtgtggtttttcagacagaaaagactgtgttaatccgacgatcgatgtcaccatatttcattcgaacacattgaatgaaaaccaaaaaaccgacatagccaattcgaaacaaccttgttcacatgagacggaccgagctatgttcccgaaatgctctccaaaattggcaagtccggcaagctttcgaatgttagaaatgccctgaatttggtcgaccatcgatttgctgaccatcacattgtcaaccacaacggggacatttgaagcgtcatcttggatttgggacaaaattgtaacagtttgcaggcgtggaaaacaaaacttacggaatatttgaggtcgacagaatgaacagcgaaacgcattttcggccgcattttccgcctgttcctccgttgtaaggccctcacagcgggcgtgaagccatctgacggatttctcacatttacaatatagtaaaaattgagagcaattcgaccctctcccccggttatcagtttcccccccgcgtcgtcccccgcccctttttcataattccaataaaaaatcgaatcaaaatttttttcctaaaatctaaaaatttatgaaaaatttcctaattgtaagatttttgaaatttatattgaagatttttcagaaggggggggggggggtgaatgaagtgcatcctataaaatcgggagggaagcgatgcttttcaaattcaattttaaggataattaacttccaatctaacaattaatagattaatcacctgagacagcgtccgcatttcaacatcaaatctccaatttcgtaggatgcttggcacttcacacatttgcgcagggaatagcaaatttcgcagaacccttccaaccgctgcatatcggagccaagtttaatctgagcaccgcagcgagaacaagtcgcgcacctttgagtaataaagaattggaatagtctttttaaaatcagagatttatgagtaaattactaaaatttaaattatgaaaaattggcacttaccatttacaacgccaggaaccgcgcgggatacaatctgcaaagttagagtacgaaagagagtaaaaagccattttcatttacacatacccaaaggcggttccaagcagtaagtgtggtaggaaatgtcgcattcgtcgcaaagcaacaaattcggttcgtcctcgccactgccgcaaccctcgcagacagtgcagtccaaacagcgccatccccgcttcatcacagtcggattcaactgagaaatgaaatttgattttaaccaatttaattggaacaagagggttttaacaaatatacaaaatcaacactctcataacttaaatctacaattatctatcgaataaaaggcccgtagcaagagaggagggggtttaaaaattttatttaattttcttgactaaatgctttaaattccaaaaaaatcccggcggcgcctatcggcacaaccggaccccattacactattttttaaatttggtcagaaaatggcaaaatttagtccttttattgaggaaaaatggccacaaattctttttttgcttttcggcgctaaaatttttacaataacactgaagaaaatttttttgactcgaagggcaaaaaaagtctttggattcccccttccaaattttttttgatacgagcttgaatgaaaaaacgttcaccgatttacaaatggtaaactgaatgaatgatcaccaccgactttgtcgtgcattagcacacaataggtgtggaagctttgggcacaacacgagcaggtgatcattgagccttcagtgccgcgtccgatgctgccacagaccaaacacatggacacctccgtcatgaatttgtcctccagactggtcacaacacatgtccggatgtactccttgtccgtcacattgctcgaccctcctccgtcctcctccttccgtcgctcgtccaccgttgttgccgaactgtgctcgcgttgcgatgccgtcgtaccactcgccgttgctgcagctgctgccgtcaacgcgttggcgtacatgctgaccaacttggagcctcggccgcccccggctccagcgggtcgtcttccgcggttgccgcctttacctatattccctttatacgagaggcttttaaacacaatgctctccgacctttcgacgcatttcctcggctcttttttccgcccggcttttcctccgctttgaaatgggcgtcaaactttgctgtgtaagtgctggcaactgaggagggtggcttcccaaatgaacgtgtccgcatggaggtggacgattggcggtggagcgtcgcggacgtcggttttctgcccttcccgcgaccccctcgggtggactcagtgcgccgtacaattgtgctaaaaaaatagacagccataagtgaatgagcaaatgaaaagcaatttcaatttaaattaactaattaacaataagtgtaaaaaagaaaataaaaaacggaatatttttaattcccaattcttctgctattttcaacaaaaattccaggaatccggccaaaaagatgcaaagaatgcactaacataatttaaaaccatcataataacctacccagggggatggtattcgtcgttgtcactgcactcgccgtcctggggaaacagcggagtgctgctccgactcgttggcgtcccgctgctgggccgtggcgacgaagcgcagcctccggcggagaactgtcgctgctgttccaccagtgccattcggtcacgcacggcgccgcgagaagatggccttgcggcagcgcaaaagtcgaccattcccgcgagcaaagcggcggcgtcgcattgagtgtcgccggccgtttgttggtcgtggccgacgcccgcgctaagcgactgagaacgcatggaatgctcgtcagcaggcgcagccgcagtgagttcagcagcagcgaccgaggacgaggagagcaacgcgtcgttggcgaccagcagaggggagaatgcactcttggaacaacacgcggcacaagtgttgggctcgaagaacgacgcagtcgctgcatccgatgcaacacaatcggcatggacacgcctaaacgaaccggagggtaaaatccgtgaaaaatttgcctaaaatgtttgcttacatgtaacgttgagataagcacacaaaaaaagttttcgggattttcgtgcctataatgcgatttgtacttaaaatggaaatcataataagcgttaaa

SEQ ID NO: 4421 - DNA, 1010 bp, Heterodera glycines
ttgagcgggagttgcaggaacatgccaacccgcgcacttttcttccactccccggcactttcgacggaacaacggatttttacaattatttgaaatccttcaatcttgtggcaactgcacatggctggaacaccgtccgctgcgttcaaattttgcccttgtatttgcgcggttcggccaaggccatttatgatggcttagaccaaaatgtcaagacaaactggaaggatttagtcgacggtctcgcggacaaattgaagaaagtctcttccgggctgatggcacgacaaaaattggcgcagagaagacaattcgccggcgaaacattggacgaatttgcacaggaaattcgaagtttggtggcaaaagcctacccggacaacaccttggagatggacttggccaccttggctttgggtgatcgcgagaatgaagtgaaggaagaaaatgcaaaacggattcagcaattccgatcggaaatcgcgcgcgactttttcagagcgaatatgctcccggagataaaagagagggtcatgtacatggaggaacctcaaaacctgatggaagctcttactcaagcaaaacgagttgagcaaattcaaggaagcttggcgaatgatcagtggcggatggtgcaaagcagcaaaagcgtataaatgaaatcccgtggacagaaggaatgctagttctgttgcgaaaagtcgacaaaaaacataagttggagccgaactacaaagggccatatcgcgtaattagaattgagaagccaaatttgttgctaaaaaagttaaatcctgacggcacagaatttgaggcccatatggacagatgcaagccatatttccagcgcgaggtagaagagagaaatgaacctggcaatgaaataaaaacgagagcgttgggtgacccaaatttggaggaatctgacgacgaaagtgaagacgaaaaaacagctatagctttcttgagaacatcagacactgacgaagagtcaccaatgatgcttttga

SEQ ID NO: 4422 - DNA, 3303 bp, Heterodera glycines
tattgacttctccgaaaattatgagccctcaataatcccaagaaaccgtgtccaagcccattgggaaatatattcgggaggacaaaagccttacatcacggcatggctattcgaagaagagttacaaatttttgtagaggaagggacggatcgaccatacatcggtagtgaaatgaaaagacttttgaggcaaaatggtaaaattacggctgaaaatgacatggccatgttttggaactcgtttgaagagaggggacaaacttgggatgaaatgattatgccgattgttgaagtcactcatcgggattcttgggactttgctttggaaaatgtccaaataaactgtctaaagctaaacaaaaaggaaagattcaaaaaaaatgatgccgaaatattgtctactcataattttcaccaatattctcaccaatattcgccttatcttcacccattttcaaatttcgaatatttcgaccgtccatttcattgcacaacaaataatttggacaaattttccgccattttacagcaaaaacatttacttttataccaaatgtcacgccacgaagcttttattcccgaaaaagctcgcaagtcccgcgaccaatcgtcaccaactccgcccccgattttggtgtcgatttcgtcggacgaatcggctgaagaggcttctgaggcgggaaatcaactgaaacaacaacaacgtccggtccgaccacaggacggccgcctgcacgagttttccatgaaggaggtccgagtcctcagcacgacggatgagaaagcaaaggaatcgattcgggagaaggagatccaggagcttaagcaaaaactcctgcttttggaggccgaaaaggcaagtgatgcgcgcaaggcggcgaaagctaagaaagaggcggaaaagcgagccaaaaaagaggcggaagcgagagtcaagcgagaaatggaagcgaaagcccgtaaagaggcggaagaaaaggccaaaaaagaagcagaagcaaaagcgcagagagaggcggaagaaagagccaagaaagaggcagaagcaaaagcgaagagagaggcggaagaaagagccaaaaaagaggcagaagcaaaagcgcagagagaggcggaagaaagagccaaaagagaagcggaggaaagagcgaaacgagagagcgaagagaaagcgcaaaaagaggcggaagcgaaggccaaaaacaatctgagggctccatccgagataagcctttgtgaggatgagttagagtgggaagaagcggaaaaaaaagtgctaaatatattgaaaaaaagcagcgagatagctaagaaaaaagaagaaaagaaaggggaggagaaagttgccagaggaataataagaaggaaacttacggtgaaagagaaagaggaaaaagccaagaaagacagtagtgaggcagcgaaaagagcggaaaataatgccattgaagaaggaagggaagaaattcggaaaatcgtgagagaagcagaagaagaagcaaaaacaaagaatgagaaaatcggtgaaagagggccattgataggggagaattcaaaaaaattgattttggacacaatggagcaagaatatgtgccaggaaaagtggtgggctacatagaagacccaagggaggaaaaggaagaggaatgggatatggccagggcattgaaaaaccgttcaaaagaagacgaagtgcgaataaaaaagagagagcaaagagaagaggggtggaaagagctaataagcggagaaagaaaagcgaagggaagagaaagaccgaaattggtggaaaaattcgtgaaaaatctgttgggcccagctgaaaacgacgtcagccgaaatcccgggatccccccccccgaaggtagccgcagaggcccgacaccgattccttgttggaaccgctacaaaaaaaggcctcgcttcgtcagtccaattcgaaacatcagtccggtccgaacacgccaaagcacagttggaacgcagacgacaaacgcatggcccagctgcacaggagatgtggtggaacaaatgcaactgatgaagacgaagctggacgaactgatcgccgctctcaagaaaagggaggaagaaaaaaacaatggaaacaacgagcaaattggcgagaaggaagaacaacagaaagaaaatggaaaataggaaataggaaagggagtaaaaaaaaataaataaataaataaataataataataataattaattcttttatctcttatttaaaccattttactcaaaaaatagataaatcccttttcgcttttccaaataacatcatactcatttaaacaattattttgttttccttttttcttatgttccaatttgttcaccaatttgtccttttacttctctaccttatgccatttttccattccaattgcgcactcccctctcgccctcactctctcatctctctctctctttctccccccgccccaccgatcggaaatccactaactgaccaatttctgctgaagccaaaacagagggccaaatcagagccatcaaaagaagagccgaaacgacggtgaacaaggccaaacgcatttgaaaattttacgccgaaataattcactaaaaatggaatagctacaaaactgaggggaaatgaaaagagaagaggggtttgaaatgaacaccaccagaagatattttgcaaatgaccaacacttttgcatgtcgaattatcatctttccacatctaactttttctgctacccgaccacaacaacgatggagcggtcggtcgtcggttggggcagggggctgcatctctttgtctcaaaatcatttcattttctccattttctctctctctttaacgtcatttttcttcattcttctctctgctttttccccttttccacatcgctttgttatttttgccgcgagggcgcggcaatgtcgtcggtggggaatgtgatgaaaagatggtcattgaccggggttcccctttggcttggagttcttcccccttcctttgtgtcagcccctctcatcactttttgtctcctcaattgaccaactgcccctcccctttctgccaccctcaattcccctggcccgttcgttcattcattctattaattatccaattttgttcgcttggcttggtttttactcaacaaataaaggggacatcgaacagcgaatttggggatttggtgttttgggccaatttggccagcccggggctgcgacgaggggccccattttgggtgtccccgagtgccaacagaccccagagtatagggcattgtcaccattattataatgttatt

SEQ ID NO: 4423 - DNA, 3750 bp, Heterodera glycines
cccagtcggcggcgcccagtcgacccccaccgaagaaaggagctcaaaaaacgcatttctgtgttatatttaatcattccatatgcactgtagttctctagaaatctttatgttccttattttctgatagttattatggggggggggggggtgtgaagcctaattttagagggaaattttcgcgcattttgtggggatgaaaaaaaaagttttgggggtgccaaattttaaaaggtttgtttgttttttgggtgatcattggtggggggggggggtatacagcagcgctgtggtgtggtgatggatgagaggtaaagtgagagatagagaaagaaaaagaggcagaggatgagataagagtgccgcggggggggggggggatttgagagtatgcgatgccaaagtggtgtcctttcgttgaatgacgcgcggtgatggagggatggtcactccgagcaattgtttggcgtccgtaaaaacggagtgacctcaatggttggggggtctactcgcttttgacgactagagtgacctaacaagggggggattgattctggtgagtatgagttcaccactttcattattttctcttttttttcatcttacgaacatttggcttccccttcccccattaagtttctttttttagaatgaaaaaattgacgaaattgcaaataatttgagattacggacaaaaagggccgctttccaggtggcccgtggaacggacagttttcggcattggagcaaaatccaacttcaaagaggacgcggtggtgcgacgagccgacaacacattggtcaatgattgggaaaaacataggaggggggagtctgaaaaaggcattttttcgtgtgcttttccaaagacaaataaaagttttttgttgtttttagtaacgtcctctcccgccgcttttccacaatgatgatgaagccaaaaggctgtggtcggcaagcgattgatgaggggttttaaactcaaggggggagggggtcacaaaaatatgatggtattataattttgcgattgttaagagaatttttttgagggagtgaatgatcttaaaattaagtttttttttacagttggccaatgtgtgttcaacatcaacaaaaaaaagggccggagatttcagttactttaattattaattagaaaaattattgaaaaaaatccacgcattaccatatcaaatttatcgcagtgcattgggttcagccacgccgagagggtgtgacatatctcgtggatacaaattctcaccagattatattcattttcattttttgcagcaatgaactgctcgtcaaatttttttgattttgccgcaacttttgtccccgttttttttgcctgtaaacacgccggaacagttctttttgctttccaagcaaaaaaggttaggagaaagctgacgataaacgctccaatgtacgcggacgtagtggaaaattgcgagacgcttaggatgatcggctgctgctgccagttcattccgttgagccttccgccgatgctttgtccgatggtggcactgtccgtgtcgggcattgtcatcctcagtccggtgctaaagcattggttaatcattcgaaatgccaatttcagtcagtccgtacagattgacgcagttccatctgctgttgtggtgaatcgatgccctgtcgcttgcttccatttcaaattctcgaccatgcaaatttcctctttcaatttcattgtgccgttccgcgtattgttcatctgtcgaagaaaggattttttaatggattgtcaaaatcgttctccccacgggttaccccaaaaacgacaatgacaaaaatggtgaaaacgacgatgaatggtaacgatgaaaatttctgggagggggcctcattgcatttctgaataaaagagatttttgtaattataaggaagttaactttttcggtgtttagaaaggctaaaagaagatcagttttatttaagattgaccggtcactagttaaacagcctttaaaatattgttatatatattttttaggtttaacatttgagttttgtaccagttttgtgggagatctgacttttggggttattttgagattagtatttacggccttttccctagaacaaataaatggtgataatgtgaaagaaatatcgtcatatgaggtagataatgtcatgggtatcgcaggtggatgagcaacataattggaagtttttttgggaagtggatgaggtgtgggggcattatttttgtttgagtttgtttgttgttgttccaaaaagcccccaaacctcaaatcattgcacatggaagtcagttttttgtcggatgaacatttgtgatcagagaaacagtcggcggaaacatcgcagtgctttttcctttgatatcatcccgcagaatcaggcgatcattgtagatgatgaccataaaccatggttaaaaataagatttttgaaaaaacggcttttacattgtagagacaattaaaaacagagctgccaaattttcaatgcatatttggccaataaaaagtcatcattttgggtcaatttcagcattttgtgatatttaattccaagtaaaaaatcaaaaaaatgtttttttatttgctgatattttttaaaatgtctttttcttctaatttttgcttgaaggctgtgccaatgtaccacgttgagttggctcattcacacacgagatctctctctccccttcttaggcgaacctttattttaagaaatatgttagacgtaaataattgaataaatgcttgttcattatgcaattcttataatttgggcccagatttgttggattttcatttcacaataagtcgaaaaaagcacgcttaaggatggaaaatttttgaaatttttttgaaaatacggctctaaaacagtaaaattttggaaaaagaaaccataaattgcgcgtatatttttgcaaaaaaataacaattttccaaaccgttgaagttaaataccactttaatacaatctaaataaaatattgagttgttaaaatttaatcatgaacgaccattcaaaaaataaaattaaataaaaagaaaaggttgaataaaaattaatatgaattgtaatgaaaatttcatgaaaataaataaaatcatagtcataagaaaattagcataagtaacgaatttagtaatgacaaatcaatcaacaagactcacttaatacagttcaataatttattaaaataaaatttaattatcaatacactacttttttaaatgtttaggagaaaatattaaggcaccgaaaaaattcccggtatctgaagtgagatgaattttcatatattggcctatattcccaagggtcaatccttttgcactttacaagggaatattgaaaaattaaattgaattctcattatttcggttatggtaaatattgttaattctcatcgatagaaataacatttagtattatcacatatcattttttgtattctaatgaaacgttaataataaatgtttcaaaaataaatcaaattaaataaattctttttttttaatcaatggcttaattaataaaaatattaaaagtttacatattcttttcttattaattttaattaacttattaaatcatatttgagcaaaaaaagattaaaacgcctgcccttaataataatataagatgaaattgtttaataaaatactataatatccacttaaaaaataatattttcaattattagtataattttattaaatatttttttt

SEQ ID NO: 4424 - DNA, 1429 bp, Heterodera glycines
tggcgctggtggcgacggtgtcggcgctggcgctgctgtcgacggtgtcggcgctggcgctggtggcgacggtgtcggcgctggcgctggtggcgacggtgtcggcgctggcgctggtggcgacggtgtcggcgctggcgctgttggcgacggtgtcggcgctggtggcgacggtgtcggcgcacggacagggggcggcaaaaaatctgttaatcttatccaatttggaattaattagtgcttcagtttgtgtaaagaaatgctattatgttaaaaaattctcggtttttttttagatccggatcgattaccctcataccatttttctagggttgatattacttgtgtcgcggttgatctgccctttataaatcctaattgttgttcagaaaataaattgttctttgaaggaaaatcccaaatagtccaaacaataaatttttccataattttgcataaagaacaagttaaggcgattggcctgtagttcatggggttacttttgtccccttgtttatgcaaggggataataatcgattgtttccatatagtgggaagctttcctgtatcaagggagagtctgaaaatttcagtaacaaaaggagtaaacgaaagaaaacaattttttaatagtctaaaggtaataccgtccggtgatgtgttatttctgttaggtaaagttctaagaactttaccaacagaaataatgttaaattcaacgtcgtttattgttggagaagaaaaagaagtatcaaaatcaagagaataattatttacaatataattttcagaaaaaattttcgcaaaaatttccgctttagaaattgagtcagaaataaaagaagtattatattgaatagctggtggatcttctactggcttaaagtattttctaagataagaaaataatctattcttatcaccggatagtattttattttctttacgggtttgaatatttcttatttgagtcttaatatgtaaggagatacttttatataaaggttcatattttcctctattttctttcattagcttatatagacgtgctttttccctaattgaagccaataaatgcggtgggtaaaagtttttggcggacttaatagataaaatagtttcaggaatattaatttcaagatttcttcgaacagaactaaagaaaatagcatatttatcctcaactgtataaaatttttgtagtagttgagggagaaatgaggataaatatgcatcgaatagaaaggtattagatttagtgtatttcctaagaacaatttgtttcttggttgcattttgctttaaaacacaaaaatcaaaaagaattgttagaatgatctgtatctaaaagtccaccttttacttctaccgcattaattaagttccgttttttgttgaaaggattaaactaagaaaggattgttcccta

SEQ ID NO: 4425 - DNA, 3361 bp, Heterodera glycines
gggttgggggtcaattccctaccgccaattccctaccgccaattccctaccgccaattccctaccggccaattccctaccgccaattccctactaaggcatttgggccatctccgtaccaaaaaatttttcgaaaattttcggaaaaatttcaaaaacagaaaggggattttcaacattttgatgtttctcgtgaattataagacaataaatttttgtttaatgttgcagagaagaaaatgaaaatacttctaacaaaaaaagaaccgtacaaagcttcaaaacaatgaccattcatactttttcacaaatcgaagtaaaaattttaaaatagtgttttgtctattttagcagctttatccagtctccggattcttaaattggatcgtgaattttttttcgaatttacaattgatttcaaatcgctttgtaggacttccaggggcccgaaaattaggaagtaaggccggggaaatttcatacaagcaagtactttacgaatccgaagtccctaaagctccgggattttgagcccggtttcggattccccgggagttgcggaaatgggtttagaacctatttttaggagggttcaaaactcgaaaaattgagagatttgacacttctaacttttttaaaacgatcgaatcttgataaatttggtatcatccgaaagctcttgacgagctgtctaaaaagcagtgaataaattttcttgtgtgttttaatctcaatgtttatcaatattcaacacttttggtatggaaatggcccaaatgcctttggcggtagggaatcggccagtagggaattggtggtagagaattggccggtagggaattggctcgatcccattataaagaatcaggcgaataataataatctaaataaaagtgaaaataaatctaataaatctaaatctaagagttaaaaaatggtccgccaacgcttccatataacatttgtttcatgtccaattcatccatatatagacctactcacgcacacagaaaaattaaattttagcacagaaaaatgaatctatgggtaagttcgatataaatgagaagatatgcaaggtaacaaataaataatttttttttgaccgtaaaataggtaggtaatttgaatttggcgctattaaatgtgatttatttattaaaaaataaaaaagttaagaaatttccgctgacccacgaaatgtccaagtctcgaatttgagttttttattattcagatgggcctaaggttaggcaaggggtaatataaagggtatattcgtattcagcgaccccgaaaaccctaaaaatcctaaattagactcattttgtttttataaattttgaaaaattttggacatttcgtgggtttttactcttttggacatttcgtggcttggacactttgtgggggcgccgaaatttcaacatacatcttttacgataattatttattttaattttagcttaaaaaacagacatcattcagtattatttataagaacaccaaaaatggtacgtgttttaatttagtatgtaaataagcgcttactcgagttgttaagcgtgaagtgatctctattcatgtgggacaagcgggcgtgcaaattggaaatgcttgttgggaattgtactgcttggaacatggcattcagcccgatggaaaaatgccatccgaccaaaacaaccaagacgattcgttcagcaccttcttctcggaaacaggcaatgggcgtcatgttccgcgtgcggttatggtcgacttggagccaacagtgatcggttgccatttgttgtttttcgttggattatccgctgttttagacgagatccgcactgggacttacaagcatctcttccaccctgaacagctcatcactggaaaagaagacgcggccaacaactacgctagaggacattacacagtcggcaaagaaatcatcgaccccgtcttggatcggattcgtcgcatcgcggataactgcaccggacttcaaggctttctcatcttccattcgttcggtggtggcactggctccgggttcacatcgctgcttatggaacgtctctctgttgactatgggaagaagtctaagctcgagttctccatctaccctgctcctcaagtgtccaccgctgtcgttgagccgtacaattcggtgcttactacgcacacgactctcgaacactctgactgtgcatttatggttgacaatgaggccatctacgatatttgtcgtcgaaatttggacgtggaacgaccttcttacaccaatttgaaccgtttgatttctcaagtgaagcaatagctaatgaatgaatctgaatctatcacattttttaggttgtctcttcgataaccgcttcacttcgatttgatggtgctttgaatgtcgatctcactgaattccaggttcttttgtagtctgctgtttcttggatatcaattattccattttagaccaatcttgttccttatcctcgaattcactttcctcttgcgacttattctccagttatctcagctgagaaggcctaccacgaatcattgtcggtttccgaaatcaccaacatgtgctttgagccgtccaaccaaatggtcaaatgcgatccacgtcacggcaaatacatggccgtgtgccttctctaccgaggtttatcaagcctttatacaagtcggaatgttatgtttttaggtgacgtcgtcccgaaggatgtaaatgcggccattgcttcgatcaaaacgaaccgttcaattcaattcgtggactggtgcccgaccggcttcaaggtcttgaagatgtctcgtaatctattagatattttattccaggttggtatcaattatcaacctccgactgttgttcccggcggtgacgttgccaaagtcccacgtgccgtgtgcatgttgtccaatactaccgcaattgctgaggcttggtctcgtttggaccataaatttgatttgatgtacgccaaaagggcatttgtgcattggtacgttggggagggcatggaggagggcgaattctccgaagcacgtgaggatttggctgccctggagaaggtaatatttgcattagggaatttatcggcgctagtgtaaaagtgggtctttttgaaaattttttcaaaaggggggagggacccttttgttttgcaaaatttttttgtgatagtcacaaaaattattctctggggtttttggggtccccgatcacgaatctttcaattattttgatcaattccgatttcctaatctaaatttgaacaaaaaagcataatttgaaaaattcaaaatttcgatttttattcgagttcggattagggattagaaattagtcaaaatacatgtcagattcg

SEQ ID NO: 4426 - DNA, 2279 bp, Heterodera glycines
  unsure (1)..(2279): unsure at all n locations
ttttttatcacaaaaaaattttgcaaaacaaaagggtccccccttttgaaaaaattttcaaaactggtcacttttacactagcgccaatttatcaatttaataataatcctttgatattttaggactacgaggaagtggccattgacactgtggagggagatggcgctggagacgacgactattgatggaaaacattgttcgattaaattatattttggtttggaaatgttcttattgtattgctttattgagacgtaactgctttgatgctttttatataaatatgcttatcttttaactgtactttttttctgttgtaaaaatggggtgactagctcggtccaaaattgcgaaattaccatgaaaattgccaaaatatcgtcaatctcaaacgctacattaaatgactacctaatagtggggcgttacagcgtttcacggttaaaaccttataaggggacataccggaacgagagaggaaaaaagcgaagctcatttgtgagttgcacttttgtaaaaaaatgggtttttgagccatgggttcaaatccgccggactacaaattatttaaaaattgggtacttgtgcagtttacgccccataaaattttttcttaatgtttttaaaacaattacaggttttagaggtcgctgatcacgaatataaaattagaatcgtgctatttcgaatcccaaatccgaatttgtaacaaaaataataacaaagtaaacaaagatgctaattcactttaatattaagcttataagaatgttgcttattttccgcttaatacgttttatccatattgcagctatattaataatctacattatgacatttgaacaattttaccacacaaacgctttatgtttgttttaaaaatttaaggggcgtaaactgcacaagtaccaaaaattgtttctctggctttggacagccccgatcaagaatttgacacccatttcgccaatttcgaaccaatgacctgaactcagacaaaaatacaaaatttgattcaagaaaggaattagtgattaaaacggatgatcagaaaatgattcacaataccgtatatgctctaattatagcccagtctctattaatcccgcagtctccaattatccccccttttctgaggaggttgaaaaataatcccccatgggctataattagagcatatacggtaagttgccttgctttaccaactgtcgctcctgcaatggcataacttatatgcattttcatacctccagttcgatacgttattaatagcattttttgcgcatatgggagtcattttttcacgctcaatccctgctgcctattcttaacttcaacaacaatttatttcggaatcgcaatcaacaaaaacaatgaaaggaaaaatcctttatcatgcgaagtcagtttctatgaacgaggtctctctttctttccacggaaaagtgcgagcaatgacgtgttggcaactttgactactttgaaacgaactccaggaatgtctccaacggcatgtccccttttaaaaattcatggctcactccagcaaaaattatcagcaaaacgtactgcggcacacttgacaacatcgcctctctcaacaattccaacgaaacgacaacaatttttggacggcgcagcgcaattggacatcacagcactgctaaccagcactgaagtgtctgaacccgtgcgtgcagtcattcgccaactggacgcacttctcaagctcgcggtggacatggttcataagacgtcgacccaggacactcgcgcggtactggaggaggaccggcaagaacattcggtcgttctgatgggcgtgccggaatcggacagttgcctttcctctacacggcgcgcgattgctgaccaacagcaggtgttggacattctggacgtttgtgaaatcgaggcaatgccgaccaaggtttaccggatgggccaaagaaaggaaggaagaccccgacttctcaaagtggaaatgccaacccgaaagatgacacaaacatttctccgcaataaaaaccgtcttaaaaactccaaatttcaagctgtatctgtccgtnccgtctctctcccctgaacaactcaaggagcggcataatttgatcaattgttgcaagacagcccgcgaccaatttccaaatcacaatttcattgtttatgctggacatgtcattccccganacgatgtctatgtttttcgcgatgaccctggtaattatgcctgtttttgccataatcaattcataaagtcttgcggngaccacccata

SEQ ID NO: 4427 - DNA, 2384 bp, Heterodera glycines
ctgcttcaagcacatcaacaaatgtgactaaaagaggaagattaaaaagcgtcattgggccaactcattcagtcctaagccttcccctccccccaccagcgtctaactctactgatcagagtaaaaaagggtccaatcagagtattactcaaaatattattactcctccacccgttccaattccatcaataaatgtgactaaaaaacaggaagaattaaaaggcagcagcggaaaaactcattcagttttaaagcctacgtctccattaccagtgtcgaaccaaactacagtgtcacaagtgcatcaagtagtagctactcctcatgtaaaaaagaatgagaatcaaacagtttcatcgattaatgaggcgaaacaaatggaaattggtccgccaccaaatccactttaacaatgattttaatttatcaatgatttttaagggtttatataaaagcattgttgaacaaattttatattcatcataaaaatttattttgttggaactttgaaaaaagcataatttatttaccaaaataaataaaattgtattgaaaagggattcgaaagtataatataaaaaaaattctcagaaatacattgatatatttcttattgttggaatgcagtcaaataattcaacataaatatgatcccacttaaaaagaataattatatgaaatattcttttgaatttttataagagaattttattgatgcgcaagtaaacttttgttattttgacgcacatatgtatattatttttatattatttatatgaatttccaagatccgccttcatattgatttaatgatttttttacgtttattaatccctcgaataaaaatattatatgtataatttatatatatatatttttacaaaatatgaaaatatttaaaataacaattttattttttatcatcacttttgatgaaattgttttaattacctgtggtaatacgtcaaaacggagccaactaaaaagttaaaacaaaataatttaattgcttaaattaaactaaattgtttttcaaaatcagatttaaaaccgccctcaataaatccggccactggtgtgctagagtaccgtattgatatctatgaacatggacaattacagtcgccatctaatcatggtacagtcaataaaaaatttcaacttaatatttttggggatttcataacaatgacatttttttgcgggtataagaaacgccctggcggaatttaagaaacgacctagcaccatatataaaccatgcctttttataccaatgttttctttgaatagcattttacgagagattcataaaagtctattttatgcgcgcaattttttaataaaagcgagcaataaacataaaaaattatacaatttttggtaattggggcactaaaaactatttctactgtttgctctttttttacattttaagatttccgaataatttctttctaaaaaaaactaaaaaatcaaacaaattttctccggtggcagtttcggcaccgcctatttttgagggtaattcgggaattggcacttgagctacctatttttgaatttaagcttctaagaaccgagttctgaatttggtttcaataaaaaagtcaccacatattcccttcttttacattaatagacagtacgactacgataccgaactaccaaaaccaaaatctaccatatgaaaatgagcaccacattgatataccagaggattatataattacagagccacctgtcgaaggtttgtatttagggctccctaatgggaggttcaagcctaattttgtggttgtttgctctgaggctttttgtgggtttttgaaaaattacacctgaatacggtctcattttcacattttaaaaacaacctttttggcatttcttagcattattagtctttgtatattttttaaatcaaaaactagaactgtcacaaatggcaaatcaaatgaccgttttgtcttcatttacgggtaaaaaatttattacaattaaaacttctataaacaaattttaaataaagttaatttttaaaaatatatatataatatttttaattaagcgaatcaacaaaaaacgattccgcattactcaaaacaaaattcctttaatgtttttgaacatcgaatttctgtaccagaaccggaaacattttgggaacaattcggtatcattttcggtaaaattaaattattaactcatatttccttcatagaatcttctatttatgcctctaaagtgaatatccgtcaggaaaatggaattgaatttttgaaaattttgtcagatttgagtttaagcatgaattcccccaaattcaacagagtatttacctaaattggtaaataatttttaattaatttatttttccattt

SEQ ID NO: 4428 - DNA, 1966 bp, Heterodera glycines
aatattttataattttttctaataaggaaaatttttaaacctaaaattttatatcaacaaaaaaaaaaaattaattttggcgatcaatttttgagaaaatttttcaattcttattttacaccaataaataattaactaaagtaggatcttggaagaaaaacatgttttcttggactgtttctatctttggtagaatttataaacaagaaaatgacggaaacaatgtttgtttaattaaaaaaaaatttccaattaaaaccctaataattagtgaacagttcaaagcgaaaaaaatgatgtggataaatacaaatcgtaaattgcgaagagaacttggacttgaaaatggcaataaaaatggcgaaaaaaaatttcttgaacgacaaaacacatcaaaattaattgaattacaagtaaaatgttatttagaataagttattaaaattaatgagttaaataaatctaaattaattcctgggctttataatagcaaaaataattaaatatttagcacttagttttttattcacagagaataattatacaattaaaataataatgaattgttttaaaatttttaaataaataaaaaaaattaacaatataaatattatacataattagcattttgatattcatttcaatgaaaattattagcaattaaaattagcatattaattgttttaaaattttgaaataaataaaaaatttaacaagataaattatataattagaattttgatattctttttccattgaaataattgcaattaaaataataaattaattgtttttaaatttttaaatatataaataaaatattataaaattgtaattttgtaggaatttcttatcttttattcaatgtcaattgaacaagtgttcactttttggagtaaaacaaaagaaaatctgataaacaaaaaatacgataacaacaaatgcaatttttttctatatgcaaaagtaattaatttattttttattttttaatttcataaacaataaaattttaggtaaaaaagaatttagctgaaattacacgggaacgaatgagtgaatttgttgcgacaagaattgaactggaaaatatgtgaaatttcttgacaaaattaattaaattcacaaatttttagtagataagcaataagaaaatataaaattttactgtatttaaatgtatttaaatattgcctaatttgctagacttcattttttgcttttaatgaagaggtccgatgttgtaatttaaaatttcggttcgattaaaaaaatccgtgatttcaagttaattattgttgtttttgccacatggtttgataagacaaaattcgttttttaacgtgtttagtgttctcagaaccacttagaaacattgctgccgtggtggccttatggaattattttttaaataatcctccgccagcaggaggagtcgaacttctaataaagatgttcaagtcgaaaaataagccccaaaaatgtgtttgtttgtttttttaaattacaatttgtcctttgcaataatatccatgtttcatattatttttccttccatattttatttttcggcaagtgatattatgccagaatttaatttggttttttaagaaaaatttgaatatttctcagtgaactgtttccgctattgtaaattttaatgagtaaaggctaaaaaatatgacaaatatgtatttcattcatgacaaaaatttatgtgtttttaaataaaaataagccaaagaatcaatgggtgattttataaaaaataaataacaaataattaattatttttaatgaaaaaactcaactttattgagcaattattttaaataaattctcaatagaaaattattttcattattaaaatatttccctataatcaaaatgtttttgtggcatataatatttttctataattttatttatttataaaattgaatccagcaaaatcggaccacatttt

SEQ ID NO: 4429 - DNA, 891 bp, Heterodera glycines
tttagcaaattttatttgcaaggcaataattagcagtgcaaaaattctccgctggggaacgcatgtcggggatggaccggtgctatgacgttagtcaaaaaccatcaaatgcaaatatttttcgagataactttgctcaaaagctaccaaattttaaaatcttgatatgttcgatactaagtgttttctattattctgcaaaatttaaaaaagtttcattaagtttaaggaaagttatgacacaaaatgcgaaaaataaaaagattatacaacaaacaaaaagtgaataaaagcaattttcttgaatttttgaatatgttttctgatttcttatggtttagcaaaatatatcataaatgccatggtcattcactttttgtctgttgttgaatctttttatttttttccaatgagtttctaaaactttttgtgcgttaaaactcattaaattttttggactcaattgtaatttctttctaataacatatattatttgcataaaaaatgaatcaattggaaaagaaaacacataaagttgtataatgtagatgatcgatagaaagtgaaataaccacaaaaaataaacgagacatataatttaataaaaaataattttttcgactaaatttggcttcaaagtgccaaaagggaatttgcattaaatgtctcatttttaaatttaaaaaaatgaaatgccgaaaaaagcatatttttattttagcataatgttcgagaatttttaagtttttatgtgcaatgaatcttcgtgcacatttaagattaaaatgaaaaagaaattcataaacttttttcaaaatcaaccaaatttttagtcctttatattagggttgctccccgacccctcgggggggggggggggggggaaaattg

SEQ ID NO: 4430 - DNA, 5176 bp, Heterodera glycines
  unsure (1)..(5176): unsure at all n locations
tgtcgtggtccgagtaccatcgggggcacatgtcgggggtcgggtcgggggggagctcaaaatatcaaggtcggggaccccgatcggcggatgcccaaaattttagaaaaaaatcaaatttctttttcaatgctcgtaaataaattctcagaactcaaaaagcttctttttcttcacttaaatcaactgatgttagaattttttggtttggtgtagctttttcgtcaggtctggaatcgtcaaaacccctttctaagtacagttaaaccgattttcaagtatattagtgaaagattttcataaaattcaagtgccaaaaaatgcgaaaaaatggtaaatatttaattaaatatgttgaattttttcacccgaatggattttttccccatattttttttttgctgatcgttttcctcatttcgttgcacatcagggctggacgtaattacggattacggaaattacggcctttttggagttacggattacgggttacggattcttgggatttttccgtaattttgatccgtaactggctttttagattatttttcgagacgatttcttgcattaaataaaaattttttaaattaaaaaaatttttaaattacggattacgtattacgccaaattacggccttttttgacctccgtaatgacggatggccgtaactgaaaaaattgccgtaattacggattacggatttccgtaattgaaaatcagttacgtccagccctgttgcacacgcactttttgtggcgcgcttttttcaacaaaaaaaaagttgggaacagaggggctggcggtgccgacaggcgacgccaggaaaaaattggattatttgtgcgatttagtaacagtttttacaccaaataattccaaagtaaaaataatggaatcaatctcaaaaaaatttaaattattcaatgttttttaaaatgctcattttcaatttttcaaaatatatattctgacaaagattaattttttagcctattttggcgcaaaatcttttacaaattgcactcaaatcttcgaaattttcattggcggcgtctatccgcactgccggacacgcccaatctttttaatatgctttattaaattgcttttaaaaggtttattggatcatttaataaaaattgaaaattattttaaaaaattaaacttttgtaactacggattacgggaaattatggggtttttgtacccccgtaattacggattccttaattgaaaatccagttacgcccagccctgcatggaatcccctcttgtccagcagtccgggctgtagcccgccggcataacactcccagaatgaacttgtaatctgcgaaactgcttaataagataataggaaattctacaaggggattttgaaatttttcggattgggaccttgggaccaatcactaattcagtcttacaaattatttgacatctattaaaaaaaaatctctgtaggtcctctagcttagtcaccgtaactctgttgaatttaaatgtatttaaccctggcctctccaaccccctaatttgcttgatcttatgggatcaattatcacctcacttaatctattaatcttcccctcggcgggcaagcttcttctctatctcagtaattcaaatttggattacattgaagaggaaaatctgctcgagctatttttgaatcgtgaaaaataatgatcatgtgaagttatactgtaaatataatttccaataagaggcattctacgaataataagcaagacatcagttgcaatttttcatgaaaaatttgcggatggctttttcctccagttcacgatcagagaactggtgctccttggccattttccactcggcgatcaattcactcaactgatcagcactttgacgaagaaaggttttcatcgcaatccatgggtaagcaatcgatggcactgcagaaatcattggcacccattcatcaagcatacaaactgcaattgtttgataaatttttaaataaattttggcattttgtatcagcaaatttggtccgttctgctgtccgccattgttctcggcatgcatcatagcttcagttattgcatcgatgaatatatttcgtattttgttcgttgcgccaagtctgtaaattttttaaaaaaagtttaccaaaaggcatattttgggtaattttttaggaaatttattggcattttgctcaaatttcataaacaaaaataataaaaaagaaagaaccttgagtaattgactgcaaaaacattcgaaaaatcaattgaactcaagcaaacctttttgcttgaaaattcaataattttagaatagaagttatagagggccgataaaacataaattaattcgatttaaatttgttttacaattttttaatcgcgttatttaaattaatctaaatcaaaagtgtactaaaaataaaatataaaagaactaacgctcgttgtaagtagtcgcctgccatgctaatcaatttgtccaagtccatcttgtgttgcttgcttatcaagaaacaagcaatgttttgcgactgaatttggcttaaaagtgccaaaaaagctgatggatcaatgccgagaatgggctgttcgaccaatggcacaattgttatttcgacgacccattggaccaagtccatgtattccttgaccatatccatggtaccaaaatgttcggccgtttgtgtcttttataaacagatatttttattgtaagggtcggcaaaatgccaaaaaatgaacaggctctatggatgaagaaatattaactatccataaaaatgggtattaataaaaaagtcatcagtcacctttttaatccaaaaattgaaatgcgaaaactttgaaatgaaaaacttagacggtttccaaaaggttaaataacaaaatattaaaaaaaagaaaaaaaaattaaaatactaaaaatataaatatgtattttcagctaatagataaaactatggcattacaaattgaactcagttagaattaattttgttttatctcattttttgaccactgattaataaaagttaaagtttattaaataccttttcagttacattttgctcagaataactggcatttagaaaagtaacaaaatgttgcataaattgtgatagagctacacaaagccaagtcatcaatgcttcagaatcggatgtttcatttttcgtctaaaaacaaaatttggattttttattataatttcgaaatatttgatttaattttacttaacttaggagcagaaattactgcttcacaaggcaatcccaataaaccagttaattttctatacaatcgcatataaaagtagagcataataccacggttaatttctgatgggaattgactccttcaattaaaaataaatattttaaattaattaatcaaaatattgtttcataaccaattttagtggaaaatatatttatttaattatttgaataaatcattctcacaaatatacataatattagtcaaagacctcaaaaattgttataaaacgaaataaaattgagaaagacggcttataaaaaacaaatttattaaaagaatgttcaattttagttaactttaatgtactttcttatttttcttaaagatttctttcataaaaaaatttactgattttgtccaaacatcagctcaatctctctttgaatatcggcaactttcggcttaaacacttcaagacactcatgagcattaattgcagcaattaaccgctcattcaaacaattaaccacttttgctgcatcaatgttatggccaattcttgtttcgtataacacaacatttggcgtcaattcatttgatttaataaattctaattgtgtgtccactgaatgtggcataatgtcgagacaaaccaaactcaaatcgacaatgcgccgtacgtttatcactgaatatattaacaattacaaagaaaaaaagtttgaatttttgtttaaatatttaaaagaaaaacaatatatataatttattttgtactttttataaaaaccaactcatttgcacagattttactaatatttatccattaaaatggtagtgtaccagagctagtttcgctttcacctttcgcattttccacactttttggtcctttcacctttcacttttaggggtgaaaggttaaagattccgtttaaaaaatttctcgcctatcaacatcgacacaccaaaaattcaaaattttcttaaaatatgctttagtcatttttggacaaaatctgttaataaattgtagactagagcggtaccggtaattttcacttaatcgggtaagggtactgtgtaatagaccattattgtgcgaagagattgcagccgattcaattaaacgatttatgaatgtcagaagttcggcataaaaaccagcatttccatgttcaatgtttggcgtttgcatgccaaaaacggtggtgaactgttttgaagtgccaatgccaatttgctgttcattttgtgcacaaagcaatgagtttaccatatttgattgcaagtgaatttcatgtaacgtattattttgctgttcaaattgccgtcttggcgttggattggtttcatgattttgccatgtttggtataatgatggtccaggcattgaatttagctgataattttgaagttgttgcaatgatgcccctggcattgaatttggttgaaaatttcgttgtccaaatgatggcccaggcattgaatttagctgataattctgaaattcctgtcctaatgatggtccaggcatagaatttagctgattggcattgagcgtgtttggtactgatggcccggctgtttgattggataacaaatttgaaaatttccctcctgtccagtattgtacattattggcaaaattttttgcgtcactttccaataaatatgttggctggcttagctttcttcggttcctttgtttcttcggtttcttctgcacgccaagagtattcatctgactttggatgtttgagttttttggtgccatattgttatgagcaaattgttggtttgtggccaaaaagttctgctgattggacacattgccaatgttcaacccaaggtttggaacctgattctgatcagttgagctgccaaagtttaaaccagtctgctgagttgcacccagtttttgatgcaccaatgatcagnngtttctgtt

SEQ ID NO: 4431 - DNA, 1356 bp, Heterodera glycines
taaatgaacaaacacacgaaatatgacaacacaatccttctgagatttattaaaaaaaaataatattgtggtttgcaatatttcaaaataatatttgctagtcctttattattattgtttcatttttcatttaggtatttgagttttcgaatgattcttacaattatcatcagcagaaaaaatccaaccgttaatttgatttaaaaaagcatttgactatattaagccgactgaaatcggagatgatttatttcagataagaaaagaggacaaaagtggacaagtaaacattcattgctttaatcccccaaaaatattttaaatgatttttcaaatgcgcgaatatttaccgacgaaagcgttacaattggcacagaaatgttcaacatcctaaaacggaaaattagataataacaatttaaatgattgcctggcacgattgagcacagaaagggagcacgcagcagggccaacagccgacgagtgccaaagcgccgcaaatgatccaagtgagaaggcccggacgacggacgacccgagtgcgcaccttggcaaggcatcggaaagtcaaattggccaaatgggacagatcaatcggaaaacgaataggaaatgatcagtgagtgggaaatccgattggtagaagaagccatcgccagcagtaagcctatccaaatatccttctgtttttgagttcgggaaattttctctaatttttttatgaattgaaacaaatcaaaatggtttaatgagataaatgccaatttcctcacattacagtacccttttacaaaatatcattactgaagtccttttttttgcccattttttctgctgaaaccgaccgattggcgacagtttgagcattccaattgcatttcgtgtgggcccaatggaattgcgaagatcattttgacaatctttgtgaacacgataatgatgcaggagtttagcactaattgctttgccaattaccaacctgatgatttggcacattttgcccaccgacggggaacgaatggccgcccatgggaatgttttgagatgtgtaaatactatgaacggtgggaggcgaattcgtagaaaaaggaactgctgaaatggaggacacacttagaaatctgcatagccaatatttaaaaaagacaatccctattgcacttttgctgattacccccagggggaaggaccggcgtctcgaccgatgccgcgggcattgtttgttgcgcttgtgccatttgggggttggaagtacggcatttgctgctgcccaccgctgcttctgtcgttgctattactgcttgcgccccgtggtgtgcgtctgctgcgactccgacgaattgaatttgtctgccc

SEQ ID NO: 4432 - DNA, 2819 bp, Heterodera glycines
  unsure (1)..(2819): unsure at all n locations
aagtcattgcatttctgtaaatgatctcttgagattactttttcanctgtaattaagtcacttgccaatatcagttnaattattaatgcaaaacagtaattaaatgaacanatgagaaaaggccaaaaatggaggaaaaccatcagaaaaaatagtaaaatacgaagtgggaagagtaagcaaaagcagcagatgaaacaaaactgacaacggggcattgcacttttaagaagggttggcaaagggtaacttaagagcagaagccaagctgcaaccagcagttaattagtgtgtaatttgcaaaagatgcgaagaaacccataaatattcggaaattgttttgtttttggattttttgaaaagcgcgaaatttcaattgaataaacgggggacttaatgagccagcggaataaaagtgaaactctatttttccataatttatcaggaaaataactgcctctgtgccggttattgaaaggtttggcccaatgtttgccaaatgggccaaacgaatggcactgaaaagttcggcttttccttccctcactctttgcttaaatattaaattcatttgttcgtcctttcgttttgagttgttaaccctttactttcctctcccctttgatttccccccctctcaaatttttaattgtctccccggtaaccgggcatatttcctttaaagtgagtgcccttccccaatgatacaaaacgtaacgtaatgaatgctaacgaagaaaatacaaatgaattgggagaagcaaatggcgacgaaaatgggaaaaattgggggaaaaagggggacattcattaaaggtaaaagcgacaattatctgcaatttaatggcgcaataaaatggcaaataaagtcttaaaaaccctacccaaaaaattttgccaataaaatggccaaagaaggttatcattgtataaatggtcaatttgtgctcaatgtttgaatatgacttataggcaaaaattgaggctaaattcaacagaagacaaatgatgccaaaagcaaaggaagaccagcaggggccgtagcaaaagaaggtggtaatggttaaatgactgagatacgatacgataatttactcatttaacacatttaattgttctccctaatctatcattaacaaatgtccctggggcgaaacggggcggtcccttcaattgttatcctccccccgtcgttctcctctgatcactttttgggatttggccaatccaactttgcgagagggaccccctcaggcgtccctctgttcccgaggacgttctgggctggggcccccagttgtacccctttattattacccaataaaggactattgttgacggtataccatttgtactggggatgcgactgggaaaagggccccccgctacactacgaatgttaggaacacaaattggaaagatgagaaatggatttggacgattaagtgaaatgaatttgaagaaaaaacattcaattgacaaatttccgtcggcttattcaatttcgcacctgcaaaattgtccttttctctcagttcagtgtactatttcgcactttttgtgttgacaattgcacaattttattcaccgttcactctcccacccccaccccctcttcccatctctcagcaccaaattttcgaccaatttcttggaagtgaaaggaaagagtggggacaattggccgaacttcggcctatgaacattgcttcaacaggcgccgttgtgatgatcattaggggccgattggaaacaattagcgggatcagaaaggggattaaagaatgtgactaacaaatgtttaatgggaaaaatttgccaatcacgagaattgggccaaaaatgaatcggctggccagccttaaagtaatcaacataacaattaatcaggaatgtgttgcgaaaatcgccaaaatcgcgaaaaagcccaattctctaaacagagtaattaattagtaaaagacgggcgaagtaaagtcataaggcaaataatgaaacatttgtgctcaggcgaaaataaaagctcatttgggatcccgttaatcctaggccatttgatttccactctcgagactctcgacttaagaaaatattaaataattttcactgattaaatattaactctgtacaatttagtattaaattttcacaattttagcaaaaagcaatcacatatttctctaaccctagttctacaaaataaaatatcaccaattgatttgcactttactgactgatcagacacagctgaacggagagtcgaaaagtcgttccaaaaaaggcaccattggcccaaaaagcctcattacatcaaagagccgttaataattaattaaattaatccgaaatgaataatttttactacagtcgttaagaaccactaattggactaaattttaagtcggagaagattggcacgacatttccaacgcctggaaacactggaaaagagggagattttcaaattggacgcaaacaaagaattgactggaaaagaagcaaattggtggagattggcacgacatttcggacacgcggacacattgcgaacagaggacgaaatttatcggacaaaaacaaggaattgactgaataagaagagaaggtgactttttgttatcttggaaaacatttttgaaagggctaaggtggtagaagtttcctcattttccattcatttgttgcgagtacggtattaaaattgggtacttttgaaaagtgccattgcttaaaaagaagagtgtctgagatttgtttaaatcatcagatttaatctagtgagggctgacaaaagtggaaaaaggttactaaattcctgg

SEQ ID NO: 4433 - DNA, 4231 bp, Heterodera glycines
taaggttagggtggtcatatccattgaagcaccatcaattacaacaacgcaagcagtaaaaattgagctcacttagaatccgcgtaaaattgagccaaaggttaaagtggaaactccaaagtccttctccaaaggcattcaatttaaaagagtaagaaatgaacaacaaatttacaaaattatgggaattaggaaaggcacaatcctgtctactacaattccatttataagtacaactcaagcaccaaaaattacaaagccaaccacagtaagttcagtaacggtaccaaccaaatcaagtcaaaaaattatgaccacagtggccacgacctcgacaatttcaccaataaaaactgtgactaacaaacaaacagatttattaaccaacctaattggcgcagaattgaacaaaacgcttatcagtaagccaacgtcgcttacaaacagcacggcaaaaaatgatcataatatttctgtcaattctataaatacttttccgaaaaaggaaaaggagggaaatttgacaaatacttttaaaaaggaattaattgaggtgcaaaaaacattgatgaatgtctcaagtgaaataaaaaacagtggcaatgaaaagccagctcctataaatgaggaaatggattttgaggacactgaaaattctggtgacaccgaggaaattcaaaatggggaatatttcttagaaaatgaaataaatgagataaacccaggacctagaaggggtctacgatattgagcaattcaatttttttgaaattgacagaaagaaaaggactacaatggttaccactgacgagcagatgggttaaaaatgtagagaaaagcaaaacacgcagtaaaatggggcaagaaaacaaaaatttgaacacacgtgtaaattatgctctttaccgtttaaatgcggaacggaggcaacaatacgaacaaatatatgtccaggcatgcgaaaacacgaaatttcaattacagctcgcaaaagcaatcttacaaatcaacccaaatgagggggtgagaaaaatatttgacagggatgatttgattgcacgatgggtaggagaaaacctggaaattggcttttgtgttccaattatcccagagaaaattttttgggaccataaagttgacggggaatgttttgaatggttgccaattaacgcagaaaatgtgactttctttgttaaacctgggacaagagagttaagtgtattagggaaaaggattgattgtgaaaaagttgaaagcaatcgaattatggacaatgaaacacagttgattattgtcggggagttaagcaaaaatcttgaaaaaataaaaccaaaatatcgaaatatgcagaatccacttattttaaaagcggggacactttttgagtcggaaaatacacgtttagaaaaggcaatgctggaatatcggtccaaaattaacacattgccatcggcaaatttgagggcaattcaaaggcctaatatttctgaagttataaggctgataaaggaagaagcaaatgaaacattaggggctgtatttggcaaaacaggtgattggattgatatggttaaaaatattccagaaaaggcgagagaagcagttaaccacctaaaagggatttcttatttacttattttaatcccgttgctgttactaatcgctcttgtgacttattttgggattaaataccgagtaattatttgcgctggtttccgagcagggactcttttggtccgaattataaggcgtattcttggcatgaaaagacaaaaaacaagagtagcagcagttccaactgctcccgaacttgactcgatggaccaagaggcctatgtcttagactatcttccaccaagacgagttgcagtaattactaatgacccaagaagacttccatctattcatattcagataaacggcctctcaacgacggccttagttgattcatgcgcgagtgtctcttattgccgagaaaagacagcactaagagcaggactgaaaatttcagaactaaatgatgaaaaagttaatttattgacagcaaatgatacaaaaattcaaattttggggaaaacttgtgccaaaatcagaattaaggatgaaatgtcaggcaaaattcgtgaatgggatgctatacttttagtttcaccggacaaacactgtcccggtccagtcttaattggtttaccattactaatggagttaaaaggcataatttcgtgggcagaaaagaaagttcggttaggagaagtttggaccaacataatatcagttgtgggtgcagaaacatccaaaccgttacgaataacaatggaaaagaccgaaatttttgaaccctggactgaaaatattgtcatggctcgggtaaacgaagttttcccgagtgaacaaaatttcttggtaaaaggagtgcaacaccaataccctggaattatagtgggtcgaactttggttgcaccgggagaaagcaaaaacgtaattttacagctaatgaatgcggggaaagcaccagttaaaatttatgggaattcacatttggctgacttagaaacaattaaaataaatgcgttaccaggtgatgaaatctctcctaaagattatattccgccagaggcgagatggagtaccaaacttcctactctcccaaaaccgggattgaatcgccctccgtctaaaagaatatgtcttgaggggacgaaactgagtaattcgggacaaatttcgctaaaaaatatcgttgataaatattctgaggcattcgtcggtgatgacggtaaaattggactttacaacggccctatgcaaaatgtgatggcaatgcttctgagcatacggaacaaagcattggatgtccacgatgaagcacagaatgcttggaacgaattaatgaaaatgaaaggaaaaggggagaagaaagaggaggaaggcatggattccggacttccagggttttcaactgctgattggcaatccgatcatgaccgttggcgtggacaaaatcgttggcgcggcggaagaggagcaagacgttggggacaaccatggcgagggcgtgaatggaaccaaccaaatcaaggagcgggcccatcgacatcagcggcatcacaagaaggacaatggaatttctcaaagatggcgggatatggatagaaaattggattttgagttggaattggttgcattttagattttttttgggccaaaatacaacaaaaacaaacaaaaaaacaataaaaaaaaaattaaaaaatgcaacaaaaaattttttcttataattactttttttctctctctctctctctcttgtaatattttttgtattttcgggacgaaaatatgtcgggcccgggatgagatacgataatttactcatttaacacatttaattgttctccctaatctatcattaacaaatgtccctggggcgaaacggggcggtcccttcaattgttatcctccccccgtcgttctcctctgatcacttttgggatttggccaatccaaattgcgagagggaccccctcaggcgtccctctgttcccgaggacgttctgggctggggcccccagttgtacccctttattattacccaataaaggactattgttgacggtataccatttgtactggggatgcgactgggaaaagggccccccgctacactacgaaagttaattgcataaacctgcaacataaagtcgaaataaatattcgtataaaatgtccaaataatatcggtttctttggcaattttccaattcagatttcgtctaacccaaaagagaccatttgtccatgttcatcaaagcaattaatattttctttctgtctaaatccacataaatattttgaatattctttagccatcctaaaaatttatgaaaatttgtcgctagtcctataacaaattccgaaagtagagcatctttagtctaaaatttgaatttatttaatttttatttaagtgttaagtctcacccatgaaatttcatcatcgaatttcggttgcaaatttatataatattttggttcaaaataataattgaaaaatttgttgagattatattttttcgtacaaaaagtccaaatattttcgatatttttgacattctgtccgttcatattcttcaaatttatccgcaattttatcacatttccaattctttctcataaaaaatacaaagccaaggtgtgattcgtatttgttctttgaatatttactgatttg

SEQ ID NO: 4434 - DNA, 3857 bp, Heterodera glycines
  unsure (1)..(3857): unsure at all n locations
tgcatgcnnctgcaggtccccnctggacacatttttaaaaactaaaaaattttcaatgaacatattctggaagaatgaaaaccgggaattttttttcaaatttttcccatcaggggaataccgtaatctgcttcttttacaaacgcacatattatcttgtttcttaaacgaaagtattacagtgactaattaggttacgatataacacctctggtaaacgggggagtactgtaatctggtgcttctaccaatcgtatactaaattatttgtttctttaacttaagtacatatcactgactcatttcgggttacggtatgacctctcttttgtaattaactaaggcccgccctccttacagtaaactttttttgtacattttacagttcaaaaaccttggcacactgtccacattgcgcattggtcacacgttggaaaaagacaagacaaacagcaataacaataattttatcaataataacaacaacagtaatcaacgcttgtctaaatggtttcttaaacatgtaattattgtcattaaaaaataattaaatttatttatttattttagaaatggaatgccaagaataatcattttttttaaaattaaggtactggttcgcaattgtgtcactgcgcaaacattttatttccggtgagtttccaaaaaaattattaaaaatattattttatgacttaaaaaagtactagaataatccacaaacataggcattggaagaatggatctgatcaaaatatgtagtattgtaaagcgtgctggatcgtttcataaaatccgccaattttagcgatttttcgacaaaacatggcataactttgcttaaaggcaatcaaattttacattcttggtatcattcgatagccaagctttttctctactagcttgcaaaacttcaaataaaattatcaaatttaacataagttatggcagaaatagtacttattttcatacaactttttctaaaatttaccaattttttttttaaattttgcaggctaacagagaaaacgctgggctttcaaatggtaccaagaatgtaaaatttggttgcctttaacgaaaattatgccatgttttgtcgaaaaaatcgttaaaatggcggattttacgtaaacaaactagccccttgtaaaggtgaataaaaacacattaaaaactgtaaaataattttattgaaaaaaaatttgtttttttttgaattttatacacttttgccgaaaattaccgactttccgagtacctttcctgaacacacacagttgtggccgttggtttggccgtggcattgatgacggcgcattggagaggttgctcgttgcagaggcaattgtcacacgacggcactatgccgacggaagtgatgaggatgaaacggtgtcgatgatgaacggcggtggctcgcgcggaagcggcggcgctgaaatgttctcatctgtgcgtgaaaaaaagcgaaattttgcgccaactaatgaaatacttgatgaatttggctagaaaagtgaaaatttctaggcaacgcaagccagcccgagggtattgaaaagttgtcaccatgggaaaatttgaatttttagcggcattaagaaaacaaatttttcaaaaaaaaaatttttttttacctaactgctcgagaatttcgataccgagtcaaggaaaatattgagttttagggtctatgcctggaaccgagtctcagtgtcaagactagggtatctttctcgaatatcgagaaaattttgacaatggcaggctcatttcagaatgccaaatcggtaaaaagttcaaatagctatttgattttcaatggattttttaggggaaaattctacccactaaattaggaaattcatatggcgctaccttttccaaagggcatcaaatcggagcagtatctgctacagcatgtcgaaagcccattgagtgcggccgccgcttttttgtcaccgcgcaaggccaaattttccaccatggacaccagcaacagcacagcgagcgatggaaggtcgcgcgaccgttcctaccatcgccggttccgctcgccgagctgtgagcgtcggaacagcggcgacaccggcgtttctggcagcaacgcatcgaacaccagcggctgtcctggttggtgtagtggataccggaacaggacaaaacacagccagcgaaacacagtcgagacataacacaaccgggaataaattaaaaaaaaattttttctaagaaatttttcaataaaaaaatctttgagaattttatcttagataatttgaagaaaataatttcaaaaaattttccagctattttttcaaaatttaatgatgaataactaagctttttcaaaaatttttcaaaaaaaaatcgctggaaattttttgaaattttttcatcgaattttctaagaaatttttttcaaagattaaaaaaattttttatgtttattcccggctgtttttttatatctcggctgtgtttcgacggctgtgttttggggtacaccgagtggatactgtaaagggcaaataccgattgtaatatgcataataccattatagtagcctctaattagtaaattaattcggcaatcaattaacactcagataaactccaagtgttggagcatcgggtcggaattgctgtcaatgcgctgacaaagcatttcctcacctcaacagacaaggaccagcaaagccggaatgccaaactgagcacattgctttgctccgaggatggaggacttttgccatcgctggacggcattttgtgagacaaaatgccaatttatttttccaattttaaaacatttaaaaatgcctttatcctgaattcggattagctaatgtgcttgccatgacaaaatatttggccaaggcttaaatattctttcccagaattttacttttactatttttactttaatattacacactgagtaccgtaatttatctaccgtatttcaatataaataaataccgtaatgaaaatctatgcgtaaaaatttttgttaagcgaatatggcctcatacagcggttcttgaggccgatgtacccatgggattacattgaggtcaatgaaattttaaatttcgtttttaaactttacaatttatttttcagaaagtttttgtgtggttccgtaaatttttctgctctggtgaatcgaaaaagttcacacaagaacaacggtaagtggaggtgaaggatacatacaatatattgtcataatgccattaaatgaatgaataatgggtttaaattttcaaaaaatggaatttacaaaaaaatctcaaccaatttttatcacacagatcattgatcatctacacatataatttggtgtccaaaatttctggtatgtacgtcagactgaacaaattttaatactatatattagagttgctcggtaatcggtaattgttaaaaaaccggtaccggtactgaccggtactgcaaaaaccggtaccggtaccggtaccaattttttccaccggtaccggtaccggtaccggtaaaaaccggtaattttccaacgtaaaaatttttggacacaatttttcaaatacaaaatttttattcagttttcgcgcgagtgcctgttttttagcattagaattgttcagaagtatatgtatattgagggtgaccaagttttttttcaaattcaggataaagaacactaaaattcagatatagacctcaaaattcagattattgcaaaacaagggatcagcggacaattttccaattttgcgaaggggtctccggccatgtaaattaatgtaaatcaatgaccttttttgctttcaacaccgcttttttcgcggcacgtttttctcaagactttt

SEQ ID NO: 4435 - DNA, 4210 bp, Heterodera glycines
  unsure (1)..(4210): unsure at all n locations
accggtaccgatactttgatttctgaaaaaaccggtaccggtaccggtaccaaaaaaaccggtaattaccggtcggtaccggtaccggtaccggtaccgagcaactctactatatatatatatatatataccaaaattataatgatttaaaataaattaatttcaataaaaaaatatctaataaaaaaataatttattcaattttttcagcacataatgccgtcggcaaagaaggcaaattccatttgttcatccttttttcgctacggtagttcccaccatcatttttttaaataaaatcatattccgatcacatgattcatttgactgatcattatcgacaaataattaatctggactaattctttaaccgaagttttaatcatttctttttataaaaattgcttggacacataaaaatttgaaataaatattaaataaactaaataagaataacaaaaaaataaaataaaattaataaatttctattaaaatactttttcaaccaaccaaaaaagggatcacattttgtccggactgctcccattgatcgcatggacacaagtgaccagccaactctatgatcaaagtgcatttttgcgtcaaccatcaaagctgtcatatttgtcaaagctgatctcaacgctcaacgaatttcgtgagcaaaaaacaattaattatttatatataattaatcactataattagtgggtcattaattaatattagccttcaaaatgtaatttacaattatttattttttaagaatttctctatgaaaaatccttgttgcaaggcattgaggatatatgaagaacaatttatggttttttgtgtgatgtgtccatatgtaaaatcagatgatgtaaatcaaaaaacgaattaaaacaccataaatatatatttatatatataaatacatttattatgtacaaaatttgttgtatttcataaaacagtatcagattttaatgaattaaatttttctttttctttttttaaattttaagactgcccagtcaatttctttcacatcaagcggatttgaacccagaacccatttttaatgcaccgctaaatgaaaaattcacaatagaagtcgatcctgctctatccaatctatatatagcttatatgcaatttcacggagcaggacaaaacgtcgttggacgaatttttgggccataacttttttctttctccaccaaattaaacattcatgctattattcgaaagcatttgaaaaacgctattaaactagtaaatttccaaaaaaaatgtattcatgcacaaagaaatcagggcaaaaaaagttcgaaatactgggtttttgagttccttctggccataactttttttgaaacttaacgaaaatttttgaaattttacaaattaataataaaaaccacagagctatcgaacaacaccgaagaatgcttaatttgattgacaatgaacaaaaagttatggttcaaaaagtcttccgacgacgtttcggccgacgacgttttggggtgcaccggcaatttcatacatacatacagttgatatgttcccttgtaagcaccggaggtccggccgtcccgatatgatttacaaatcgctgaatattaattttttggctgttaaatttcaaaaaaaaaattgcttagtttaaaaaggttgtgcaccgaaaaggaggctttttcgacacttttgaccttttgtatgagatttattgcacgaaagggagtgtggagttggaaaaaaagttcgaaaaactagggtgaaaagaacgtgatcaaatgcatttcccggatataacctccaaaagtagatttcgtcaaaatgtttttttataaaaaaaaaaatcaaattttaattttacaggcagataaagaaatttatgtagataattaactttttattaaaaataaatatttcaaatttttgccataattttattggactcaaacaaaaataattttcttaatacgaaattagaagttttataaacataaaataaaataaaattaaattgattaaactccttaaaattggttaatgtttatcgaaatgagttagcttcaaaaattttataaatttttaaattaaaaattttgtaaaaataattaatattggttaaattcctataaaggctattgttcattaaattgagaaatttttaaaattattaaaaattgaaacattttttataaatttatatatttaattatcaaaaaacttttaaaaaccaagcagtaattggataaaaatgttcagaatttatgcaaaaaacgtgatgaaaatgacagccaattgtttatgttaaagaatgatataaaattgtaaaagtcaattatatccaacacatttaaataaaactttgaaaaaaatgctttttcaaatttttaaacaaatttgggaaggcaatttgaatttttgctaaaaggaaatgtttgacagttgtagtagataaataggaggaacacatacatatgataatggcctgtcgataattgctaaaaattggtaagaaatttttggatatgtatgaattttaaaaattttgtaaatttttttttcataaatttgccaaatatttaaaatttataatttcacaattatcgtactatttcagcaagaaagcaccacactcacagaatacggtatattatgaattgcaggacacactcacttgaaattaaaaaatttctgtgaaatctgctatttttgattttttttttttcagtattgtgaattaaggttctgttttctttgattgccattaatctacaaaaatgcaaataccgtaccatatgcctaatctttgtcatggcaaaactgtgatttttttcaaaaactaatctttcaagctaaaataggtatttaatttggaaaaataaaaagcatttttttctttttttacattttatgttacatttttcaactttttttttttgttgttgcacgttttgccattagcgcgtttaaatcacttcagctatcccgaattacacaacagctgatcaccatagcaataacagaaatcaccagaaagatgccagcgcccaccgtaccaccaatgaaatgaccaatactatggtgtgcaccatgtccattagcagtaatttgatgcattttgatggcacataaagcgatgctgccaacgcataccaatgcaattattagccacaaaacaaagcaacactttgcgttaaagcagcaacaatcgttgttattgttggtactgctacagccgttacagcaacagcaacaaaaatcgcaatcgccacaatcgcaacaatcgcaacgatcgcaacaatccaaatcgtcccgttttgtcctcctttggcctctgcttttgacggaacatttgttgttattggtgttgttgcttttgttggtaatgacatttttaatgtgtgcttaattattggacacatattttagcataaattatggatttaatgaattatttttagggttactccccgatccgactcgggggatttgccgaatgtccactgttgcactccaaatcggatgagagtgtctttagatgagttagtttctaagaatttgtgtaaaaaaatttctatttcaaanattttcnattctttatnaaaatttcnaaaaatntccttactnatganaatnttntttcccnatattattttcaaatttttccanccatccctnacaaattttntccnnnatttcctacccnatccccanntattctctncccnantntcnntaantaaccctaattatttttntttattttttttctataaaantttacttncnantttcntcaaaaaattntttccnaccaataaatntccaacaaatnctctnaccatttctttncttnttccatcnanaaatnncaattttttaattttttncnncattttttcaaaaatttcaanattaattntancaatttctntatttacaacanttttcttcatattttntnctatttcttcaatncttttnccttcttttaattttctncanaaattttcatntattttttntaaattttctccaatttttncnctttcaatttttacattacacacaatnccaaacanattcnntttnacctnttcaaacattttcttnncattttntttctccattnncaattttaatacattntccaccanctcatttactnatttnaacatttccacnnctnaacattaattagttaaat

SEQ ID NO: 4436 - DNA, 1450 bp, Heterodera glycines
cattgagaaatgccaatttttgaattttttgtggcattttttcaaaaatttcaagattaattgtagcaatttctgtatttgcaacagtttccttcatattttgcgctatttctccaatgcttttgccttcttttaattgtccgcagaaattttcgtgtattttttgtaaattttctccaatttttgcgctttcaatttttacatcgcacacaatgccaaacagattcggtttgaccagttcaaacattttcgtggcattttgtttctccaatggcaattttgatgcattgtccaccagctcatttgctgatttgagcatttccacggctgaatattaattaattaaataattcaaaaagaacttaattggcgacaattggttggaaaaaacttatttaaaaaaatagataataataataataataaaatatttaaaattcaaataattaaataccttgaggttggacctgacaacttttgcttgtcaaaagcaccaaaataaaaacaacaatcaaagaaaataagctcatttcaatttttgaataaaataatgctaaatttcgaaaaatttcttcgaggtccaaaaaaatattttaaatagaatttggagattttttatgtcctttttctcattttttctttcatgttggcaatctttgctcctaaaaatagatatgttgcccataagtcacgaaaatttatgatctcaaaaacctaaaaaaaattactaaaaatagtggccttaattgtgagcctgggaataatacttattattaagagtgataatttgtttaattgaacgcgtttttatatgacttttaaaagttaaataaaatgggctaaacagataagtgacggtagaaataatttttttgaaaaaatattaaattaaatcagatcatttttatgggggtccggcggtgctgataggcgccaccgggaaaatttttgattattttaatgcaatttattaagaaattttgctgaaaatttttacttttgggtttcgggggggggggaggcccccgaatctatgcccccagatttatggggagactgaattctttgggaatagtgttgctatattctgcactttaattctgcgacgaattctcgctgcccataattggtggagcaccccaaacgagacaattggaaagaatgatatgtttgtgttcggggcaactgccccgaactcgatgcgcctagatttatgcggagaccgatgccttagggagtagattccctatagtgtgtacttgaattatgagatggagttttgctccgcataattgctcgagtaccgcattcggactcttgaaaaaatcgattttgttgatttcggtgcggtccgctctaaccgatgcaatcagatatatgagcagaccgagtcctgcgcgaataggttccctatatcacgaactttaattctgcgatggatttttgctcc

SEQ ID NO: 4437 - DNA, 8481 bp, Heterodera glycines
ttagaactgacatcacaccgaaatcttggaggtctcgtcacaggactgttggggaatggttttataaaatatttagtaaattaattaattaattagattttaaaaaagtgaataaaagagtacgccaagagtgagaacagaagcaattatgaaaacaaggaaagaaagtataaaacaaagaatggcaaaaaaaagccaagggcaaaaattgtatttgcaaagcccgaataatgaaacgcttaaacatcagttgccaaattgggctatgatgaataattataagaattattgacaaatggaattaaacgcacaacaaaagcggaatgaaaagcaaatgcaagtccgcatgagaatgggccggaatgaaaaaagaatttacacacagcatccggcggaaactgagccacagtaccaaaaaaagatttgcatgtgtggctcagtggttttttgtaagatagtaaaagtgacaaagggcggagattcgagtccgttgtgctgcatgaatatttttatttatttttgtccaaaaattttaaaaaataaattcattctaagaatttgtcgaaatttctccgtgtcgaaaatattcagtgtcaaatttacccttgtcgtaattaaccgccacctattttttttttgccttttacaccacattttgttcaacgacacaatttgggcatatacagaaagaacgcttgggcaattattgtatatcagaaccatccatttcaaattgagaatttttattccaataaaaatatagacaaaaaatctactgtatattgtttccacttaaaaaaatgccatttttgggtttcatttttaaatattaaaaaattttatccgttttttaaacgacaaaaaccaccaccgtcacttacacaacttccaccacaagcagaagaccttatccggctcgaaaatttataccagcatccgtccaattaaaaaaattttttgtaaaaagcatttttgaaggagttcaaaacaaaattttattgaaaatgaggttttcattttacattgcttttgcctctgcttcttttcggttgtctgacattttgttggagcaaaatatagagtgtgtcgggaccgggaccaaaccacggacaactgagtacaactgagtaccgaagtcccggttttgaccagttttgaacgggaccgggaaattcccgggttttttcccggttttcccagccaaaaagtcccggtttttcaacccaaaaagtcccggtcccgacctaccctacaaaatattaagacagtttcgacagatttataatagctgagcaaattgaaggaataaaaaaaacaaattaataacatttaaaatcagcattcctttatatttttgaaaaaataagtgcgttttgtgctcctaagtgaggtaaaaagttgccggaaaaagtcttaactttaaatggagtcgcgccaaagtaacacctcatgagccgatttttgaggaaaaactatgcatataaaagacagcgaaagttgacacttaacgtcatttttttcaggcaaatcgaactaatggggaatgaaaaattcccgagatttctacccttattttcaaacgcttcgatctcgaactaaaaccttccccgaattagtagatttatttattcattttttagtcaaatatttttttggagcctcataccaggggtggagcgcgaccgcgatccgcgattcgcggcatttttgttattctgtgtattggaaccattttttgtttcataaatgcgagtttcgactttctgatccgggttcggggtccaacctaagtagaaatggatgtcagatttaagttccacaactcttaaaaccaataaaataagcacttctcgaaaaaacgttggctttttttgaaaaaggacgattagcatttgtagacttcaattttaccgtgcgccttttggcttttcacgtggcacctaaactgtcaatgatcatttaaagcctacaatttgatcaaatttcgatttaagcggaattattattttcaatggcatcggccgtcaaaaaaaggaaaaaattttcctccgacaatcgccgactcatttcttctaccggaattggtgaaaatgaacaacagaaatcacttggaaaacgacgaattctttttcgacatgcaaagaaaatgaacaatcgaattttgaggaaaatgtgagaattttttggcttaataatttatgaatttcattttaaagcctctcaaaatatttttcccgcatttcagttggatttgcactgatgttttgatggacattctgccattttttgaccatgcccaacttggcctcaaattggcactgatttcgccacgtttcgatgttttagtggacacgcattttgatggcaaaagcgaatggcccatttggaaattagtcgaaattcacaaagaccgtgggtcggaaccaaaacttcgtgtgtttaccagctatgtcgattttaccaatattatgaattttccgttgcccgaccgtccgctgcccgagaaaacacgctttaagcgtcttgttatcatgtaattaaattaaaatcattgttaactgataaaagcatcccattttcaggtacattgatcattcagtcatcgcatttctccgctcaaataaacaaattttcaatggaacacgattcgcattgagtttgtcagtgcaggcgtccaagaacgctgcccagccgatttgggatgttttggcacgtgaaatttggccaattattgcgccaaacattcgccgtttgtacgttcccgatgctgaccatttggacaatttgcgcagtcgcacttcgccgacaattctcacggatttcaacattaattccatcctttctggtcatctgttgcccgatgtgctcgatgattttgatgggccaaatgcaactgcttctgctggccaatcgttgtccaaatggttgcacactccgaccaccgacgggaagccgaagcgattgcgttgcgatgatttcaacgggcaaggaaacgccgaatgggtccacaatttcaaggaggtgctccttcttttcccctattttgtcattcatttgcatctttttcggcaactaaattttcaacatttaatgcgatttgcttttaatgtgtccgttttcccattgtttagccgtttctccgtgccacttcttctgtctgctacataattcaattctttgccttctcatcaacgccaattgtgccatttgaattgttgaacgaacggaccaatgagaagttgacactgacaatgagcacagaatacatatggcttctgatgcggtgccaaattgggcagacgtttcaatgggatgccaaaaatttgaacttttttgtcggcattcatttgtatggttacaaaaaatgcattgggtgagcatgaaaacagaattttttaaaatacatttaaaactcgaacttaaatttgaataaaaactatgttttaatttttatttttaagagtgttcatcgaattaaaattgcacttaatttaggccattgtcaccaccagtggcggctcaaagcggcggaaaagggcgtcgaattgtgcggaagtgaaatttaattaagaaatgatcggctttttggagattattgaatggacaaatttatctgttgatcatttttgatactcatttttgctcgttaatctgtgaatattattttcagggtaaattactaatttgaaattcattttgaggaccaatggaggcaatcatgtcttttactgggacaccctcgtttgggcgccagcccagttttttctaaattctgcaggctaatagaggacatatagggctatcgaatgataccaagaatgttggatttggttgacaaagaaaaaagttatagtccaaaaactgggttggcgcccaaacgagcggcgcccaaacgaggtggaccccttttactggtcccgaaaaaattattttttaaacttttctgaaaattctaataacatatttcttggtgtatttggcgctgagcacgaatccgacctccttttagcgaattccgaacccaaattcgaacatttttcgaaaaaaatttttgtttccgaaagtcacgaaaacacatttccaagggttttcggggtcgctgatcaaggatctggcatccatttcgaccaattccgaaccccggacccgaattcgaataaaaagtctaaaattctaaaatttaactttttatattttttatacacttgccattggctttttaaaagttgcggacttaagtttccattttattttcataaaatgaccaattggattcaacttcaacagaagaccagctggggtcagatgcactcatcaagaaaattgttaaactacaatttgcgtcaaattttttgctgaatttgagcagaaagcaacagaagaaaattcccatcgatatctcaggacaatacaattttaggacgacagtcaaattcgtgtcagagagacttagaaaagcttattaacttattttttggctttttaaaatttcaaaatttttttgaaaagtggggtgccctctacaaggtgtccaagcctcgaaacgtgctgacgcgtttcgtaaacgtgccaaaatggtgttgcgcgtttcgtaaatccgccaatgggttcgaaggaaatctggaagccttgtcataaatgaaattcagaaaattttaggttatgatattttttcgtttattttttgtttgttaattttattttttgttagtattattcctttttttcggcatttcggcggccatttttatgatttgtcattttattttttgtgcttctagagacccaaaatttgtgaaaaattttaatagtggcgttattttaactcactttttgagtttttgagtgactgaaaatgcaaaaaatgctcagataataacaaataatgcaaaatattgaaataagtaaaaataataaaaatttatttttatatttaaaatatttttaatttgccatttttgacattttaattttacattttatttaaatgacttttagcaaatgagatgatgactcaaaagggaacacagcttgttcatttaattgcaattcattcgtttttcttttaagattaaatgtgacttttccattttgaaatgacaattttttttgtcttttgcaatttatttctgttcacttttttcacattcttttaaatttttcaatttgtgcagtaaaatcgctttctttcatttgcataatatttttgcattgattttaattttatttaatcaattcttttgtatgattccgataatcccaatcaaatttttaattttcttttaataataattgaatcatattaattttattggtctttttgccaatttgagttcttttcatttacattttccatttttcaattttgcatccgttcgtcgaatattccatcagattatggttgaacttttgcattaatgttcatggaaaaataagcaaaatgtcaattaagttgaaaattctcgcaaaatgatccaaaaataatattaaatagaagaaattgtttaaagggaaattagaagagaattttatttatttgttcttaatataaatttgttttttgtttggtaaataatttttatttgtttttattttaatttatgcatcggtcccagccgaaggccaaatttggacccaatgctttttctgtaaattttattttaaaaattttccagggccctttttgcaatgtattaaccaaaatacactaaaatttccatttttggcatttttctttttgtgttcaaataaataataaatttacaacaacaacaatttttattgctaacattttgttgttgctccgctgcttttaatgtccaactcttcaggccaaaaggcaaacattttgaagtgggcccctcaattcatccaatctctgaagctccgacaaagattttatgttgtgtattgtatacaatttcttttcctttccatctctctcttctgtcagtaggaatttattggaaatacttaaatttcttttttccgcaacataacgccaaatagggcatttttggcaaaaaacaaaaatgaacaatcctaatcagagataggaacagaaatcggaaggattttccctgctgggtccccccatcatgttccgggtgcatatactctgttcataaatcaggaagccaccgaattttcccggcggtgtttatcggcaccgccggcggcccattcttttaagtttttgtttaaatcgcttcaaaattacttatttaatcgtaaaaagttgaattttaagctataacaaaacgtatgaaaactttttgttaacgtttgttttctcaagaatatgcaaattttggttgtataatcgtttgcatatttttaatcccaaaattttatttttaatctgcggaatagaataaaatccaaaagcatccctaaaaatgtaaattttttacaaagaaaaaacaagtttttttttttggaatttcctagtagattcaaaattttcacttcaaaattgagctttatattaatataaaattttattttttgcaatatgaatattgcttctttggcttttttaaaaacttatgtgtttaagattgaaatttatatcaaattttccggttcgaaaatacaaaaatacacataacaaaataataataataatttgttatgcccatttgacgcgccatttcaatcatcctaattaaaccaaatgggtgttgctttgtgcgcaaattgcgtaaagcggtcgcgcactgtgctgatccgccgcccaacaattttgttgattaatttttttgtcgccaccgcctacggagatggaggaaaagccgatttaaaaataataaaaataatggaaaagcttcccggaggggcgcacaattttaccgtaagaaaaccataatcggttggcactttcacatttttcatatgtacactttaaattttcattcattttatacgaagaaaatccactcactaaacgcaaatccttgcattttggtgaaactaaatcttttcatttttttctctccttcaaaaaaaaatactgtctctttattttttctcgagatattataaagttcaatgtctaatatcgggagcaatctcaagattttcaaaatacggataaaaatatgatttttgaggtaaacatttaaaaaacgacttatctattttaaattaatttttaaataatttaattgtatatttgcattgccctttataacaaattgtgcgcgcttttcacagcctcgtttttatttgaaagttgacgaaataagaacaaaaaggtgtcgttcgtacccgaaaacaagaacaaatattacaaataaggacttcataaaaggccagattccggcgttcattagagctttttaagtggacaaactttcaaattccggtgctttcacgtccgtctatactgctgccaatccgaccattttttccgatcatttttcctaattgtcccctaattaacacattcattccaatctgatcactcccttatacaaaattctccctcagtgaaaaattcgttcacattgtccacttcctcccccgcccccccccaaatgtccaccacccaatccatccgtccgcgtcatttgcgcgtattttttttcttcatttacatcttctacataatgaacatgacgctgatggttgtgttgcagaactttgtttgcactccaccaccacacaatcacaaaaaatcgcgccgcgccgctgttgcacgcgcctcaattgtccacctcaaaaaatacgtcatcataatggctaaaatatgtaacgggtaaaatgtgaggcaaggagggaacgaacccacgccaccatccagcagtacggggaaagctcaaccactgagccatgttcccgacttcaaacagatcgttgatattgccaacctcggcaatcctgcattaataatccgacacttaatttttagaaattttatgaaaatgttagcccgtccaattttctaattgggcctaatcaaaattaattttaaagagaatgcatcgaaccaggcctcttgcaaaaactttttttttttaattcatcaaattcagaaatttggcatcgagcaaacaaattaaacacttccatgctctctccctttccgaattctgacaatttctctccatacttttccttttaatttattatacatatattattttttttattacaaaaccaatttaggaagggggaggggaattaatcatcgtaataatttgtaatttgtttgttttgtcgtatatataccgcttttccccgccggcggttcgtccctctcccaattttctcataacaatccatggaattgccccccccccattttttggtgattcttcggcgtgcaattagccggacggatgaatgaattgaatgaatgaatggatatgcttttcatctttcttccaacaaatgttacacccacaaaagtgtcttttgttgttttgatgggacgacgaagggtgcggttcgggcgaccgccgacgcttttgcggcgag

SEQ ID NO: 4438 - DNA, 1735 bp, Heterodera glycines
  unsure (1)..(1735): unsure at all n locations
ttattttttcaatttccaatttnttcttaatgcgccttaatctgttgcggtgccatgcccacatatgatntatttcncaaatttgcctgttttcaaatntaattaagtaattaattaattgtgtcctcctatcctctttcaattgatcacatcatccattttgatcgatcaatttgctttgtcccgcgcgcgaatcncaatccaccgacgcgacggtcccattgtctcacacaattgagcaaaaaacccgaccaaaagagtgtccagctgatcgcgctaagtccaccgtgtgatcagcgccagtgaaattttgtggacacaatttgagtaaacattttttggccttcaataaaaaaaattgagagcgaggatttgcagcattttgcatttttgggaatatgttttaacaaaaataccaataaaaaattcattcatctaagattggcatttcaaattttcaaaattcgctcaaaaaaaattaatattttccgaaaaactttttcttttttgaataaattttcaattttactgtttaatttttattataaattcgactaaaattcaacagggtttttcttttccctccctatatattggataatcaattaaatatgtatcaatgtggagaaaagaatggtgcactgatgatggcatcagcagaacaccacgacaagggcggcaaaaagttgttggacaacaatgatgacggtataatattgaatagtaaatttaaatgcattttttatttttaaaattgcatactgtaaattaaattgtactgtatgcaaaaagtgtcaaaagattctttcaaaatttatcatgtgccaaaatgtatttagtaaatctttagctttcactgttggcactttttggcaatatttttcgaaagaaaataatattcttgatcaatatttggtgattgaactgatcgaaatacagccaaaaattgatttttgtttaaagaagcattgatcagcgccgtctttgagtccattcggttgccggaagtgcgttttgcgccctcaccgcccggtgcggtaataattgaggacgcggccaccgcgcgctcaacgcccaacagtttgacgacgacaacgccggcaccgccgaacagcatgcgaacgacgaccacgaaggggccaacgatcgctgagagtgatcaggcactgaagctgcagcagcggcagaagtcgccgaccgcgccgccgcctccgcgccgctcggtgcgcggccggcagcagacgccgcgcgacgtcagcgcagtaattttttggcgcgaaattaaaaatatacacctaaagcagggctcggatctgtcctgatttatcagatttgtcctgatttgaagggtccaaatctgataaaattaaaatgtcctgatttgtcagatttgtcctgatttggagggagtgacccaactttgtcctgatttcttaaataaacttacaattttgaaattttatggcataatgtcactattttatcaataaaatataagatttatgacaaaatttggttatttttttaataaaaatctgttaacaaatcgattaaaaatccaaaaaatttttccccccggcggcccccgtcaccacggcccggccctctccccctcgcccatttcctataagatttttggaaaaatgcgccgcaaaaaattcttaaaaatctgattttttgattcccgatgcgctaaaattgatgatttgctaattctcccccaaaattgttaaaa

SEQ ID NO: 4439 - DNA, 4726 bp, Heterodera glycines
aaaatttacgaaaatctatgattttcaaaatcaatgatttttgcaaatctgatatcagattcgtgatcagaggccctgaaaacccccgggttctcatattcgctatcagcacattttttaccctagaaaaaaataaaacaaaaactttaaatttatttttcgtagggaccgcaattccacacattggcagcatttgttgttgtaaataactcacttcagtgattttcttcagaatttcacgaaatcgcatattcaacgcatccgcctttttcttcagtaaactatgccctttttgagcgcctttcagcctcgttttcatcacagtttgagcccttaatgattatttttggtatggatttattataaagtgtaagcgaaaactcacatccgtgacggaaaaactgcaatccgatctttgccaccaccagacatgtttaaaaaaaattatttaatcttattgtaaatcacttaaaaaatgtacattcattagacaattcgcttctttccgagcgagactaaaaatcatattcaaaattcacttttttgcgccaacaacaaatctaattttaaatctgccaacttcattcaaaatttgacttttttcgtgaattttttgcaatttttttatgactttttcgagattttcgtgatttaagacctaaatttcatttagaataattattttcaaattttggatgctaccgggtagcaccaacacagctccatcgggccttgccaacgcgttaacaaacgagtttggaggtaataaacgcggaggtttcatttgtcatacaagcattagtataaaatcgctgaagagaaaaaaacaagccaaccttcaattgttaagccccataattatttgatttcttggtaatggtccgtaataaattaaacatcagttcgggtggtttcattttttaaattgtccagttccagtgagcttatcccaatgcttatgctcatgacatgacaattggtcttccaaattgtttatagaagacttggccaccgcggtgttcagtgaggacatacaggaagaagcgaactcatattttcaacaggtttcattttccctcaactttatttgattaaattttcctctttttgtgtccatagatttatgctccagatggtcgtgtctctgtcaatgatttcatcgcaaaactcaaaggttttcggcattctggaaacatcaaagagcgcgtgagtgttttgtcaaccaacgaacgataattccttctcccgtctgatagaaattttttaaactatttttttttaatttttaacaaaaaactttttcaaagaaaatttacatctctttctaggaattgctgctgtgtgtggtgaagaacttgtttgatgagtatcgcttttttcgcgaatatccggagagggaacttcgcaccacggccgaagtttatggaggaatcattcgggaagagataattttgtatatatatatataattttttactttttgaattcatcgctttcaggcagccattagttaaaccattcatttaggaatatccaatttgcgactgccattcgacgtgtaattgaatcgctgaatgacgagccgggcagcgtactttggacgtttggcattgtggcactgagtgcatgtcgcgcatgtctctacaaatatcccaaagtgtgccatatgatcatcaacacgaacagctatggccggttcccgcccggtctgaaggactacgtcagtgccggtgcgctgggccaactgccaatgaatcactcagcggcacatgacgtcggcctattttcgtccaaccaacaaccacagccgttctttccgccatcctctgttgaattcagcgtcccaattctgccgatggcgaaaatgtccatgccgggccttggtgccgccgctgcgaacatgcgatttaccacgcccagttgggggacgagcacggtcctccaaacaacaaaaaacacgggttttttctgatatttatatatttagggaaattcaattttgaatgtgaccaacgtggacacgctgatctcggccaccgaacgcgagggcaaccaagtgaaacagccgccacaacaactgttcgagaaagttgcattcacctgcaacaatttgtgcgcgaacaatttactcgacaaagtcagtctgtgtcgtgatttgttgacaacggatggatgatttattcaacattttgtttgttcgttcagactcaagaattgactcaactgatccgcgaaaacggtgacgagttcttggaatggtttgcccaatatttggtgatgaagcgcgtcactgtggagcacaattaccaacaactgtacaacagcttcctggtgttgatcaacaacacctcgttggacaactacgtgaagaaggagacgtaccgcaacatcaacattctgctcaaaagtgataagcaacagtcggtgtccaattttggtgaccgccaactgctgaagaatttgggccattggattggcattattaccattggacgagatcgaccaattctgaacaaggacttggacatgaaatatctgctctttgaggccttctacaagggtcagcatgaactgctgtacattgtgccgtttgtggtcaaatgcatcactgcaagtgccaagagtcaactgttcgggccccactgtggttgggtgtacgccattctgaaggtgctcgccgaaatacacaacgaaccggacctgaagctgaacttgcgttttgaaattgaagttctctgcaaggagctgaacgttaacctgggaagcattgaggttggcagctacctgaaggagcagcgacgtttggtcagtgtgaaacaaaagaaaattccgatgattgagcaaaatctcctttaagcccagattggtgccgccctccaaactcggcacagccgcagcatcttcaacattggcacaatgtcagttgccgccaatccaaccaccgcacattggcgctgggatttcgtcacacagcacggcagattatacgccaactgacatagcgaacatcctcgctgaaatgagcatctcccggaaatattcgccggccagttatacgcccggcggatcgcaacaacaagtttcatcaataacagcccatcagactctgcccaccttcaactacgcggacattgctttgcaatctggtacatatttatccattatttaattattactaattttactttttaaggaattttgcaaatcatcgtcattcctccgcatttgatgcttttccaagttcatccacagcttaaaacaacatgcaaaatcgctattaatcatgcaatcaaagatgtctatggtaattaattcatcgtaatacattgaaatgtactaatttattatttatttattttttgggtggcgtcgctgaccgcgcaattagcgttgcaatcgctgccactgaacaaatttgtcgcaaggacttcagcctggactcgaatgaacaaaatttacgtcgtggagcccaccaaatgatgcgttcaatgactgccgctatcgcgtcaattacgtgccgtgaaccgttgtcacagcaaatgaacagcattctgagaatgtatctgaccgacgcgatgggaaatgttgtgcctggaagcgaccaggccaaaatggtggaagaagcggccaccgctgtgacggacacgaacataaacatcgccacaaatttcgtcgtgaaaaacgcatgcgaaaaagcggttgccgacattgagaaaggacttgagtcggaatatatgtcgcgcaaaactgcttcagacgaccgtccgttccaagttgacgcggacatggccgagatgagtgaaaaaattccggaaatgatcagactaaaggaggggccgatcagtgaggcgatgctgaaggtgtacgacgacttttcatcgtaatgaaattttaatgattcatttcgtccccattttttaatattttattggaaaaattgtaggaaaatctgtggcttcaaaccattcgcacccgaggacagatttatcggattcacaaagcctggtctgatgaacacaccgaatgctgctgcttctcgaacgccgacaaatgtgctcgccccaccgttcatcccttccagtcaaatgtccgatgttcgtcttcctaccaccactctctatggcgtcatcccttcccatcatccgccacccattggtggttattccgccgcgcccattatgtccgcagaacgaatggcacttccgccaggcattttctctaaaggccgcgccttctgcccggcgccaggcaacgaattgggcgttcagacagaggaccaaattctgcagagcaaagtggagaagatcctgcgcgaatggatttccatctgttacactccgatggcgcaaaaagacccgcaacatgcactcgcttatatcgtccaaagggtactttcgagggtttcgaaactttttttggggaaacgtaaattttttgaaatttcgcggggttgggacgaactaactgctcccgttttttcattagttttgctatttttactcttattgtttgaattttaaaatttttaagatgcacgataatggagttctcgccacagatgaaatgatcaccaaattcttccgtctatgtgccgaaatttgttttgacgtgtcttacagactgttgaaaaatgaaagttcgggtcagtcaacggtggtcggtcagcgctgttattacacgcttgatgcattcaccaagcttacttggtgagtataatttttacata

SEQ ID NO: 4440 - DNA, 2012 bp, Heterodera glycines
gaaaaagattctcgcgattctgacaactgctttaaacaacgaccacgagcagcaaaagtttgcttttaatggacttccattccattggatcgtcgtcatcgtaatgaaagagctaccctctaccgacgcagtgttgtactacatacaattgtacatgtaggagtcaatagggtattgatcatatacatggacaaggaggagatgttggatttgaaatcccccctccccccctccctttgtccaattatagtacattgttcttgtacattattgtttgttccctttagacaagttctttttctgctgcagcctcgccgtgtgcccggctttgcataccattggttggacatcattggccatcgcaatttcatcggtcgtctcctctcagagagccgggatttggcccgtaccagtgcgatatacactcaactgcttctgtgtcatctcaagtttttggcaccttttttgcgcaatgttcaactgccaaaacccattgcgtacatctacaaagggactttgcgtgtgctgttggtacttttgcacgactttccaggttttgcatgtgtttgcaattacgccattcattaatctttaatttttaaccagaaattctctgcgaatactattacatactgtgtgatgtgattccggcgaattgtgtgcagttgcgaaacttggtgctcagcgcttatccgtgcgacatgcgtcttcccgacccgttcaccgagacaatggcccgggtataataaaattttgaaaaaattgctagaagtatgtttcaaaaaaaacttctcttgtaaaaatatccttaattatcttttgaaaaatttcggcttaataatttcggggggacgatgggtgagaatcggcggggcgggtacgtaattcagccattttacgcctcaatttgtataattttaaacacttatctttagagtatgtttacatttagattgagtgtctgcccgagatgagcaaccatccgaagatgcaccgtgagatgaccaacgttgtgccgtccgaactgcgcaaacgcattgacgcctacttggagacccggtccgtcgtctatctgtccgacttgccctccatgctgttgtcccacccgccgcctcacatcaacaacaccaaccaatcgcataagtcacagcagcaggacgtgccgtcctcgttcttttcgtcggcatcacatcagtcgccgccaaacagcaacaacggaggcggtggtttctcctcattcaccaccacaaccaccaaatactctatcagtgttgtgaatgcggtggtgatgtacgtcggtgtacgtgccattgactccatccatggcaaagggcagcgcgtctccatggaaacaattgcacacagcccgttcatggacattttccaaaatttggccgtctcactgtgcaacgaaggcattttttctcattattacaattaattaccaaaagcattcttgagatgttttcgctaattatgaatcgcaatcttgaaatgtttggctaattatgactaattgtaaatgtcctttttcaggtcgttatttgctgttcaacgccatcgccaatcagttgcgttacccgaattcacacacgcattacttcagttgtacgctgctttacctgttcttgggtgccaattccaagcacattcaggagcagatcactcggtaaagagtggcttttataagacctaaaagtcagtcctcacagtcccgatttaaatatgatttaaattgtctcacaatttgttgtggtaatctctccccccaccctcttcgtattttccgtccttgtagatagataacttttacacatttaaaacaatatagaagggggttttaccatgcaagacgaattttttgtttttccatagtattctttttgaacgtttggttgctctccgtccgcacccgtggggtttgttgatcacattcatcgaactgatccgcaaccagcgttacggcttttggaagcacgaatttgtttattgtgccacagaaattgaacggt

SEQ ID NO: 4441 - DNA, 1571 bp, Heterodera glycines
atcagaatgttcgcctttgtgtcagtcaattgggctgagcaaccagcaaaggtcgttcattggctcatggctttaaaggaagagaattcggaaaatgcaaacggaaaatggcaaaagcggcggacattgtgccgccgtaaacgcccgaatggaggtcctggttgggcccactgatttcgatggcaaacggcgaaagaccgctgaagagggagacaaaggcattctgtcgaaaggcgaacggggcacagaccgaaggccgtaagtgatgcacggcttctgtttgcccagccaataattgtctgaaatgcacacgaagtcgacgccggagagaaaatctttgcgctgctcgaggcattcgtccaatccgtcggagccgcactcctccatcccctcgaacacgaactgacaaacgcacaattccaactcattcattattgcgtgccatcaacgacagacagacacacctttatgttgatgggcatgtcaatgccaagcccttgcatggtttcgatgacattcagccagccgagcacgggccctttgtcatcggtggaaccgcggccaaacaatttcccgtccttttcgatgagttggaacggttccgtgttcctgaagtctttctttgccccgtggtctttttgaggtgccgcaccagccgtcctcaaacgccgccggctgaacgtccaaatggccgtagaccaaaagagtccgtttgtttttgtcagtgcccagcgtaccaaacaaaatcggaggcagcggaagggtcgttccatcggacaatgtttcagtgccaagtggattttcttacgagagaaacaaccataaaagctgagaaagcaatcgtataaattgcaaatcaccgattttttggcatactattcccaagttggtcatcagctaaaagagtttgtttttgtttatttcttgcaattcggaggagtgcaccttctccgtccaatcgatcatccggaagacttcttggcgatgttccgcgctcggagaaacgctgcgaatcgcaactgattctgccaatcggtcaatccatttcgccttgcatttgtcaatttgcctgttttttctcaaaataagcgttcaaaagcattgcatgagacttacgctgcaatggaatcgtatgccatttttgaaagtgtcagaagatgaaatcaaattcgaatatacctaattgaccaatcaaaatagtattactattttttaatttataatactgtatttaattttagtcgattttattttttaaaaatataatttatttttttaaagaatttgtgatttaatacacagcggacaaataatgaagaaaatgatgcatttcattttaaataatggccaaacaaattgggatgggagagaggaattgcttaccatgcaaagactatgtatgtaacatctcactaaattgttttgtgtgcttttttatctacgtaaaactatttgcacaaattaattaccgataagaaatggtcagttgggggtttctctcattggtaattttatttatttaacacagacattaattaaaggataaaaaagcgaaattaataaaagatttg

SEQ ID NO: 4442 - DNA, 1938 bp, Heterodera glycines
  unsure (1)..(1938): unsure at all n locations
aaagtcttggcatcgcccatcccctaattgctgctcacaatcagtttgtacatctttattgacctgctccgttttgacagtcgcgtgcggtaagacaggaaaatggctgagcaataagcgaacagtgtttgttccatctgattggtcacaacaaattcgattaactgcaccaaaattgatcacatcagactgaacagaaaaaacaaaaattaaattgcaatcatttattttaaaagataaatcgctgcttttgtggacccataaaaccttcaaaatttcagtaacaactttgaatggaaaaagaataattgacataaaagcacctcataaacggagacaaaacgtttgaaattgtccgaaccgttagtaaaatgtggtggaaaatgctgtttgaaacgttcgtacaattccgcataaaccggctccatttctcctccaatatcgttgtcaccaggcaaataaatgcgctgaaattgagtttatttatttatttaaaattaatcaaaaatgtaaaactagacaattaggtttcgcttaaaatttgagttaatttttcaactttttaggtacaaatcttggtaaaaccttttagaattgtacaaattttcactgacatttgtggagtatctattgagcggaaaaatgttcatgaaacgtttgcgcgtgtcgacaaactgttgttcatcgcctcccagcaaaacgccttcatcaaataaatcgcccaaaaacacttccaaatccggacggactgctcggctcgccaatgcataagcacgtcgcatataccaaaaaaataaaaaataatttatttaaaaataatcgaaaaaattaaattaatttaaaaaaattttcgaaaaagttaacacctatccgcgtcccaacgagacacaataccagtccatctaggnctcatttatgtgcccaatcaattgcggatcagaaataataaggattatgacctgaantttgggtcaaaatggngcggtatttgccacaaaaaggacgctgcccagaaggaaaacagttccacgatcaaacagggaagcagacagatcaacaatggcacaaaactgcgaaaaaagggacgttgacgccgcaaagccatcaaaaaaaattaatgtggaaaaagttgtcacatttcaaacaaaaaatatgcaaacaaataaagctaaaaaaataaaattgacggcgaattattaattggtagctttactttgacaaagttaataagaagagaccggtgcgagtgcgggactaacaataagctttttttagaaattgtgggcttaaactaaacggattgccaaacaaaaaatattcaaaataaaactgtaagcaataaaagtaaaaattaaaaaatcactacagtatgacagggcatcatactactgtattctggtcgagtgttatgaaagggacattaaaaggaaaggtataaaagaagattagtgaatttggaataacaattgatgagtaagcagcgcagcatttttcgccttttcgttgtttccctggcaaccaaaagaaatgttatttaaaaaagaaaaagcagagaaataaagtcaaaaattgtgtgggtcttctgcactgatcgtaggctaacatgtcctttcgagaacttcgaggtaaatttagaggtgaaattaattaaatttaaacgaaaattattattttttaaattaaaaagtaaagtaagttctcaaaaagtaacctaattctttttgcaatagatgctacagaaatcctacgcgccttgggctatccccgccttatatcaattgaaaattttcgaacatctaacttcccgttgatcgctgaaattttgacatggatcgtccaaaagtttaaatttttttttgaaatttcagtggttttttgngcacagattcgattcaacacacgactgccgcgacaccttgnnacatgaactgaacgagt

SEQ ID NO: 4443 - DNA, 3136 bp, Heterodera glycines
catacaaatcagaacaagaattacacttttataaaagccaaacatcacaaataaatgtttttgaaaatcacaaaatgcatcttcccaaaactaaaatacagtatttatcagaagaaaaatacaaatcacaacactaaatacaaacaaaattattgccaacccatggaaaacacttaaaacaaataattttacaatgaataaaatgtttgccaaaattaatcaattaaatacatttcattttgttgccattttattttattttcacagggaatggtatatgggatcgtagatcactaatacagtaatctattgactacctagcaatttaatcaagtccataatccctatggattaatggataaatcatttttacacctgcacaggttgtgctcacactgcttcaaaaggcgcatgttcggttgaacccaaaatatttgtaccaagcggatgggcatgcaattcgcgagctgctgcccgtgttgagaatgctttatgaaagtgtgaaggaacagaaacggagcaacggaaccggggggagcggaggaaaggcagcggaggacgggggagggacattacaggtggctaattgagctgggttcaatagcattcctctttcaccaaattttttttttaattttcaaaaaatcttaacaaattcaaaaaattattgtaaaactttcagcgattttttagaaaaatcttgatcacaatgctcaagctgacaagggaccatcccgaactgccagtgtccaaatcactctaaaacaattttattgtgtagcgcataatcaatttgctattggaaaattttagtacaaacaaaaaatgattgaaaaatctacaagcaaaaacacttatctttattcccttcccggtacagatcaatgtgcttcgctcgcaagtgaatgccaaggtcgcgtttttataattttaaatttcgcttggtttttaaacaatgaaatgaatgacggatgcgcttaagcgtcaagagctccatcaaaccatcaaattggccacagaatttccaaagacggcagcttctctgtatgaactgcttcgggaggaaatatttgcaaaagtgagaaaccaatgcattctcagtgtataaatgtaccaaatgttcaggaagtgcgaactaaagcactgggcagaccgctgaacgcagcgcaggtgcaattgaacactttcaccatctttttcccatttagagcctatttaaacacgttattttccgttaatttaggggaaaaaaagaaagaaattggggaatgtttaaaattagaatttttataatatcagacaaaggtcccggccggacccaaaaccaagttcgctcaattcggataactgtgaaatgaattataaccaaaaaaccgtaccgtggcccgttgaccctcaccgagaaatactgtgcccgcctcctcccctccccagtaaaccgacctcgtagaacagtgggtacattctgttgcataggtggaaacggaacttcgggaacgcattcaaacaaccgaacaacgcattgaaggagtgaaggaacggctccaaaacatcgagtcggacgaacaggagttgggccgaaagattgaacggcgtcggcgcgaaatggatcaactgcagaagcggttggccaaactgcaggcattccgtcctccctatttggacgagtacgaacgttacgaggcacagctgcgcgttcgctacgctgtggtacagttggccaattaccgtaatttggccaaatgtcaaatttcgaaccgatttttagtatgtgatactgttccgcaatttgcatgcgttgcaaagtcgtctagtacaatctgagcacgcggagcgcgagcaggcactggaggctgaacgttcaatgcgcgaaatggttgaaaaaatgcgcatggaaagcgaacaggcggctccattgtaggcgcttaatgaaatttctggccccaataatttggccaatcattcaattggtttgtctagccactttttaagaattgctggcattccgctgcacattgatgagctgaaccaagctgcagacgacgaattggaggaatatggacaaaatggaagacagcgacgaccaggaggtgggtggaaaaattggacacaaattttttatttcagtacaatatttaaaatagttgaaataaagtaattagagcttggatgggaaggagatcccgccgggactttcccgggatcccgatcccggctttgctaggacacggtttcccgttaatgcgtaaagacaatgtccctatggcggttgttcttttttctgtaaagtctcaatttccgcaaacagaagtgcgcgttttcggcaacatgactgggttgggactgtccgatgacgatgaggaggatgaggaagaggacgaggatgggctaggaggtggacgaatcattgaaatggaggatgaggaggaattggatgacgatgatgatgacaatgacgattatatgaacaattttatccgtggcggcggtaacggttcaacagcagcagcagaagggaacaccacaaaacgacaacgggcgttaattgagagcaaaaaagtaattaagttaatgacaaaaaaggtattaattaaatcaatccaatgatcggcagatgcgacaagaaaacgtcgatgaagaggaaacggacgaggacgctgctgatgaagacaattcgggagacaatttttgatcatacaaaaataccaccattctttttacactgtagttggatagatgtttcaatgggacaatttttttttataattaatatttttcatttggtaattgtagtattttttaaccagagtagagcggtgcgattcagaaatgagaattttaagctaatttttaaatagatttattattattaattattattatttttttacacatttatattcaattaattaattacttgtttaattagtcaatttatgcaatattattggatgttattatgtgttaaggtacttatacagtttacgccactatggatgagtctcgcgcggcttttttttgaaatgtgcatgaaatttgacaccatcgctaattgctaatgatgatgataatgatatgcgtggcaaaatgggctaagcattcgcggcatacctaatttttttttttatatggtatg

SEQ ID NO: 4444 - DNA, 3205 bp, Heterodera glycines
  unsure (1)..(3205): unsure at all n locations
agcacccatttttgccatttcgaacccctgacccgaactctaacaaaaacaaaattagaaagtttgtatggatgatgatatcctcattggcatcttgcccatgagggtattatatgtacaggaagcctgtcaatttgttgtccctgtacagctcatgtagtgaatggtagcgccgatctgagcccggattcatgatcagcgacctcaaaaaccccttaaaacttattttcattaatttctaaaacacatttataggcatttgaaaatgtatgttaaaagtaccctgtaaactgtataagtaagtacctgtgttaataataaacaattaaaatttaaaaaaaaagataaattaaaatatcattggattatttattaattggatagcatgattttgttataattttggctctttttttttgcctggaaatgtttccctttttgctcatttttacatggcaacagcagaagcggcagtggcatggacacgacaaaatggttgttggtcacgttcgaagtatgttttaccttcaagtccagtgccacaagtctggggcaggaaggaaaagcaaaacaaatttagagcctccgacaaacagaaatttggggaaaaataataaaattttaagcctccgacaagaaaggtgctaaaatggagcagaaaaacttaaagctaccgcgcatttgaagcagtccgcgtggaattggcctccgagtgcttccagccatttttggcccactttaattggttttagacagtccgaacacttcgtggtgaacagcaaattccaatctgtacatagaatcaatttcattgtatattaaaatgaatttacgtccttggtatttttgggttttgcattacattttcctccgcgaaaaaattgttttatttttcttagtttttcctgtaaaaaaatttagaaagaaatctatttttgaaaaaaaaacatttttatgggaaaaaaacttttaagaaagttggaaaacaagaacttgttttacaatataaattttctcggagggagggaggcagcgaacagttccagtaattagtaagggtaattagtgatcctcatcatcccattatatcagggctacccttgaaaatttcccaaaataagtatttcgctggtcaaaaataagttttaagggtcaaaataagtacattttttcaaatgcttccaaactttaaatcacatttttattcaacaaaatcaagcattaacaacatatttctcgccgccaactatttttctgagcaattccggcttagaaatgagaaatttatacattttcgaaaatgaatttaataattttgtttaaaacataagcaatttgtaaataattatagttcattcgggatcaaaaaatcagatttttaacaattttttgcggtgtgctttttccaaaaaattttgaggaatgggcgatgggatggggtccggcagtgccggtaggcgccgccggaaaaaattttgtaatttagcgcgactggtaacaaattttcaccaaaaaggccaatttttgcatggaaaattttaggtcaatttttgaaatctcagcggaaatttgcggcactgcggcgccgataggcgccgacgggaaaaattttttttgggctttttcatgaattttgttaaaaaaatatattcaaaaatccccctttttgctcctttttatgccttgaaattcacgctcataatcagcgtgaaatttatatttgcggtttggtggagccattaacgtaaataattaataatttaaactctaaaaaatgtgatcatagaactttctttcgaaatttagaatatttagcgaatcttgttacgattttgtatttaacattcgcttcaaaacataatttttctttcaaatattgctataaaaatcggaatttcctttgagttccaaaaataagtacaaaataagtaccttgagctgaaataagtacaatacttacaaataagtacaaagggtagccctgcattatatggattataaaaaaaaggaattaatactacaaagaaaataattttaaaaaattccccaaaagtgttcaccctcttcacagtagggtttgccgtcctcgacaaagaatgagagagtgccaaacggtttacgacaatgggtacaagtgaagcattcgttgtgccatttgtcgcccagcgcgttcagacaattctggcaaaaaatcatttttacgctagtacaataatttttttaaaagaaaaattcaaaaatttttaaaggattatttttgctaattttacaatttaaaatctattgaaaattttaattttcaagttttttctttttaaaatttttaacaaaaagttcaattttagatttaaaaaaatttgttgtacgacttgcaattaacccgttgaaattgtacaagcggcgggaggggggggggggtatgggtttcnaaaaaattgccaatacatcccaattccgataccaaaatctttttttgtttttaatttgtaatcccaatgttgtgccacctccatcaacggcaagaagcatttacggcacacaggcgccatcaaacattcatagcaaatgggacaataatttttacggccctgcggctcttcaacaaagccactctccaataagcgtcgaccacatgctgtatacaataataattattatttgaggatgaaaaattgggggattttttgaatactaattagctaataataactaccagaattagcgcacacaaaatgctctggacaccaacaacgacccttcgccaacacaaattcggcaaaagagcgcaccatagcaaaaatggcggagtttgaaagacacttctctagggtttgaggtgttttgagtcagaagtttcgcttttcaaaaaaatcattgggatcgtacgttttcggcaaaagagtgcaccatagcaaaaatggcggagtttgaacgacacttctctagggtttgaggtgttttgagtcagaagtttcgcttttcaaaaagctcgttgggatcgtcctttttcggcaaaatagtgcaccacagcaaaaagggcggaggttgaacgacacttctctagggtttgaggtgttttgagtcagaagtttcgcttttcaaaaagatctttgggatcgtacgttttcggcaaaagagtgcaccacagcaaaaatggcggagtttgaacgacacttctctagggtttgaggtgttttgagtcaaa

SEQ ID NO: 4445 - DNA, 2018 bp, Heterodera glycines
  unsure (1)..(2018): unsure at all n locations
atttcacattcatcactcctccactaatattcggtgtcgtcgtcgtcccattttncaatngcagtaaaatgaatgaantggggctgaacacacaaaaaagccatttgtgcattacacatgtttttccaaatttccaactatttttcccatttttgcatttatcccatttttgtcctttgctcagagaatggcgcccttttccctttcgcccgtcgaccgaatgcgtcaaagtgtgttccgagttcgaagtcgtcttgcggtcaatttgttgtcggaagggttggccacctttctgctgctgctggtcggcaatggcattggggcacaacacattttgggaggggggaagctggacaattacatgcaggtgaattccaaggggaagtgccaaaaatagagtggccaatttggcacggctaactcagcggagacaacgagaattaggcacaacagacaaattgggggtgggagaacaatttagctaatttgagtgtcatttgacaacttactccgccacccgccaacggcaaaagcccaaacaaagagttttcggaaagttctttcatagcggtcgttttatgtaaattagaatttttcgcacccaaccgcaacctttggccaaattctttctgttctatgggaaggagcagattttactgcatatgttacgagccatttcattttcctttctttgtaaattgattttttaaaattatcctaatggagcacccaaaatcccaaatccgatcacttttattgtacgggtcaaaactttgctttgatcggttggaaatttattaaaagcagtttttctggccaaatcaagtccggagaatccaaatcaggcctcagatttgatctctgaattttctctggcattgtactgctccatgtcgttgacaagaagttgaagcagtacagggtcatagaacagcaactgactaaatctgaggcgatattcggattctccgggtttggtttgcccatgaaaacatcaatttcattttattaggtcctttcagaacaatgttgtacaaagagggtgctgaatcttggcacttttgagcacccattttcagacaggacaactttaaaaaaataacccatcggtcttggtggctctttttcagcttgtcagatagtcccaacattgctctacaaacccataatttgttttgcacctttagccttttcttggccaagaaatcagtggttgaatttggccacttttttaagtagaccgatcagtttatttgagtctaactatctttttaaaatctaaaaaatgggagaagattgtggagaataacggagcatattttgattaaaattggttcattagttaatttgttacgatttttttaaataaatttttggtcgctatgaaagaactttccgaacaccccaatattagagccttgaaatttaggattttggggaagggaatgtatgtaccacagccggcaccccggagaaaattctgaagcgttaagtgtgatctaaaaggttaggaaaatcatattagaatttaattttgaaaatactttgataaaatttttaaaaaatacaaaatccttaaaacataaacactgtaaacggattcctataagtttgtttcaattcactcctactaaacagtatctcgtttgcaaaaaatactttgacactgacgcattttccgatatcgcccaacctccccttgtggccatgactttgatagtggtcacataatttcaccttttcattgtgccaatttatgtcaggtgtgcttcggctggggcatgctaatcgctcttttggtgttcgccacttaccacacatccggtactactaaatgatgtggtgcccagttgtgccaatttccccccccccgtccaaaggtggccatttgaaacccggccgtgtccctcgccttcgttagccttggcaaattgccattcgcccattttttgctgtatcccctcgccaaactgtcggcgcctttttttgctcccgccctttgctcccacatctacaga

SEQ ID NO: 4446 - DNA, 4889 bp, Heterodera glycines
tttgttaaaatcggatttttcaaaaatgccaggaccggattggactgatattttcaaaagcaaccggtttccgacccggcctctcaaaaccggtcaatccagaatttttccaaaaatcgtgggaccggttttcgaatccagtaaaaaccgggtcctctccgatctctttttctaggctaattttttgtcttgatcacgaaaatgacatttctttttagccataatgagtttacaatgcgttacgtgacaatttaacatatatgataaatttgaaaacgaaaaaattaacaacaatttaccgatcttcgagaagaactcgaaagtgtatggcattttacgaaaaataaaaatatcaaattttccaaattttattcaaataaaaaatccaaaagaaggacaaaagccgcttacacatttggatatgtttagatctccaacaattttttaagtttggttctgtaactttgtatggaatttattgatgagaaatctattgttttgcttaattcttgtaagttttttgtagtacggttaatgaaagaatgttcagatttagttattttagatttagtgattagtctgggaaaaggtgaatttcttctttgagataagttatatagttttagagggtttaggtgagtttcttgtttaataattttgaatgctgtgtcactcaaaacataaaaattatgggcaagtttgttttttatcttttaaaaatatttagcgatagaattaatttaaaagctttatatagaacgatagcggagacttttctctatttaataaattttatttgggatttttatattgtttcgctgatttttggcagatttttaaaagttggtggttaccactgctaccatgggtaggggcagggttggcgttttaccctggttacatggttaggtaaccagtaaccaccttcttttactctgcgttcacgaaccaccaaccatcatggtcaaatgaccaggttaaatgaccttgaacccgtggttgctcatttgctacgggtaaaccatgatggttgtggttatttaaccataaccactttcttttactacggccccaggcgtcccaaatttttattttctcgacactcgcccacactatttactcgccatcaacaaaacttgccggggggtgcgcaataaaaaagtgaaatgataatgaatatgcaaactcaatgtaaaaataaggtaaataaataaaataaaaaagaataaacaaataagaagagggggggggggggggggagtaaaaatgaaaacaaattttcataaggctgcaaaattgttgcagaaatcgcgtgcttcaaatctcaaatgtctccgttcttgttctttttttttgtacacatctcgtggtctgctttctctaattttaatgggtgttcaaataccataattgccgccattcaatgaaaatccgtaattgctagagctcatcatcatgggcctagacccaggcctggagttttccttcatgtccatgccatttttggcaacctggatttttcctggatccagggaatccatgcccaggtccaaaatagaatgccaggtcctggcttttttcaaaaaatcaagctctagtaattacgtgtccaacagctctgcaaattgccccccccctcccctcccctcaacttgcccctatgtttttacgcaatttttctttccctatataagaagtttctacccatgatccaagcataaaaatgaatatctcgagttatatcgagtgttacggggtggaagtggtgtcattcgatagggttttggcctgcctataagggaaaaatacgggttttccgaaattttcagaattattcgaactatattcgaaaaatgggtcaaaaattgcactttttttgaaattccaatttttgaacggtttttgcacccaaaatatgtcaaatataaaaaccatattttgaatataataaaatcaatttttcttttcttcttatttaattctcacaagaaatttaatcaaattcatttgaatttgtttttttaatttagagaaaattaatcataaaaaagcactttcaaatttagtaatttttagtttttgctattcaattttcaaaaaatttaggtttttgtttattctctaatttaaatttgattttttaactttttcccaaggtttctcataggacaaataaacttaaatataaaatccctcttcaattttagtaattttaatttctgtgttatttaaattttcgaaaaattttctaatggacttcgatcctgaccacgagaaatggaaatgctgctgttgccgcattccgaccggcctcaaaattctcgggttggccgagtgcgtgttggccaccgcggtgttggcacttggcctccatctgatccatgtccatttcgtgacggacaaagtgagtagtacaaaaatactcaaaaatcaaacatttatcggaactccctagaaacccactaaattttgcgaaccgagactcgaaagttaatccattgtcttgagaccaataattcagtggaggtattggccccctttacacacacactactggtgctttatcggcactcgccgtggcggttcatccccgccagggcccgtagaataagaacgtggttatggttaaatgaccatgaagttggtggtaaaacccgcagaataagagctaccacgaactttggtaaaatgaccacgaagttggtggtcatttaaccatgaccatgaccctattttttttaccatgagccttttgacacggaaaattgtgagataaaaataaacaaaaataagtaaactaattataaattaattttattcctctaataggaccacatatccctcattatcacataaatagaagaaattaacaaagttattgtataaaaacccgggattgtcaattgattggactcataaagtgcattagagccattgatttttgcactttttatcccttgacttagcaccaatttacatttttatgaggattcttttttaatttcttataatgtccatttttattgacctccactttcttctttttcgttgttcttacccaatcgaatgccatttttggtgaagaaaatctttcgattagccaaatcaatgccacatccgaccgtatcgccagcaccgtatttacatctcttgtcaattgtgtgggaaccgtttttccacaaaaggctattgctaagccacgcataagtgccgtcgcgggtgcaaatgtactcatccaatgccatttgcctttgggcgatgaatccgaaggcgacacaactgaaaatgaaattatgagggaaaaagtagaagctaacaaatgaacgggtttgatcttactctttcatatttttgattgaaatttcaaagtaaaatctgttggcggtgtcattttgatcatgaaaaatcggatactttgcgcagacggagcgctttccttttatgaacaagaaaaatgcattataattaattatttaaaggatggaattgttttccattttatttttacccgaggaatttagaaagaatttaaatcttttttcaaaaacacatccgtttcactctatccagatttttgatgtattctcgaaaattaaagaaattgttacttttagacagtaaaattatttttcacttttttcttgaattatctaacaataagttgcgtttttgaaatccgttcgggattctgaaaaaagtgttttgagtgcagtttctaaaagccagaatttttacaaaaaaatttcgtacaaaaacaagacttaccatgcattaccattatatctccattgtgacggaccgtcaaacaatcggcaccaattatttcgaggtcactgtgacagaaattggcatcccaataatttgaaatctgtaattttgttttttaatttttcttattgccataaatttcggaaaattgaaaaaaaaacactgttagtgatgaaaattttttgaggtatctaaaattaatggggttgaaaaagtcgggtaggaattctccgataatttgtgaggatagcttgagaaatttaaaacatgtcggggagcagcaataatctcttgtcggggaggaaatttacatatttttttaaacataaaatcttttaaatccatttaaagcaccctctaatccgttttggaatgagactgaatctgatctgggaccaaccctaaattggtaaaattacaatctttcataaaaaatttccttcctcaattcatacttaccactttctgctgtcgcttttccaatccattagtttcaattttctgctgctgatcattttgtaactgagtgaattgctcggaagcttaaaatgatttgaattttaaatgtttaaattattttaattttaacacaagtaccgtattcattatcgtaatgctcgtcttgctgttgtttttgttgtttcagttgctgcttttccaattcactgatccgttccaaaagtgcaaattgattattttgcattttgaagaattgatcgaccgaaactttacaaatttaaatcattttaataattaaaatatttgtaaatcgctttggttgaccatggtttgctgttgttgttgctgtgcccttttctttcactttttgctgcttctgttcttcttccaattcaatcactcgtgccaaaagtgccgcgaattggtcggcagaaactgcagtttaaaattggaattattttaaataattaaacggtgcaatttaaaggcaattatttcttatacgagtattctaacccatcctaccgtatttctcatttttcttcttttgttgctctttttcctgctccgttttggcaactttctcctgcgataataaaatgtgttgtgtcatcactttttgttgcttcatttcttcttcaattgtcatcttctattaaaaa

SEQ ID NO: 4447 - DNA, 1617 bp, Heterodera glycines
aaaaaccgggaaatttccctgtcccggtcaaaactgatcaacccggggatttcggttctcaggttgtccgtgttttgggtcccggtcccgaccaaccttagttttaaataaatttttttaattacaaatattatcactttaacttgcgctcaaaaaaatataaatttccataaaaaatgcacaaaacaattttattttttgctttatatttgtgggggagaaacattaaactttctgagtgaggactagagttgcacgggaccggggcgggaattcccggttctgaccttcatcatttttcgcttaggttcaattccccaaatgaacataaatttttttcatattttctttaccactattttaattgaaattttaattaataaaaaaatattccaaactttttttaattttaaacagcctaaaaacccaaaaattaaccaaagattcggtcattttatttattttaaaaatccagagctttgtgactcagaaaattccaggattccccccccctccgaaatgaaaatttttaaaaattttccaacgaataatggaaaaattcttcgaattcctcctccaaaggaaaattaaaaaattttatgggtacatttttggacataggcaattttcataacaaagtgcaatcaaattttcaaatttttttcaaaaaattttctcttggaaaaattcccggttggtcccggcttttctcgcggtcccggtccctaacgaaaaaagaggtcccggtaccgactaaaacttttttctcattcaggcagaaaaccttataaatttgcgtctccttcattttgcttaattatctgacaaaacgctgacccaaaaaaggatgaaaaaattatgggaagaaaggaagagaaagatgagaggaagagaaggataagaggaagggaaagatgagaggaagggaaagatgagaggaagagaaggataagaggaagggaaactatgagaggaagagaaagatgagaggaagggaaagatgagaggaagagaaggataagaggaagggaaactatgagaggaagagaaggataagaggaagggaaactatgagaggaagagaaggataagaggaagggaaactatgagaggaagagaaagatgagaggaagggaaagatgagaggaagagaaggataagaggaagggaaagatgagaggaagagaaggataagaggaagggaaagatgagaggaagagaaggataagaggaagggaaactatgagaagaagagaaagatgagaggaagggaaagatgagaggaagagaaggataagaggaagggaaagatgagaggaagagaaggataagaggaagggaaactatgagaggaagagaaagatgagaggaagggaaagatgagaggaagagagggataagaggaagggaaagatgagaggaagggaaagatgagaggaagagaaggataagaggaagggaaactatgagaggaagagaaagatgagaggaagagaaggataagaggaagggaaagatgagaggaagggaaagatgagaggaagagaaggataagaggaagggaaactatccgaaaaagagaaagatgagaggaagggaaagatgagaggaagagaa

SEQ ID NO: 4448 - DNA, 619 bp, Heterodera glycines
aggtctcctgaaaaggatttttaatcctgaattccgttccgtgtcaaattccctaatcctgattcggatttttataaagtcggggttttagtaatgagtagagtaaaacaattttaaaaaatgatgggaatgaatggaaagaatggtctttggtaagtgttttgttacacaaaaatcagcaaataaatcaattacttctctttatccctcacctacacatttgaattcattcacatgtacaacaaagaccattcttctcttcattccacagtctgaacaaaatgaaagatgaaccaataaaaagagagtgcagagaaaaaaaaacaaaaatcctttttttctctatttttctcctttttttgcgtacaatctaatatttttctttattaggaacatttgcttcgccatacatatagctagagctgggatttttatgtgctaaaaaccccccaaaaatgccaaaatacagtcatggtcatatgtttaacaacactcaaaattttctaccaaatttgatttaaattgattataaaatctcaatatgactatattgtgtatatatgttttatatttaatgtagcattttttgtgggctttataatgataccattcactatcc

SEQ ID NO: 4449 - DNA, 3880 bp, Heterodera glycines
  unsure (1)..(3880): unsure at all n locations
aaaaaaaaaaaaaattcccccccgaaaaaaataatgaaaaaattaagcatcgctcgggaaaaattcgcaaaattttgtcattgcccacgcaaaaggcaanttgtatggcatttttgattaaatttccaattttttgatttctataaaactatacttcttaaatttttttatataaaaaattcttttattcgaactccagaaaaaaattgaaatttttttatattttttgtaaaaatagaaatttaaaagtttgattctacaaaaagactatttttattttgattctctttatttattcttttttgctgcacaattggtggaataattttttttcaaaatttcattttttttatttttcaaagtcgaggcctcttaatgtatggacacagtagagtaaaaaaattttttattttttaagaaaattggttgaggccatgtgttcagctctgtgatggtggtgctgagtaccaaaattgaggcgtgaaattcccagagcagataattagggattgaattttgcggggaaaaaaattcgcatcgaaattcggtggcattttgggaaaagaaaatagacctctaatggcagcacaatgtagagtaaaaaaaaaaaatttttttttcattttttttgttttttgaggaattggctggcgcaaatggattcagctctatgatgtggtgatgagtgccaaaattgaggaggtgaaattcccagagcagataattagggattaaattttgcggggaaaaaaattcggtggcattttgaaaatctattgtgttatttagaaaattcacttggaaaatagatatattcgagagttttgttaaacaaatttcgccagtaaaataagcattttcaacagtcgagaaaataaaaaaattttcagtctaaaattttgaaaattattcgatcaaatttattttttttctttatattccaaggtcgatgtcattatgtcctccgatcccatgggctatatgctggtcaacgagcggatgttggagatgagcccgcaaatttcttcgccgtgttagtcactaataaaacaattttattttccaatgtttacctataaacatttttttttaaactattgtattttttccacatttgtaagacaagccaatgtgatggagttggagatgtacatcgatgaaaaggcggtggcaacggcaacaaccaatgccgcgagcagcggaaacgggaacatttgtcaccgaccgggtcggcgccgttggtaataacttttctcttaattttgtctttttcgtcattttttgtttgttactcaaaatttattttttatcaataatgcgtttttttgttattttgaagctaagtgtaataatttattaacttcgtaaacggtctcttccagtttttgcattttttagcacaacattgagtcagacaatgcaaaacggcgaatttgattgtactacaatatgttgttggtcgacactcagaaatgattttatgcgttcaatgctaataaacaaatgctttgtttaattgcgtctcccttaaattgcacaatctttttaattttaattgtttagagcgttattttatgcgcttttatttttcattttaatgattttttttttgcttattttataattgtttaagcctgttatttgctgccttttgccttgctttaaagagctaccaaattttattggtaagaattcatttcccaaaaagagtgtgcctatacactttaactttattacagactttgtcctcaaactgttacaaaatggcgcaaccgaacactccaaccgttgaagttggtgggggaaaggggtggggggctgaacatggaataggggtgcactctcggcttgaaataccctaccttgcaccttttggtttgcaatagtctaaaatatgtatcaaacgattcctgtcttgtgcctgtaactttgtatcaaattgtcgccggccacccagacttagctttcacaaatggcattttgccaactaaatctaaatcggattattcgccaattattctaaaatgatgtttttgctggatgaaaatgtaaatacatggttcctgttcgttcttcgatgacaaaattatatgtccttgaaaagtatcgttcgaaaaaacattattttattaaaaccaatttttaaatacctaaaagttttcctaagcctaaataggccgtttttacggtattgtgttttctaagaatttttattccaaaaatcatgaaaaatttttttatttcatattttatgtaaatttttttaatttacagccctattgaccagaattcggaatcgtccgattttgtataattggctacctgtccgcgtccatgacgcataattcattttaaatcaatttttcccttattccggtccgctgatatcatggatatttttgaaaattatagccctaaaaactctcctttgatttttgaaaatgtatcatccctcaccaagcaaagagtgacaaaacatatcgccaaaaatgactatattgttttttaatcgctaacattgaacaatatttgtgaatatgcaatttttcctcaaattatttgtttaatattggactaaatgttatttttttacatgtatccactttaaggtcctctttttgggtttaaatttcaaacactttaactagtgttaataaattgtttttttgttaataaatttgttaattaattttcataccaaaatataaaatttttttataatgtaatatgcaagaatactccgtaaaccttatagatttttgactttgttattgttttaatttttcccatgtaattcacatagcatttataatttaaatttattttatgaatgatttataaaattaaggcaaggctcaaaagtttacaagcattttgtattagcacgctttttgttgtttgttttttggtgtttattttaatagtgctctttttttgttttatttttgaacacgaccacaacaacttttatccatctacacattatcattttctttccctcctgtttaatctttaataatatttaaatcccaccttttagaaagtatgaaattgtctttatctttattagtattctggtctgctcttataatttttgtttttttttcttaaggaaatacccaatcatttaattaatttgttagttaattgccctttgcttatttaaaacaagccattccgatagaataatttgtttacatttcgagttcgtccagaattgaatctttatttctgccgcattatctctgtcattaaatttgacaattcataattctatttttcatctgattctttttattgttaatatcataaaaataaaggtcaagatcgattttcaaagtttcaagtactgttttactctaatttacaagcaaaatctaacaaatattatttcaaataactcttcttaattttttatagtttgatattttcgtcatcttcgtgttttgtctccgttcattttcttctattataaattgagagcgaaattatctttatatttctttattttttatccttaataagtgtgaatatgagttttcaattaatgctctttggaaggctcaattaagtggtgcaaaattatacttgtttcacaaaaattcccaattaatcactgattaatataggattctgtggcctaaattaatacatttttaaaattcgattataaagcacaattttactttgacgattatgcttttttcgattcaataaaccttacaatacatataagaaattaacaaaaatacacatccgaattattatgtttatattcttcttatttgggaaaagatcggagacgaaggggcaatagagagagaggcgtcttcgtaagacaaaataattaaacaatttctaagattttttcaaattaaag

SEQ ID NO: 4450 - DNA, 2248 bp, Heterodera glycines
  unsure (1)..(2248): unsure at all n locations
ggtttcgatcgaaaattnttcaaatcggggtcaaaaattcaaatttcaaaatcaggacatttctctgataatgggggacagattgaagccctgaattaaactaatctttaatntaggagcgcgaaaatgcttacaaatgtgagattctttacncgctccaaaaatggccaattctgttgcgccttcactccaactgtctcccgtttctttcgattcacacgtttaatactgcggccaattattttgtggtcgccgaaacggactcgccggctgattatctcctcaaatttcaaattttgattgtgattgacaaaaacaaccacccatttgagcaaatgcgcgatttggtacgttggattgtcacgattttttgaattttttaaatttttctccaatttttttttaaatattttcagtgcctggaaaaaggcagaaatttctgaccgttgttcgctaaaaaccacattgatttttgggtggacggcggtgccgttaggcgacgtcgagaaaattttttggttttagcaatttgatcgggaccaggagaggatcccgggtccggaatttaatttattttacatttcttaaaatatggtcattatatattttttcttcttaaattgataattttttttatttttagcctcttggaaaatggtttaattttattatttttggcactttagaattttgacggcaattctttcttaatatgaccgttaaactgggaaagccattttaattaaagtattcaaattttgtagaattctctgctctgtgcgaaattgaatgccgcagcggccacgatggctgacatttatggtgcactgcttctgcatgcgattttcgatggcagcaaagtgtgttatattgaaaaaaagaattttttattttcagttttaaaaaacagggttaggcgcaggtgttccatattcgaacccaaagtcagcgaggggtggtcagccatcacatttattaatgggattaaccctcgaaattcgacatttttttattacttttcgcaaatctatgttcgtgttgtgttttgttcaaaaaaatcacgagtatggttaggcggcgccggataaatttttgttaatttagaaattgtttgtttttttgcggtgctgacaaatttttggaattttgagccaatttatgtaaataggcggtcgtttacctatgcatttttaagcgtttttgtctgaaattatgcgcacacttcgtttttaattgccttcattcatttcaggattacaccatggtcagtgttagcttccgtcgcgagcatcagccatttctgtcggagtttggggcgttgtgtaccaacctcagacattttctgttggacattaaacagtacttggacgaacgtttcccggcggatttctaaatacagcccattttttcaaaagcgccgatgccgctctaaattctcgacatttgttgttgttgtttaaataagaattatcttccgagactgtctgatttgttaaattttcaatggccgagtaaagattaaatgacatttagttaattgaacacacaaatttgcaaaaacgcaaaatgtgcactaaatttaccaaataatggaatttgtaaattgattgaattacataattttaatttttccaaaactgctaaaaatgaatttacaaatgataaattggccctaaactcaaatcgagactaaattctcgaaaatctctactgttctccttcatttttgcttttttaaagcaaaaattttcttaaaatgacgaataattcttatgtgaatttattttgttacgatacccattaattgattttaaacaatttgaaaataaatggactttttgaagcatataaaaacattattttctacgcaaaaataatgaacaatgaaattgagacagcaattgcacaacaaattagggccaatatgaagaacaattgggactggccaatgcaacccttaattaaacaataaaagacaattaatacctattattgtatgaaaacaatttatttgttggtacttatacagtttgcgggatacttttaacatacatttttggatgcctttaaatgtgtttttgaaattaatgaaaataaattttaaggcattcaaaaatgtctggttcacgaatacagcacccagttttgccaaattctaacccctgacacgaactctaacaaaaataaaaatagaaaatttgtatggatgatatcctcattggcttcttgcccatgaggataaccttgg

SEQ ID NO: 4451 - DNA, 2519 bp, Heterodera glycines
atggatgatatcctcattggcttcttgcccatgaggattccttggtacaggaagcataaaattcgaaatttgtatagatggtaccattatgggaatttttccaatgagggtattattggtacaggaagcctatcaattctttgtccctgtacagctcatgtagtgaacggtagcgctgatctgagcccgggtgggttcgtgatcagcgacctcaaaaaccccttaaaacttatttccattaatttcaaaaagaaaatttaaaaaaagccaggtcgtaatcagaaaacgtaattggtctttcgtaaaacccgccgaaagaaaaagcaaataaaattgcttatttgttagtcattttatttttacttctagtgtgatttaatagctctaagagattttttatcagaatttttttaaaacttgctcctaatccgaaaacgtgctggaccgtttcttaaaatgcgccaaaggataattaaatgaaaaaacaaaatcataaaattacttaaagtcatccgaaattttacattcttggtgtcattaaatagttctaagaattgtcattcataatatataagttacaaaatatgcaaaaaatttaaaaaaaagcacaatcaaaaaattaaaggattcgcaggctttatgcaattttatgattattttagaacttttagaaattatcaaaaaaaagaataatttatttttaaattaagtgaatatattataaataagaaacaatacaaaaataattcttttttttatattaaaatatataaaataattagaaaaaaaatttaataaaaattaatgtaaaatcaattgtttggaaaccaactaattgatttggatttgaaacacccaaatgctgcaacatcaattaaaatgtttgtgtttaatggtaatgagatgcgacttttgcataagttcatgaattatggccaaatggtgaaggaccgaaaacgcaacgaatatcgactgtacgaagtgtttcaaatcgtgtttgaaaatcttacgttggtggaggcatatatcatcattttgacaaaaattgcctaacattataaaaaaaagcctaaggacaaaacgccaaaaaaccccactaatttaaaaattttgccgagattttcccttgtaaaaatggaagagccgatctcgagttaaaaacacaacttccaaaaaataaacagggattcaatagagggggtcaaaatatgggcctatgcaaaatttcaagaaaattggtcaataggaaaaattttttttcaaggacaacaaaatcaaatgtattacaaaattttagcataaaaatggtatttacacgtagtaaaactggtaaatttatgaagctaagcgattctgggactgaagcaaagcgaaagcgcaaggaatggcgccaggagcacgcaagaaaagctggatcaacaccaaaaagtgatgaaattttgataaaaatttcatttcaattaaaatcaaaaattttgctctccacgtcaaattcgcccaaaaatttgactttacttgcgtttgggagggacccgagacccgctcggaaatggaagcgcgcctaggtccggtcttggaacagcttgagcaaatcgctgatttgtcatttgatcgaaatttgacgattgaatggtcttataattttttaattcttttgcacaatttttcttaaggttctgaccggcgacatggctttcatatgcgcttggatggggcacatgggaccagcctccgtcttcccttgtgcactatgccgaattccatacaaagctctgggcaacaccatcatcgggacaaggacagcaaaatcgatcgtcggtggcgccgcaattttcagtcaccgaacagcggacacgggcaagcacacaactcgggactcaatttcatgtggcagtcaaaaagccttgccactctttttcgtgccaccgacaaatgtgattccttcaccatttcacacatttcactccgccggacggaaatgcattgacttttttgaaaaaaatgggtcacccgtagaaaaacgtcaattagaagaaattatggcaaaatcgggagcaattcggcatgccaagacgcaagagtatactggtcctgacattcacctctttccttttttcaaattaattttaggtgatcacatgaagcgcctccttctcgcctcaaccgaaatcagctcgatcggaacaccgttttcgatggacattgctgacctccttgacgaaattcgggagctccacatttttggacgtgctgacctgatgacccaagaacaaatcgacaatttctcaaataaatgctcaatggctatttcaaggcaaagatactttttttctgtttttctcattttccccttttcaagaaactttgggaaactcatccggctaaattcgacacaaacaatgccgctggattcaccccaaaattacactggcttctcgcccatggtccagactttgccaagcgttgggggtggttcgcatggatcagtgaacagggaatcgaacaccttcaccacgttt

SEQ ID NO: 4452 - DNA, 5280 bp, Heterodera glycines
  unsure (1)..(5280): unsure at all n locations
gatcccgtccggtctctaatgaacacccaccctaacagtgtaaacaatttttcggtttcttggactaaaaacgcgagaccgacgagaaatttcaatgaatcgagaacagaggctctcgcatatctctagtaacgatccagcctcggctgatattatggaaaataaaatatcataattttagcaatgatgccaaaatctcccaaatttcgccggcggtgctctgttaataccttttcctaaacattctttttaatttgttaaagatcaaatattattaaaacatttacaattaataaagataaatattattaatgaataatctagacaattgttctcttcaattattaaatatataaaattgccttatttaaatttaaatttaattattatttttaatttttatacattaacttattaaacaatattaacaaaaaacaaatttttttttatcatttggttattttatgtgcataaatatattatgctttcccactgattcatctcacatcacccaaatcacaatttacatattcaattggtaattacccaaatggacaaaattatataataaaaattccaaaccaggaaagtggttaaaataaacaaaaactaaaaataatattattaaaattcaaagttttttactattttagcaagcttaaagattaagaaatattccaaaatgtgccagccaacgcatttttttcttccgcttttcatcttcagcgccaacaaactgttggccgagaatcttgctggtatgaattagtgtattgaaattgattaggaaagatttttgatcaggttttcacgtgttaaattgttaaaatacacagtcgattattcatatgaaatatttaaaatttaaaaaacaatttcagaagctctcaagtgcaagcagggattcgaaatgcgtccaatggtcgaacaacaaatggatcctgacgaatgtgtcgatgttgcgtttcctcgatattgtgaagcctcaatttgcacaactgctggtgataacattggcgtacgtagccaggcccttggcttcggggggggggggctgaagtcaaaaactcgatttttagggggtgtattttttgttgttttttgttttaaatcccgaattaggaaggtgtattttataaaaaatgttagccgtttttcgcaaaaaaaaaggactattttttgccattaaaatatcggatttttttatttatgaaataattaaaattgatttaaaaactaaagaattaaatttgtttatttttgaataaaaagcaaaaattttccttattttaaaatctttttttcgataagaaaaattgatttttttaatctcaaatctggaaaactttttgacacagttacttttctttaatttaaaaaaagagtccatcctttggtgtttgttcatttttaatgcgttttgaattttaaaaagttattttaaatttttttaaaattaattggacacatcgcctcagaaaatatggctttctctattataactcctgttagaataaatcataaattttctggtcttcatatacagacaaatgagcagcaacaacaaaaaaaaaactcttaaaaatttttcattgctaaacaatgaaaaattgtcctatgaaaattanatgttatttcgcatttaataattcaaaaattttctcaagatgagatgccaacttttgcgagcattcattggaaatgtgttgaagaaaaaaatgccacagaatgtggcgaaagaatgaaacaaatttatgagaaaaacggtgacttaaaaaatgttacatgccaatgccattatggtgaagaaggtgaagattttggcaacaaaaacttcacgcttccgccgcctgccgacccagcggacaaaggtagacgaaaaaaatgagagaaatttgtgaaaaaaatcccaggagaaaattcgaaaatttttttaattgtttaaaactaatgagggaaaatttgttccttaatgagagtgtgccgaaatggaactttggaccatgaaaattgtgtaatgaagtataaattgggggggggggggcgggtcattgtggtaaatttcggcttttcacactgacccttaaacatatcgaagaataatacattgattaaagttttagaaacactttaaaaaattagcaaaaataaataaaaaatattatgaatatatataaaaaaattcaaattttccgttaattttgatttaagaccaatgaaatatttaattaattcaaacggaaattagattcgcttcttctctactcattttgaaagaattttttaaacgaactaataaaataaaagatgaattttgttaagtgccaatgtgcaagattggcatgatccattcggccagcaaaagaggtctcatcgacattggagtttgcaaaaaggatcaccattattgttttgcggcaagctgctcaataaagggtaaacacatattgagttcgacctgtacttggtagtgctgttcgaacccgaaattttctcgagaccgaaccttgaccccgaaaattgagaccgagactcaaaaaacgcgagacttttctcgagtcgaaactcgagagcgagactttttataaattttcttattctttaaaaatcggttaaaacttacatatagaaaattgaaaattcaatcaagtctcgaagacaaagatcgagactgagaactcgagactcaaaccgagaccaaattctgagtcgagacacgcgaccgagagtctcgtacagcactagtacctgctggaccctcctactgaacagagggcgctgcacgtaacttgatttcaaacagaaatccgtagttacagcaaattctcagttacggaaacccgtaatcctcattacggggggggggggggtcaaaaaaggccattcccgtaatccgtaatttcatatcttttaaaaaacaaaacaaattagcttgaatcacttcaaattaagccaaatctcatttacgctcaaattattaaaaaaacacaatgaccgcgactaattaattgaatatgataataataataatttaattgaattggctgaagataatcagtctctcgtgatgtggtcatgtgcaaaaagcgacgatggcagcatctgtaaagagattgaacagaatggcatcggtgccttcaaaggtggcaaaatgtcttgtgaatgcatgttcggtgctcggaatgctgatttggcaaatgagatgatgctggttcatgatttgtttccgctaatggttggacatatttttacggggcaaagtcattaattattattttaaatatcataatagggggcattatttaaaaaactatcgttattaaaaatatttatgaaaatttatttacaatattgctcaaaagcaacctaaattttaaattattaatattatttgatagctcctaattgttctctctattaggctgcaaaatttccaaaaatttcgttaagtttcaaaaagtaatgactagaggaacacaaaaacgctatcattttttgaaaaagttaacaaaaaatttttttaatttggcagagtgatagagaacatttagagctatcgatgatactaatagcaaatttttaagcaaaattattatttttttttttgagtaaggtaagtttaagattttgtccaatttttggccaaaatgtagctgtagaacataaaaggcaactcgcccggtgggactcgaacccacgaccccagcaatccgtgccgtgctctcccaactgagctacgggcgccacttttagaggttctctcaggtcctttatcccactttctccacactccgttccttctggcatcacatagcatttttgagcccattagagttcgatgctccttacagactcccgtaaaaaaaagtcttgaagttatttctaaattcatttaattaagccatgattcttggttttggcagcaatcattgtctgctgaagacgcaaatgagcaaaagatgttggattatgaaagaatattattactattaaatataaatttaattaatttttatattaattgtagtgtgttcggttaaacgaccgtgaacaaccccaattaattattattaattataatatagttaaatttttattatcagccgggataaatttttatgctttgtattttatatttattgatcctttattttattgtttttgggtttttgtataaaatttgcatctaacaataattgttttcgattttttttttgattttactttaaatcatttaaaattggcgttgaacatacaaataaagagcaattaaatattgttagcaaatttcgaaatttcacctctttgttgtgcccaggtgccttttttcaattcccgtcgtatattataaaaattaattgttaaaaaattgatgaataaaatgagtttccaattaatataaaggcattaaaattttcaatttaaaaaaatgcataaacaaataaaataggaacaaattaatttatgcatattaccaaaacaaccaatttacattatccataatttgtatttaaatcttcaaatatattattgaacattattattgtctttgggaaaaagtgtgacgttcgaattgaggattttttgaaaaaatggcgaatttttctaataaatatgaatgaaatgccaatatttttttgtgaatttctgctggctgttgcagtgcaggaaaaatatgcatatgcataattccgaaccatttttattatcaattatcacaaatcctaaaagtgactaaattttaaacatttcttttcttcttttttaaaaaaaaattttcctaaaaatttatttattttttttttgctaaaaaatgtgtttttttatttttgtgttgaataaatttccccaattttgataattccagcttaattatgcagtatagcagcagtgcttatgattttttcgagagagaatgatgattagctttcgttttcattatgtcgttccatttgtaatcccaaataaaatggtcggcttcgtcatcattggaagccatcagcagcaatcagcggcagaacacagcagaagcacatccatttcattttcaaaacgatttacgaagaacacattttttgtatttttttcattaccgttaatggataaagtctaaattattattttttgtttttacacattgcattttttattatatacaattcgttttttctttataccatcgtttttatatggtccggtttttcagaaaggttccttttgggaataattgttaacatttagtgttgattatctcatttcttaattcaaaaattgctaaat

SEQ ID NO: 4453 - DNA, 2848 bp, Heterodera glycines
aaaacattgaaaggaatagcaagcgatatgggcacagtcgcaggaggagccgcaggatttggtgccttagtttgccacaatcattttacctggccttggcctggcagccgctccgctagtgggtgcggcagtcggatcattgattgctggtggagttggagcaatcggaggatttttttacaattttggtaagtcattcgcctgtcatgtgagtaggggggggggggggggtggaatggagcagaaggaatccagggatagaaaaagaaaagcatggtggattatgaaaatgtttaatctctttttttatgatttttgcgagagcggaatgcaacttgggggtcggcaccagggccgttgcggtgccaaaatttgttaaaagttttcgccgaaaaaatctgcaaattttgcgcataattttcttataaaaaagtgatattatgccataaaatttcaaaattgtctgcatcgaaatccccgaaacgacatggccccgaaacttgatgagattttcgtttaagaccagctgtccgcatgaaactgcatgttatcgccttgaaagtgatgtttcatggatgtgctgcacgcaaaatttcagacggaaatgtgtcaaagatttttccgaggtaataaccaaaatgttgagaagaaataatgtttaaattgaaatgtaaattttaaatcaaaattatttctacaacaaatatattttttttaaatttcatgaaaaatgaagtaattaaagttttcatcgaaacaatgaatagaaaaatctaaaagccataaaaaaaattttttgttaagctcaaattaaaatattaatttaaaaaatattattttgaattaaaagaatatttttattgttaaaaatcttttttccaaaattttatcatacatataattttgaaaaatttccaagtttttttgtgggataaattatgaatatatggctcaaaattatatggagtaaaaatgtcaaatatggacataaaacatggactgaataaaaagttcaataattgccaaataaaaattgcaaaaatataagtctaaaccctcaaaaattaaaaaaacgcgtttatctcaaatattgattggatttatatttatggtatataagcaaatgtttatacctaatcaaaaaataataaataaaaatttaagattgaggcgatgtatacgaccacaaccacaactacgactccaacgccagctcctgttgtcgcaacggttggtttaaaaacagaaaattgttattgttttaggaacagagaaaaattgaaggattcaatttccaaaaattttcctctgaacttctaatttttgatcaatctttaaaaatttaagtgattttgaaaaaaaatcttcgaaaattgtttcgttttattttgtattttttggatcaaaaatttgtctgaaattgctatgcaattttaaatagtctttttatttctatctttttagtctttttatttgcgccataattataataaggtgcataatgaataaatttttttttagtttttcccaacttgggcagagacatttggacacggactatcaataaaggtacttgaattctaaaaattggcacttttttgcaataaaaattgccctttttgctaatacttcagaattgcggtgccgacgaaaaataaatttaaattttatttttgtctttactaaagtaaaaaatgtgctgattacgaatatctgagctcagattttgcaaaaacattaattttatttgtgattttcttcaagtacttgatttttcaaaattttttattatttaaaaaaattttcttgtaataattcggactaaaaatgcgctgatcatgaaaatgaacttagattccgaaaataagggccagtaattaaatttcaaaaaatcgtaaaaaactaaaaacttgacttctccagacattcaatagcgcattcgaaagatctttttcagttctacaacacatttatatgagtttttttatgactgacaaattttttttaaattttggaaaaaatcaaattgatgaaaaacatatattttgtaatcagcacattttttacccatgaaaacacacaaataaaattttaaactttatttccatcgggaacaaccacaattctgctgccgtattacccctttttttttgtcttttttattttccgttatgttttaataatgctcatttgtcattattattatattacatatacattatttcaggcagaaggaattacttttcatgcatgtctccggggacgcaaaagtactaaacagtttgtgctcactggaaaccaatgccttttcaatgcaattggctgttattttgttttttgttatgatggtaatgagtgttttatttgatttatttaattgagaattgtgaaaaggaacaaaaatattcaaaaattataattattagggctgtcaaaaatatgcaaatgcatatttttcctggattctacgtagtctaattactaggaaaaacagcttctttttggtatttgcttttatttgcatatttttgcatattttgccatttttcgtcaaatattttacgatttgaataccccataagaaaaaaaaatatgcatattttgcgactttatgcatatttggtgcatattgcacgaatttatttgtatatttttgcgcatattttggccatttttcgtgtatattttttacagccctgataattatgatataggtgtgtggccctatgaaaatggcttgttttatgatgtatcgaattttttccaaaattaattttgagatttttacaaattcatttgttttaacgatgaggaacatttggatctatattatatttatttattttca

SEQ ID NO: 4454 - DNA, 1403 bp, Heterodera glycines
  unsure (1)..(1403): unsure at all n locations
ttttctcttcttttttcctcttttttcccttttttcgaccccctctccccggtttctttcgttaaacatcagccgaccccttacgttcgaaataatgacccacccctcgcgcaggtacggcaataataacatttggacggcatcaaagggtgggcgattggcggttcccccttttaatgggcgggcgggccgccctctttgttcataaaagcattcgccgcccgccgctgccgcaaaggcgacgaaaaaaaattatgatggaaattaaacaaattatcatttatcacacacacatttttatgctgctaatggggcgacacttgggcggcgacacttttcgtcgaataaatgaatggttattatcattttcgacacaccgtcccaaaaaaacaatagagatgaactaataaatagagagtgcagagaaaaaatacacctctcattttggcgcactaaaaatttccgcgtatttttctaaaatttttaagagcaaattaagggaagttattcaacgaaaaaatattcggaagccgataactcttttttatggtacatcaaatcgtttagcacttacttatttgttagacaattctttgcctcgtcatggtttttcaaatgataccaagattgtctgtccaattgtcaattgagcaaattggttgacaaatatctccaaatattgttaaagcctttttaatttatggaagaaaattaattanaaaatattggtgtcgtggagcgggttcgaacctccaccccctttcacacacaaatttttattctgccaatgggacatttttcgcgtcctttttaccaccagcaccaacagcagcagcaacgaatgaatggttactattatcattttcgatgggttggaatggaacaaacacctcagcaaatcgaatcgcacatttttgctttttaattaattatttaatctaattagtgtaattaccattacgtgttattagtggtgagagcatgtaatttgttcattgattataacttacactcttatatcagttagaatgattttgatggtttcaaggcaaaaatttgcacctttaggcagaattgtataatgatttaattagtgtccttagaaaaatctagctaaaaatttctccgaaaaacgattaaaaaccaataatttccttgggcttcttcaaatttataggcagaaatagccattttccggaaaatgctatttttcgtccaccataaacctatgaaacattttgagaatttcttaggaaatttgggagcgaataacaaaaaaaaaataataattattcatttacgtttgactttttcacaattttttggcatttagtttcgtcatcattgaaaaactctcatcaaaatcagctccattgccttttaaatcaaactaaaatgctaaa

SEQ ID NO: 4455 - DNA, 1040 bp, Heterodera glycines
ttttagggaggctgccctccgccctcccccacaatttttcccaacccatcaagtgcatggcgatgtggacgttggtggtggtgaattgttgtcagtggaattttggggcttcgctctctctctctctaatttgtttgtttgcttgcgcagagcgtacgcgcatcgcccccatcaccgcactaatgaattcaaaatgttttttgtttaacttttgagaatttttccgaattcggaaattttttacctatgggcttcgggaccagtcagttcagttgtacccgtttgcataaaaataaaagatcaaatcctctgttcatgttccattgatcaactgaaccgatgatcgaaaaatccgcggatcgaatttcaaatgcataaagatgggggatgaatttggtccatgaatcaatcaatattagattttatcattttcactaaattttttgtatattgaaaaaaataataaattttttacctcattcatacaaacgactgactaattgaaggagacgggcgcctcaaaggttcaaattcgactttgcccactaattgcctaatcagttactcaaaaaaagcaatgaccaaattgccattcattttcccgcatttaatgcgtcattctcaaatgtaaaaattcacaattccccaaatttgatcacataatgttatgtgtgtgtgtatgtgcttgggaatttttttgttgggctgacaaaatgagtgggtgggtggaggagaagtccattctcgacgagaaatgaataatttaattggtcgctctcgcgcctcactcgcggcgtcgtcgtcgtaaattccatttcgacgaaaacgctccgccgcacccctaaagggttaaaaagcgggggggggggggaggggtcgactcagcgcccgccaaattcagctgcgccatgcataattaaataataagaaaattttttctaagacgtgatttataagtatattatgcacttttcgattggcggcgagattttattaaaaatcctaaaataacccctttttcaaaatttttttgagatttt

SEQ ID NO: 4456 - DNA, 1885 bp, Heterodera glycines
tttaaaaaacaaaaaacaacaactaaacagcccattcttattgttgtatgttgacaaaagagtgcttttttgtgctccagtgtgatttgatgattcattcaatcattcatttatttgacgtaccaattaaaaatatttttaaattttaattatttttattggaaattgatgaaatttaataggaaaataataattttatttttcagatttatttattcatttcatcttacacaaaaacaatcgtcttaaatgtaagagaacagattattataaaataaaatatctttctaaaaatgattcattgtctctctatttctttttgtcggctaaattaattagacgtaataattttaacaaaaataagtttaaaaatactgaaaaatttgaaattttttctttaatggtaactaattattattaattggtcagggaacgacgacgtcccattggattgccaagaacgcggagcacatttgcggaaggctttttccaaccgtccgaccatccgccccttcgccgggatccatttgacaaattccaaagctctatcccctcctacaatcgcttccgggatggaatttgtatgtagggggcgaaagcgattaactcgggatccgattttcaaaaaactaaaaaattgaaaaaacaaacacaaaaaatggcgcaaagtttttcaaaaacaatgaaataccaattattggcataatttgatgaagcctccggatactgtaattctgtagtgtacgaggttactgtattttcccaagtttcagcggacccaagctcacgcatgttcaatgatgacgacttgatgttttttgacaattttccgcgtcgccccttttatacggagccggaattttttcacgcgacattgccacgaaatgaagaaccaccagcagcatactatcaaacgcaaccatcgccaccaagggtactgtattttgaataaggaagggtactatctactgtatgagaatgactgtatttcaatgggcatgatatgctactgtgtgagaatatggaaggacactactgtattcaacatacatgagagactatactgtatgagaatgggcaagagaggcaaagaaaggcaaaaggagaattcgaaagggaaaagatagagagagaaaacaacaatgtccttttttcaaggacgtggaaatttttcaaggacacacctaatctgacaatttcaccaagcaaaaaacaaaaaattaatcatcggtgcattaacatgtttgtaacacatgttttatatttttttgaaaattcataaaaaattttgaaatttgtcaggctaaaaatgagtataatcaagaattgaaaattactaataaaatattttattttgagcattttttttttttttttgcattttcatcctttgccaggaaccaatgccatcgccgcaaccaccgccgtcccacaacaaccaccaccaccatcgttccaaatcgcattatgacaaagttggggacaattgggagcgtccattattccatcatcatgggggtggtggtgaaagtgatcagccggaacaaatgctgtttgataataacactgatcagcctcagcagccacagcatttcccgcaacaaaatcaccaaagtcggcataatcaacaaccaccaaatgatccgaatgtgcatgtgataagtaaggagacggatggacggcaaaaaaataattgattgacaattttacgagaatcaaaaaaaaagtgcaaaaatttctcgacttgactcgggacctataatctcggtcaagccagaaaaaaatttcggagcgggggggggggggaatccgaagaacatttttaaaattttcaaaaaatttgctcgttttttcttgaaaattttttaatttttcgttcgggtat

SEQ ID NO: 4457 - DNA, 1153 bp, Heterodera glycines
aaaattccaatctgtgatcatcgaatgtacagcggatgatcaaaaagtgagtattagtgtttaaataattgtttttagtacataattgtgaaatgctttcaattgtttttaatggtgccactaaatttaccataatttttatttaagaaaattcggcgcaaattagcacaaattgttgagcagatgaaccagcaacagaataatcagaatgtgaaaaaaatgtaaagcaattaaaagttgctaaatttgatgaaaaaaaaaattaattttaaatttttttttttaaagtttttgttggacttttgtacttattactgtattctaattgaattccattttgtaagagataaaattgccaattcgtggaatataaaaatttttattttttaataacgaaaaaggattcttatcgtcggttttatattttacaaacaaataaaagaaataattatattaatatttaattatataaatttcgatatttaaaaataataatattcaacaattttttttttaatttttttactcaccaacaaaaatataaacaaaagacacaacagttattttacaattcattgtaatgaatacataaattattttcaaacaccaaaccatgaaatatataaaaagaaaaactataaataaattataaaattatatgaggcaactatgactgaattttcaattttttaaattaattaatttaaatctatttttattgtttcgtctcagccaaatgccgcggcttaaatgtgccgtccgtcctccttttttataggttagcggagagcagggcgggtggtgattgtctgagcacaaactcgagattgttgcggaacaccagctgattcttgacctccctttttgtttttgcgcctgtggaagggacaaaatgccaaattaaaatttaaaaattttacgagaaccaaaaaatattatttaatggaaaggcatggaaatttttgggggtgtttttttctgcttgcctcggctctttttccagtccctacagtcacaaaaaatttccgtcagtgtcgggacagacgggcggaattttgggttttcaggcagatggactcggaaacccaatttttgtaacattttttttggggggggggggggggtggaatgatgttgaggggaattgatccgg

SEQ ID NO: 4458 - DNA, 2112 bp, Heterodera glycines
tcatcatggcaccctgctgttgacggttgaaaatgtccttgctgagcgggaattgttgtgcggcggcatgctgagtgatctgttggcaggccgggccctgaaaacgatcgggaaatttcataaaaaaacccaccgtaattggaaaaaaccgccgtttttttacagtaaacttacacgctgcgatggcggaatctgtgagcacagtgcgtgcaatggggaaagcgaaacgccttgcgaagcaccaccgccgcagccaccgccattcatgccagacatcatggcatcctgtaatataccgtagaacgtagagtgagtacaatttttgtacagtatgcctctcataatttccaaatttttttgtttcaaaaaattattgacaaatccggtttgcctggttgtgctggggcaacaacacgtcggagaatttgcgtgccatcaagtccacaacactgcgccgcttacggccaccaccgcctccaccgcagcaacagcacgggcctggggcagagagaaaattttaaaatttcaaaaaatattccctagtccagaaaaaccgcagcggagaaaaaaaaaattaaacttacagcagcaacagcaaggcttgcctgaaaatggaaaggtttcttaatagagcggggtactgtaaccgtaatttgtttttgtaaaattttgaatgcttaacctcaagtgagaaaaatgctaatttcaaaaaactttacggattggagcagcaagagtacacgactctcgagttcggctactgtaaccgtaataaatttatgtaagcaaatccaagaatttgtcggatttggccagtaaagccccaagactctcgaaaggcgctagtaaattgtttttcttttaaaaagctagcttacagcagcaacaacagcacggtttgcagcagcagcaacagcatggcttgcctgagaaatttttaaaattaattttatttttttgcggaaaaattctcatacagcagcagcatccgccgccgcacccgcatccgcagcagcatgggcaaagctgtggtgtggatgggattggaagaattaatttggtgccattcattaagaggattaaatatgcctatctcactaaaagactctcccctaatttgaccctcccctatttaataagcatagttaggctccctaattagaatgcccctcccttaattagagccaccccgcgtaattaagcgtgtaattggagatagtgggtgcttcatacgaatagagcatctaaattaattaccttaacaggtggtggcggcaatttgatgatgatcggcttacagcaacagctaaaaaaaagttggtgaaaattttgcaaaaatttcagatggggaggacctagggcaacaacagcagcagcaccctgcctctgcgtccctgatttgggccaaaaatggcagcgtgatcaacagaatgatttgaagaatgcccataattttccgctaaaaaatgaaaaacacttttttcatgttggcttaaagccaaggaaattgaaaattttggaaactaaaaaaattctccccatttgcaggcccgtagccaggggaggcggaaattctacccgccccgaaatagaccccaaaatggcaatttagtcattttttggcgaaaaacatcttaaaatttgttatttccccctcgctgaaaattttgaaaaaaatacttaagaaaaaaattttggctataagagcaaaaaaagggatctttggattccctcctccgctggatggattggaggatctctctgggcctctctgatctcgagacaagctttaggttctcgagaattgtgagcacccccttttcccgatgattgcggaattgcaaatgcaattaatatgaatggtttgaacacatgcaaataaatccgcgcttcccatcttttatatgggtataattttgtgagcgcctccccctccccccggggggcgggagcgagctgatgatgcttcctttcacccttccggaaaggatatttttagcggcggtaggaggtccatccgccgctcctccgcgcaccgctaaaagcacaaaaaaaggaacccccggccgggtaaacaaataaacaaatgctaatatgctcatcaattttgcc

SEQ ID NO: 4459 - DNA, 1694 bp, Heterodera glycines
  unsure (1)..(1694): unsure at all n locations
gcctgcannggtctgaacncaccgtagaaaaaacactccaagatacagtcatctttttagtataaagtacgaggaactgtaagactgactaattatacagtaaccgagaattcagaaaaaagtgcagaaattaaatttctgaaaaattccactgcctcctgtaaactattcccgtcatttttttttactttgtccttgggcactgccaactgtccaaattcagcggcactcaggcgaacatccgcttgttcacgtgccttgcatgggtcaaactttaagcgccgtcgaaactcttcaacctgcgcacagcggggaaaatggaattgaattttgggaaaacaaaattttttaatcaaaataatcaccgatttgttagcggaattaaatgcacccgtttttagagagccccccaccaatggtaagagccatcgacaataaaaaggattagttaaagtaagttggccgccacagtaaccacgattagccaaaattacgaagatgccgtaacaaagacttcatcaaattttcggcaatcggaattccgatgaaccaaaaaaagaaatttggtaatcggaattcctttcggcaatcggaattccgaaggcccaaaaatttcggcaatcggaattccgaaggcccaaaaatttcggcaatcggaattccgaaggcccaaaaatttcggcaatcggaattccgacacatccctgatacagacagaccgctattgtcaaacaatctctccagacatagacacctttagttccggcacattttgcaacagttcccaagtgcactcgtcataggacaggcccctccacttgacaaatacgtaatgctgctgctcctggtcatcgtaagtttcgtccaaaatgcgtgcaacaacagtgtaatcttcattgaaatattcctgttcatcatcttcgcccgcaacagtggtcgtttcgccaaacttttgtttgtatcttgaaaaaaatagttaattaattaattttagggtaggtcgggaccgggacctggacaactgagtaccaaggtcccggttttgaccgggattgggaaattcccggcttttttcccggttttcacagccaaaaattcccggtttttcaacccaaaaagtcccggtcccggttgtgcccagaattcccggtcccgacctgccctaattaatttgtttaaaaaaaaattaagaattgccaaaggtttgggggaaaacggtttagaaaacattgaaaaatttctcatcccgttactcgtaaatgtcggatgtttgccgatttaaaaaacggtcgcggtgattataaatttcttaatcaagcttgtaaattgttgacaaaaaaatcttataaaattttttatatgaaaattacaaggaaaaattacaggtgattttttcaaaatgtaatggtgaatttctgtgtttttttgaaattaaaaaaaaaatacttttcttgaatttttatataaaagatttctaaaaaaattttctgaaaagttttttggaaaattaaaaaataataattttctgggagaccgatggtggggagggactgaaaaagggctctgctcccttcagtaggagtgccaccgcgctttcccgtgttgttactgtattgtacagtacagttacactcaccgattcagcttggtaagtgcccgtttgtcgccccaactgctccaactcctccaccagt

SEQ ID NO: 4460 - DNA, 2274 bp, Heterodera glycines
ctgatttcgtgcaagttaaccgatcgcataaaattcccaaactgccggaaccaaagcccattttagactaaatctgaaaactattgcaccgagaaccctcaaaacggtaaatggaatgaaaaaaaaaaattttttttaggcgtactatataattattcaaaatttataaatttttgccaaaaatattttatggactctccaaaaatgttagttttagggggaatggcccgccatctcctggcaagcagttcagttccgcgccatcagcagcttcagcttctcaccttcctggttgatcgccgcttctccaccagcaacatttgttcggcttcggccgccaccattgccgctgccatgccctcctcgtcatcgtcgtccgcttcgtccaccatgcccgctgtttctgctgccgcaagtggtgccgttgcctttcggcctccgcctcctccgctacgcttttgcttccttttcgaggaagacgatgacgacggcactggcactgtatgccgtgacaactttgccctgctcacatagtcctcgtcctcgtcccgccggttccagtccaacttgcgctttttggtgccggctctctgctgatgctgtttgcctgttgatggaggatgatgaataatttaattttttaaatttttaacacaattttcttaaaattttgttaaacttttaaaaaaaaatttcctggcgtgacgcctattggcatcgcccaagggcgattacctaaatccttttaatttttcaaagtttgagccaaaaatgcgggagcctggctccttaggctgctatgcttgaaaagaagcaaatttaatgcaaaatcattttaaaattgcaaagaaaatgcaaacattttaattttcaatactgctcaacctttcgtataattaaaatttcgaaaatgccgcctttttttgattcaaaatctctagcaccggagccaaaaagcaggaattagtagatattttgcgccgaaaaatcacaaagtttgccatttttggctcaaattttcaaaaaaaaataagaaaatgtgcaaaattttcagaaaatttgcccatttttgcttgaaaactttttggtttttcatttcgggggggggggcacgtgtccccccatccgcccccctagatactggcctggggggggggctatattacattaaggcggtagatttgtcattttttacaatttcaactcaattttattcttcatttgtcctgtgcccgcccaccttttgaggacgaagtgccggaggctgcgaattcataattcaattccgcagcggttgaaaatgagcatgacgaatgtttgacggaaaatgggagtttgtgttgcggttgttgttgttgctgctgctcatcggcgtccattggcgttgtctcttttgtggacacttcgggccatggcgaactgtccaccgccgactcatcctgtgtgattgaggatggatgatttatttaatttaattgaatttaatgaaaaattcaatttggattttgtaataatacccattgaacttttttttttaactgaaacatttccatggcataaatgatcgtaatttatgagaaaaaacaaagtaattattttggaagaaattttcgttccataaaaattataattttttgccttttttgacatagtaattacgggttgaaaaacagaaactgcaaattaaaaaaaaattttagtcgagatggctgctcaatattcccgatctcaagtggagaaatttctcggattttttttttggggtctgcgcagggacgtatccaggatttgggcttggggggggggggggggtaccgatccgaaaagtcaattcttaggggtgtattttttaaaatttttcgcccgattcataggggtgtatttttgaaaattcttcgcccgattcttatgggtgtatttttgaaaaactttcgcccgaacgaccgtttttttttttttttgctcataccagcgacgctgggaaaataggggggtatttgaaacgataaattagcattttttccatcgtttacacaatggattttgaaatttagctatttttacagcttttgctccgcccctggccgccagcaaaatgtttctttgtaatttggcgttggaatttaaaattaatatgttgctttcgttatgataatttggcgttaatttaaatttggcattgctttttctctctggggcgctggttggtcttgttgggggggggggggtaccgcctctctttttcccttaccgaggggggtcttgggggggggg

SEQ ID NO: 4461 - DNA, 6460 bp, Heterodera glycines
actatggcggcatcggtggtggcaaaattgacggcatggctttcagcagtagtgcgtttggcattgtcactaccttttgctgcatcctttttcacttccggcggcggctttcttggcacaattttgaccgttccagccaccgattcacgtgcaacaattcgtcgtacggtggcacacgaagcgaatgacgatgcagcatgctttgcaacaaaatgaagcgccactttggcattttgtacgacgaccactgcaggtggtaatagcggtggtggtggtggtggagcacgtacaacaaccgcaggtgacggaggtgttggcactttgctgctgttgccaaacatggtggacccaccaccaccggcataagattgctgctggcgatgacgagcatgtccatgtgacgacggcatggtaaattcaggcggtgtggttgcgcgctgctgttgtgacgacgaagaccagtatggtgatggcgacttttgctgggaatgttgtcgttgctgctggagctgttcaacagcaatttccggttgcggcaccattgcagacgtatgagaacggtgccgaaatggcgccgccgacggtgccatttgggtagaactggcactccggaagcgatgttgtgctgcatcctgctgaactgcttcattgtcacgtgctttggttgcaggtgaaattggcgcattgggtggcggtgatgtggaaagtgacgaagtctgtggaaaattaattagtttattttattttaattttgtaggtttaataaatttccgctaaattttcccaaaaaacccacaaaattagcaattttttggtaaaaatctgttaaaaatggtaagaatttattttttttttctggcgaggcctcaaattttagttgtagaaatggtaaagttctactgacccaaaattcaattactataatacactattcattttcaactatttttagattgccaaaatgccgtcaaaaaatgttgcataatctctgtcgaattcacaaaatatttagggatgcgaaaatatgatggaatgttcaattgtggtgtgccatctaattatctaacccatgccaaatgtcacctttgttggcatcgttgatgcacccaaattgaaagattgctgcttctgttgttgttgctgttgttgctgctggtactgtttgaatttctgcagttgctgttgctcaagttgttgttgctgctgctgttgctggtcctcctcttcccgttgctgcaacaatagcatctgttgctggcgccgcttctgctcctgcacaatgttggacggcacgggctccggtggaatggagtccttaaccgccgccgcagcagcagccattgccaaattttgtgccataattgctgaagcagctgcagaggaagcatctgccgtcgatgacaatgaatatgttgcggcgtgttgttgcggttgttgctggtgtaatgatgccaccggcgctgctgaactgctcacaactgttggcggtgccatgtcctggctgtggtacacgctgatcagcgttcggcccggcatttcaggacggatattaacctaaaaacacaaaacagggcataagcgttgggaggatgactgggaactgatcaaagtcccgggcaccaacttttcatatagaattcatgttgcccaactgggagacagctgatttcactccgccaaattttcgaaatttgaaattttttcaaaaaatcttaaaaatttttatgagaaatttcaatttgtcaagaaaaaattttaaaaaaattatccagcgaattttttcagtttcataatgaattactgttttctcaaaaaaaaaaaatttccaaaaaatcgctggaaattttcttgtattttttttttgaaattttctcataaaaacgcccggggaggggacgtagtaccgcatgcaccgtgcccaactcacctgcacttggctggatgcggacatcactgcaacagacggtggtgccaaatgctgttgcgtgaactgcggctgcggcgcttgttgttgttgctgctggtgggaagcagtaatgccctggggttgttgctgttgttgtggcacaaccatgccaaccgatgtcggttgttgatgttgctgttgcggcgtgccgccgcccgccgccggcgagctgtaccctgcagctgcccctaccaccgtctgcggagttggtggcatgtacgacgatggtgcggacgatgtgccaccaccaaattgatgttgcggtgccgaggttggttgttggttgcttgacggttgcaacttttgttgcacaggaatttgaccggcagcaacaggttgttgttgctgttgtccagtggcaccaggaaagtgtccatgctgcggttgttgctgttgcggcggttgcgcagcgatgccatatgccgaagatggagcagcgtattgtgtgccagcagcggtcggttgcgcgcccataaactgttgttgcggcggttgttcacggctggacgcgttggacggtgatgcaatgatgtcagcaccagcggatgttgcggttggctgttgttgctgcattggaaccatgccagcggtggacaatgatggtggcacaatgttggacgatgatgccatcgacgcagcaaccgcagcggcttgttgctgcagctgaatgaggtgcccttgcaagtagctgcggtgcatctacaaaaaaaaacaattaaaattggggcatttttttattaaaaatttaatttaaaattggcattctattataaatgccaaagaattgcctgcaatttttccacgcgcattgccgcctccgcgttttgttgggcctggggcaacaacgcattcagttgctgatcacactcgtaaagttcacggtaaaattgttgctgctgctgttgcatcatgtactgttgttgctggtggtgttgctgaggattcatgtaactttgatggtaaaatgccgtcgtcggtgcgcctccggcaccggcaccgccgcctccggcaatgtgcgcagcggcagcggcggaggacggcacagcggtgccaccgccaccaccaccggcagcagcagcggccagcatttgttgctgctgttgcaagtagtatgctgaaacaatggcatggcatttttagggggaagggcatggcacaaattttgaaattgtgcaactattgcacaaaattttggtttttcgtccgcgagcaccaatttttgcggcacgcttttttcaaatttttggcaccgacagacagggccaccgaggaaaaaattgacttattgttcccatttttgtgtcccgaattcacttttgtacaaaaaatatttaaatggtataataaaaatttttgaaaaacaaccaaaactctgtgaaaaaatttcaaaaacccccaaaaagtgatttatccggggcaaagggcagtccattttaataatttagcaaattatgaaatggagcaacggaaccattaaaaaaaattaaatgttacagcagcagattttcgaaaacaagatgattagtaattgcttaattaattattcaacacactcattaagataaataatgatcaccggtaaatgattaaattgtcaaattaataattaaaaataataaaaaaaaccctaaattaacggaagtgaagtcaatgatcatcacacaatcattccataaaaaagtgaggtgactgtgacgattccgatttgagaaagtgtcaattctcgcgacagaaattttttttttttgcgcaattttattttaatattcattttgcaatttcaaagaacggtgaattcgcgcaattttggaattagccgatcaaaaatcaaaaaaaaacgaaaatgaaaattaaacttttaattgtaagaaaagtggaaaaataatttgacaccaaaatggcaaaaattggtcattttttggcgaaaaatggctacaattctgcttttttttccacggcgacgaaaactgttaaaacattgaagaattttgttttgcatttaaaagctagggcaacacgattaaaaacacagggcgtcagaacgcgaaaacaaagtaaaattgtccaaaatgccaaaatataaaaaattgttggaaaatgccaaaaagggccaacaaattttacaaatttttttaccctgccgttgcatggccatctgttgggtgtaatcagcggacgttggatattgcatttggggatagccagcagcagatggttgggaaggcatgcccatcatcggcttaaatatgcccaattattaaattttgtattagattagaataaacaattcaaacttagattagttgaaaaaaaaacaacttacaaattcatcttaaaattatgaaaaattctctggaaaatggttcttatttattttttcttgaaattttcttagaaaattttataaacttttttttttttttgaaaatttctgcatgaaacttttttgtttttttgattttcggggggaatggaaaacgaaactgctcccgggggaaagtgacccgaagaagaaatccaggcgcccagtttttctttttgaattttttgtaaatttcccagacgggtggggggtgaccgaagggaaaacgacccccgaggggagggggcatttaaaccccttgccccacatattgtccagcagcagcagcctgctgctgttgttgttgttgttgcggttgttgggcttggtatggctgcggttgctggcccgtgttgtagaacattggctgttgttgttgctggttgtacggttgtgccgccgctgcagattggccaccgcctccggcacccggcgccgtcgcggatcctccgccgcttttgatcatttgttgtgccgcagcggctgccttcgctgcgcttgccgcctgctttgcctgttgctgttgttgttgctgcataccgtacccggcaccaaaattcgactgctgctgtatacggtaaatgatcgtttttgaaaaatttaccaataaattttaaaaataaaaataatatgcccatctttttgtgggcccaattaagtttatgctagttctacttttgggtacaaattggaaatttgtttattgaaggaatgcagggttagttaaaattggatttttttagccatgggttcaaatccgtctgcctgcaaaaaaaaaaaaaattttttttaatatttctcgggctttttgggtccgctgatcaagaatttgacattcattttagcccaattctggacccctaactttaactcgaacaaaaactaattttacaaaattataaaatttgatttaataaaaaatttaataaaatgtggcgaaatttctaaaaaaggtactaatgaaagtaatatttaaatttaattattatttacaataatttcatttgcagaataatgatcaaacttaattttgtccttaattattttgaaagtttttaaaactgtttgaaactgaacagattaatagagaaagaaacctttgtcgtattctgcaaataaaattaaatttaaataattaaatttaaatattatctttaattgaccactttattattaggttcgccctttccctcctgtcgagaatgagcaaatttccgatttttgacaccatgtaactcttgaagcaagcaaaatgcaccgaccctgatttgagccagaaaatggccaattttgcggattttgggccgcaattttagaaaaattcaagtgaaaattagtgccagggctggcaatcatgccgagataggctaacgtcggcaaatttgtttaaatttttcatttcgtccaaaatctgcggcacctgcgctccggcagcagcaacggttgtgccctgttgctgtgacgtgtacaagatgccctggggcggcggttgttgttgttgctgttgttgcaacaaatagtgttgatgctggaacatttgctgctgttgctgtgcctgttgaaaatgttgctgcttttgttgttgttgttgctcttccctgctgtgagcagaagcggactaaaaaaagaacaaaatccataaatttagccaaattttttaagccatttttttgttgaaaaaggccccctccccttaaatgccgaattccgatattttttagggcatcggcacattccctgctacaaaatataacattcaatccatcccggattctccaaattttccagctaatcaacaaataggtagcaagagtgcagcaagtgaagtgctgacgattgactgaccatcatttcggcatggcccagcggcatcatccccggcggcgggccaggccctttgtaataatagcccatctgttggtattgtgccggcgacagcacctgctgttgtggcggcacaccactgatcagtccagctaaatgcaaaaaaaaatttagttgacaacggaggacaaacaaaatttatggattagaagggccaatatggttaatcccgaaccattatcgcctaaatcactttaaaagcattttatcatttaaataaaaatcaaagacagcgaaagggattcgga

SEQ ID NO: 4462 - DNA, 8398 bp, Heterodera glycines
tttttctactcgtcaacggtctgaatttcacacagactttatctcatagatatcgtttcattaattcagcaatctgtacaaagtgttgggcgtttctccttccgcctcacaaagcgacatcaaaaaagcgtattatacactgtccaaaaaggcattcttttgggtttccatttgtttgcatatttctgacattcttttcagtatcatccggatgtcacaggttccaacgaatcgtgcgcaaagaaatatttggaaatcaaagaggcttatgacgtattgcgtgatgaaaaggtggggtgatgggattaggggtggtctccatccaatggaatgtttttctgtggtttttaccgtgctgaaattcagcaacgagaagaacacgaccgatggttagcggccgaagaagttcagcggcaacgtccaattaacggacgacagccgtatgtacgcagacagaaagtgtacgacgatttgtggccaaacaatggaaccttttcggatgaggaaatacgaagggttggtagaattcaaaagaagggggcgggtaaaaggaggttgatggtgtcggtaaggtgcacttcattcacctctgtcattaaatttctaaaaaatttccaacgcttcaaagtgttatggtgaattattattgttttttttaattttaccaactttaaatttttcaagaaattttggtattccttgttttgctacccccccccccctccgcccccttgaaaaattttaaaattcaaaaaatcatagatattttgttaatctatgaccagatatcatcagcagatgtcaaacaaaacaccattttcgtgatcagtgaccttgaaaaccccaaaatatgaattttttaaattttcgagggggggggggggtagcaaaacacggaagtaccgaaattttctcataaaaaaattgtcttaaaatttattaagagaaattggacgacttatcatttcatttgtggggtaaggcttcataccctttgccctattcggctgcatattttccgttaattttaaataataacaattgtcatttatgacagatttggcgcagtatgagtggcaacagcgaatttggacggtcgaattgggaatttgaaacggaggtgaagcgtaaacgacagatggcatatgaggaacagacgaggagaagaaatgagtgggcgaagaacgggttcggccaaaacaatggtcgaaggtgaaaatcgggaaaaatggaggggggggggagtttaccattgaccaattaataccaagaactttagtgattggactgaccaggaccaatacaaaatcattggcaaaattctcctctgttatgtgctcatcactttattcatcgaaattttcaggttacaatgaatttttgtctttatttacatcagatatattttaagcgcttcccttggacttttccgagacccatttctgccgccatataacagagaagaagacatcagaaaaaggattgaagaaagaatgcgaagaatgccgtaggattgacatgataatttaataattactgaatttatgtattgatcgttattttatttataggaaagtagcaaaacgaatttttccataaataataatgtctaaagaattgagactgaagcacagttcataatttattaaacaacaaaaaaacaacgactgacccattatgaactgcttcagcagcatgaatgacttgtggaaaaacaattgtgtatctctatcagaatatccgaattcacatgcgctcgagtgcgcgaattccaaggacattaaagcaccgttgcataatgtcagccgttacctcacaaagcaccaatctgttgaaattgactttggtggtcaccgcctgtccactttctgttttaatgaaaatttgaattattcgactgttttgatttgtcccgtctaattgctctttaattacccccttcggtcggcaatttgcttacgacgtaacattcgccgtaaaagtcgtgaaacaccgtcgccaactcgtaaacgtagtcacatattttgttgagttgcaaactttccagaacggacaaaagaacgtcggagaacttcaggatttgctttgctaatttgacttctcgtggatggtccaaaaacactccgtcgtcagaaggcaatccgttaatgaaggaattaatggcatcccgagtgacttgggcatttcgagcaattgaactaaaaagtcgcaataaaagggaaaggggaatgtgaggaaatagggcggaacaagtcatcgtaccaccgaaaatttacaaaaaaaaattaaatccgaaaaaaccaaatattttaaagacaatcttgcattttttatggactcaccgaatgcgtgcataagcgtatagcaaatacacagcagtgttgcctcggtcgtcaagcatcttaaatttgccaaattaaattgttgaattttgtggttaatgccattagatgatattcccgaaagccttttaaagtgatcataattttaaggaatgttctatcattaaaatccatatattcatttgttttatctcacaccgccaaaatttaataaatccatcgatataatggattggtccaatttgtatccttatgacccccactggtccccctcgaaacggaccctgtcaaatgagaacacatagtcaccggtccgggactgggccatgtccgcgtaacgaatgcatccgtaagcgaccgactcggcaacttctctaaactcttgcggtgtgaactcctgaaaaatattaccaaagaaatccctttgaaaatccctttgccttactccttctttgccttttgtgcgcaatttttcctccgctcggcgtacgccttcgtccagcaattccgtcagtttgacattttcgccggaacgcgttttgaactttttcctgcaacaaattattggcaattgttgctcaatgccactgtcgctttctgtcacctgtcctcgcccagcaccaatccgaattggacatgttccacgcgtttttgtgccgcatcaaaccacttcagctgctttccggtagcgaaaacgttcttcagaacgaataaataccattgtttataattgaaaatgtgcattttaaggattaacacctccaaatgttcggattggccacggtcgacaacgtaaagaatccaatcggcccgttcctcagacagtcgctgcttcagtgtggccaagtcgctggtgtcgtaggtgaaaccgccgtcacttttgaccaccgtcagcggaatgttgcactcgtgagggaagaaaagcttccctagaatgcgataaaagtgaataattagatgagggaaagtagtgagaaatgaaagagaaaaagacgcacttccgtcgtcttcgacgaggagttgagtctgtttcaactcctggatcaacgactgcatgcgcgactggtagaaggactcgccacgctcgacaaggtcagtgatgcccaaacgctcgtaaattgttgcaaagtctttaaaggagaggaaaaaacaaaaattaagcacaaaattattccatggccactgagggaagctttggtaaattaattggccatattagggtaaattttgtttgtccattgactgaccctttcggctaacgtcacagatcattttccacgccttcactgtgtccggctcaaagttttgcagtgcgaccacacattggtaggcttcggatttgaactgcgggtcgttgtcaaatttcactttcgattgctaaaaagtctgtgtatcataaaatttatttgtttttgggtttttttcatggtatttatgtaatgccaatgttcttgtgttgccctgtcctacccaattcgtcactgttaccctttcttatcatatttttaactcaccaactttgtccgtgcccaaaaaagtgatgacttccgtttaccttgtaaaactcttgcaagtcttggataggcggcgtttcattcagataattgggaaagcatttcttcagatgggcaattagcattccgaactgagtgccccagtctccgatgtgattcaaacggaggacctgagaaataacacaaatttaattaattataaatgaaatgattaatttatcgcctatttctctttctcaccgtaaatccaaagcattccaaaagacgtgcaattgcctcgccaataatcgtcgaacgcaaatggcccacatgcatttgcttggcaatgttaggcgacgaatagtcaacaatcacatgtttcttggcaattttaggaagcgaaaaaccctttctagagatttcggcaattcgttttcccaaatgtttacggctgatgtatacattaatataggcattgacgagttggtactgaaaatgggagattatcaaaaggaaaagccaagaaaaaatggaatgaaaaaggtagaagaaatgaaggcttgatttcaagaaaaggtggatttggtcggatcactaagattttcaattacaaagcaaaatgtccgttttcgctgtgttcaatggattttgcaattctctcaaccgccccttccgttcccatttcaaaaacttccattccttttttccccaccttttcgaccaattcgatttgctccagcgcagccacaattttcttggccaccaccgggggcggctccttgacgctttgttcgctgagaaggcgccgtgaaatttgcatgaccatttcgaattggtagtcgccaaacttcgggttgttcgcttctttgactcgtataatcgaaggatccatgccaagagttgggtaagcctcaaaaatgggaatgaatgcgattttattcgacttcctcacattttggacggcctttgcgaaaacatcgctcagtcgttcgatgattgaatcgccaaagtcttcgatttgcaaatgcgcactgccactcggcccatttggaactgtccgattattggcgactttattcccatccgttgccaatttcttttcggtttggtgtccctctgttggcacggcattcgcctaaactttgcagaaaatgggcaatttgaacagaaaggaagtctaatcgcagataataaagaaaaaggttaatcagtccctgcccgggccctcaccctcttcaggatgttcagttggtacttcaatttgtccctctcttgcactttggcagcaatttcaggacactcctccatgagctccttcccaaattgcactttctccatgtcatccaaaatcagctctattcgacttatttgtttctgaattttgaattaatgccccaacggtttctcccaaaaattaacacccattaaatattattgaatgtattaacattttagaggagcgaggacaaaaagaacgtaccttattatcgctagccatgaattggcgttataatcacagtaaaaatgtaggaaacctggatagaaaatgtccggaaaaaagttaataaagtataaaaaataattaggtaagtaaatcgggagaatcttcgaatttcagattaaaaataagatttaacacacatttcctctctttatcaattaggaactttctttaacaacaaataaatgtttttgtcctgctcaaatccggtcaaattgttcgcctccccctgaattcgcatcagaagccctccgaaagaagcgtatgcggtcagtcgactcgtttctgcggtgccctcgtcgttctcaatccggtaaattttgccgtacatcacatattcgaacattcgaacccggggaatgttttctatctgaaaatgacaagcgaaataagcatgtcttccgaaaatactcagccctcataagccgaccacccactgatttgtcgtattcgccctcttcggtgagtccgtcgtcccgaatcgaagtgcaaagcatcaaccggaatttgtcgttgattcccatggcgtagagttgggtgttcacatccaaaatgaggtccattttgaatgattcgctgtcacaaaagagacgactgactctgtcgaactttttcccatcggggtcaatgtttttgacggtgaacaaatcctcgaaatacaggctattcatgtcgaaaacttaaaaataaataaaaataaataatagcaaattaaaaagaattaaaaatgttgaaacaaacactttaaagtagagatcggcctgtacctggatccaggcctgtatttttcctggatccaggtacagatacaggccatttttcggcaacctgtattttcctgtacttttgtacagaaaatacaggtacaggcaatttttggaatacaggtacaggtacaaatccaggaaaaatatatatgtgtacgtgaaagatagacattttaaacgggagtatttttcggacgtcgtcaaatatcctatgagcgcgttgctgagacataaacccgaacggaatcattggtttccaatctgggaaaaatatatatgtgtacgtgaaagatagacatttttaaacgggactatttttcggatgacgtcaaacatcctatgagcgcgttgctgagacataaacccgaacggaatcattggtttccaatctgggaaaaatatatatgtgtacgtgaaagatagacattttaaacgggagtatttttcggacgtcgtcaaacatcctatgagcgcgttgctgagacataaacccgaacggaatcattggtttccaatctgggaaaaatatatatgtgtacgtgaaagatagacatttttaaacgggactatttttcggatgacgtcaaacatcctatgagcgcgttgctcaagactgagaatcccgagcagattactggacatttgcaattagagatcggcctgtacctggatccaggcctgtatttttcctggatccaggtacaggtacaggccatttttcggcaacctgtatttttcctgtacttttgtacagaaaatacaggtacaggccatttttggaatacaggtacaggtacaggtacaggccttaaaaacctgtatttcctgtattaatttttaatcactattttttggcgaaatgtctgaaaaattaggaaaaattcaaaaaaaatatcattttattcagtgaaacactctgggtcaagcccactgtgcagagaaaagcctagtacttgtcaatttggcgcatgctttaataaaaattataatgttcttatgagcacaaaatttttgatcaaaattccgatttgtaaaagctacagtttcaggtagccccgaaaatccttatctcaactctagttaaaatcgcaaaaatgtgtcttttttttgaaaaatctgttaacaaactgctttaaaaattgcaaattttatcccggcgacgcctgccggcaccaccagacccccgtcccctccccaactttcccaaaaattttttttgaaaaagcgcaccgttaaaaaagtaagaaaatcaaaaaagggtcatttaggtatattaaaaaatttttggaaaaaattcttggtagagggtaagataggcacaaaatgtaacctaattaagcttataatcatcttttagtattcgaaaaattaatttttagtattttttatagggtaaattttcaaaaaaatatttgtttttctttctcaagaaaaatttttcaaaaattctcaaaatatttaaaaaatgaaaatgtgtacgaaaaaaaagtttaatacattattattaagcaatatttattgtttaattaataataaatacttttaggtatttttacgttattttattaattaaaaaggttttttataaaaaaaaaataaaaaatacaggtacaggcctggctggatccaggcctcgagtggcctgtatttttcctgtacctgtattttcctgtatttttgtacagaaaatacaggtacaggctttttacaaaataccgatctctaattaacggtatttaacatgaaaagtacagtgggggcacaagaagagggcagcgaaggacggaggaggcggatgaagccgcgaagcgattgagccatcccccccccttccgccgatagcggcacggtgaaaaagcgaacgaacgcccccctcccccgtcaccttaaattgacacccctttttttaatttgagtaagaaatcgctctttgaagtttgcgtggtccgtcattttgtgcccttctttttatatgaatgctcatgtaattatacttcaattaagaataaaactttaatgcattgaaagggatcgattgagtgtcgccctttgagttgagccgccatttgacaaatcgccacagtttaggctgtgaacagcaaatgccgaattgcaaacgcttgtgaaaggccttggcaaaagctgttcatacaattagcgttcttataaagtgccttcatcaaagctgtgcaatgcgcatccttaaacattggtcttccggtcgaattgcttgaaatgtcaaattgctaattgtgacttttggacccgaattgatatgtaagaatgaaataatat

SEQ ID NO: 4463 - DNA, 1606 bp, Heterodera glycines
atttacaaatttttgacttgaaagaccggtcactcttcaaggaaaaaatttcaaaaattgttcaccgatgttgcggagcatttcaaatgaatcacccacctattttgatttatgcatacaatttattacagaatctctgaattttataaaaattcggcgtatatcactcggagctcattcgtgtcggaaaaacatttataaaaagcgcattttctgctatccattaagcactttgtggcatgttttagcctcaagaattttctgaccaatattaaacaatttacaaatttttgacttgaaagaccggtaactttcaaggaaaaaatttcaaaaattgttcagcggaggcatttcaaatgaatcacctattttgatttatgcatacaatttattacagaatctctgaattttataaaaattcggcgtatatcactggagctcattcgtgtcggaaaaacatttataaaaagcgcattttctgctatccattaagcactttgtggcatgttttagcctcaagaattttctgaccaatattaaacaatttacaaatttttgacttgaaagaccggtaactttcaaggaaaaaatttcaaaaattgttcagcggaagcatttcaaatgaatcacctattttgatttatgcatacaatttattacagaatctctgaattttataaaaattcgcgtatatcactggagctcattcgtgtcggaaaaacatttataaaaagcgcattttctgctatccattaagcactttgtggcatgttttagcctcaagaattttctgaccaatattaaacaatttacaaatttttgacttgaaagaccggtaactttcaaggaaaaaatttcaaaaattgttcactgatgttgcgattttttaaatttaaaatccatattcctaaattctccgcactgtccggaattctttctcactcagccggccggaacatcgtacaccggcccatcatcaggcggctcattcgcctgaacaaattttaattttgaaaaaaaaacaaacaaaaatcgcttcacctcgaccaggggggcgccggcggggtgcggtgccacaaatgggcggcggccgcccaacacgaccagcggcgtctcctgcgcgccctggcgacgcagcgatctgagcgttttcagctctaagaaaaaatatggttttttatgaaaacaaaaataaataaatacttactcttttgttgctgacgaacgagctgtcgccgcaacaagcggtttgccaccgcatggcgaaccttcaacccaaaaaggagaagctgtggggggggggggggtggtaaactttaatttgaatggaaaaaaaaaatacctgaagaagaaagagcacaaaaatcaacacagtgctggcaaagaccagagttgacagcatcgggcaatttgaagaagtcgctggacaaattgttgtcacatttggcactgttgctgcgcgcgttgttgtagtcggctgaacaccttcacgcagcagctgcgtgaaattgtcgatcgaacggtgcaagcaaatcacgggctttgtatagccccgtggtctcacgcacaacaaatcacttgggcaagagctgcagagataatacat

SEQ ID NO: 4464 - DNA, 1714 bp, Heterodera glycines
tgctatccattaagcactttgtggcatgtttagcctcaagaattttctgaccaacattaaacaatttacaaatttttgacttgaaagaccggtaactatcaaggaaaaaatttcaaaaattgtacagcggaggcatttcaaatctattttgatttatgcatacaatttattacagaatctctgaattttataaaaattcggcgtatatcactggagctcattcgtgtcggaaaaacatttataaaaagcgcattttctgctatccattaagcactttgtggcatgttttagcctcaagaattttctgaccaatattaaacaatttacaaatttttgacttgaaagaccggtaactttcaaggaaaaaatttcaaaaattgttcagcggaggcatttcaaatgaatcacctattttgatttatgcatacaatttattacagaatctctgaattttataaaaattcggcgtatatcactggagctcattcgtgtcggaaaaacatttataaaaagcgcattttctgctatccattaagcactttgtggcatgttttagcctcaagaattttctgaccaatattaaacaatttacaaatttttgacttgaaagaccggtaactttcaaggaaaaaatttcaaaaattgttcagcggaggcatttcaaatgaatcacctattttgatttatgcatacaatttattacagaatctctgaattttataaaaattcggcgtatatcactggagctcattcgtgtcggaaaaacatttataaaaagcgcattttctgctatccattaagcactttgtggcatgttttagcctcaagaattttctgaccaatattaaacaatttacaaatttttgacttgaaagaccggtaactttcaaggaaaaaatttcaaaaattgttcagcggaggcatttcaaatgaatcacctattttgatttatgcatacaatttattacagaatctctgaattttataaaaattcggcgtatatcactggagctcattcgtgtcggaaaaacatttataaaaagcgcattttctgctatccattaagcactttgtggcatgttttagcctcaagaattttctgaccaatattaaacaatttacaaatttttgacttgaaagaccggtaactttcaaggaaaaaatttcaaaaattgttcagcggagcggagcatttcaaatgaatcacccacctattttgatttatgcatacaatttattacagaatctctgaattttataaaaattcggcgtatatcactggagctcattcgtgtcggaaaaacatttataaaaagcgcattttctgctatccattaagcactttgtggcatgttttagcctcaagaattttctgaccaatattaaacaatttacaaatttttgacttgaaagaccggtaactttcaaggaaaaaatttcaaaaattgttcagcggaggcatttcaaatgaatcacccacctattttgatttatgcatacaatttattacagaatctctgaatttataaaattcggcgtatatcactggagctccatcgtgtcgggaaaacatttataaaagcgcattttctgctatccattaagcactttgtggcatgttttaccctcaagaattttctgaacatattaaacaattttacaaatttttgacttggaaagaccgggaaattttccaggaaaaaaatttcaaaaa

SEQ ID NO: 4465 - DNA, 4008 bp, Heterodera glycines
ttgacccattttgaactgttacaattgcagccagccgctcccctacgagtcggcgctgaacttgtggccattctatgcacctgctggttcgtgttcatacaacaaattgacgagttgcgatgccatcagggcatacgtgcttacttgtggaatttggtcagtgaagttactaagtaattaatgaagtcaatgaattaattaattttttatgatttccggaggactaatatttagaaaaaaaaaattcctgaattaatttagttacaaaaattttcttgaaaatatatataattcctaatttcaaataattttaagtcaactgtgcctgcaaaaattgtttacgtggtagcaaatttgtgccttctcatttgtgttccattgcgcttcaccggtctcattagggtaaataaagaaaataaccctcctttataagcaaaccaaattcggatgtttttcaattttaggggtacccaaccccttgaaatccccgctccctaaaagatcggagacaaaaattttcaagaaattttaagatagaagatgctctgttatcgttcgttttgcctggcagttgggcctatgttcttttttttgccaggtttttaaaaaaaataaataaatattttattttaataaaagtccaaaaagggagataaaagccgcttacacttaaattttagaacaacaaaattaattggaccatttgttcaaatgatttacacaatgattgctggagatttggtggaattttttttattattaatatttaaataatttctcagtttcggtttgtgcttatttctacaatttttatggtaccattcacggaaagttcgtataaaataaattttaaatttatatttaaaattttctttttcaattttagcaatgttttttcttggcaaagacatttcaaccaaacaatatctgaatgaatcagacgccgaattctgtccactgagttacagcacgtcgaattacgactcattttttagcacatttttaactttatttcgagtttgcatgaatgcaatttttgtaagaatttttatttatttattttatttatttatttaattttgggcacttttttagtacgaagaattggcatgtgcaaattatgaacagatgatgaaaacactggtatttaataatattaatttaaaaagataaaaaattttattttttagttcgtcctgttcacatttctcatggtactttatttaattaggataatttaccaggaataattaatttaatttaaaatgcttaaaaggttagattaataatttaatttaaaaaatgtttaacagtttatcatgatgatcactcttctgatagccatgataaacaacacttacagtgaactaatagaggaggcggaactgacctggcgtcaacaggcaaattttaagacatatattttaaatccaaaaaattaaatattatttgttttaattaagtttttaaaattgatttctattaaagcagaaaaaaataaagttttttttttaaattaatgacttagatagagaagaagctttcctgagatgaagattagtggatcaattgtcgttccctaattgatccactaatcttcctctcggggaagcttcttgttctttatctcattactaataattaaggttctctcattcatttagtttgagtaaattgaaaattgagcaataaaatagtttttaataataataaaaaataattttattaaatttccagcaaggccagattgtgatggtgctggagcgtgccataaacgcggaaaaattggcggcatgccagctggaatattcagtgcagatgaatgtgccgggcagagaagcgcgcggactgatggtgatcaagcagaccaccaagacgagggcacaccagcgtaaacaggcactcagcaactggaaggtggggtttaaacacgaaaaaaacacctaaaaatatatctgaatttgttcatcaattaaacacgaaaaaaatatcaaaaaatatatctgaatttggtcgtcgatatttaggtatcaaggattttaaaatatttttatccttaaaaattggtaaatttacacgatattttaaaaaattttcattcaccgaaaatttatcgggattatatccattttcggtaaattggtgaatgaaattctcgttttttgccttttccatcaccggataattacatttgcccgagcactaattttttaaacagaaattcgtcaaactgaaaaatatcccaagaaaatatttttgattttctgaaataattttcagttggttggccgtaaagtgatcacgatggccaaggagttgggcacccagtcagccttgtacttgttgcacagccatgatcggctggtcgcgaacgataccgtaggcggtggcgggaccagcgtaccaagaacgccctacagtagcacgcgaccgtactcggtgtttggcgggagcacggcaacattggtaaaccatcatcgactcatgacaagcattggcaaacggagggcggaagaagaagtggaagaaagggatgcaaaacaacgacggcaacaacaacaacatgaacaacagcacaaagaccaactggaacaaactcagtccgatggtgatgaatcaagtgttattgaacatgtactgcaaacaccatcacctagaaaggttggtaatattaagtaacgataaatttatatatattttttattattttgaaatccattgaatcggctttgatcgaatccatctgggaagttttcaatccatcatcatgatatttttttaaagaataaaataaggattttaatatcgaaaaaacaaaaaccctaaatatgaaagcctaaaaattcttaactaaaaatagaaaattttttaatttgtaaatttttatacactaaacttaggaacttttcttaacaaatcttaaaattagattgtttgcaattctttgaaaattttttggaatatttttttacagttaaattttttcatatattttctttcgcctttgaatttccaaatttaaaattcattaaataaaaaaaagaaaatttttttgaggaagggcgattgcggcttataaaacattcgcattgaaaataaatattataaaataaattaaattattttttctagcgccgcccatcagtgccaaattttcagcaaccaaggctgagcataccaaccatggaccgtcaccagcaccaacaacaacatttgatgatgttcgcggaccagtccaaactgcgcgacgttgtcacacatgcgacggtgaacaacatgaagttgaggcgtgcagagctcgaagaggcacaacaacgccacaaaaaacctgtatcggcgcaatttttaaaatttcttaatcagtttttgatccccttaacagatattgcacgccgaggttggacaccagcgtaaattgcccgctttaagcgatttgcctgggatggtggtgaatgtggcacggaaacgtatgctaacaaccggttccggcactttgcaaattggaagaaggccgtcaactgccggcggagagccgttgagaatggcacatttaagcgttccgcaggaaagaccaatgatgaaactgcaccaaaatgcattaaggtatagaaataccggagcaggtcgttcctccatatgaaaatttcgagaaaaaaacaaaagtttttcaagcttttccaaaattttgtgatttctgtttttccaaaaaatcgctagaaaaattctcgaactttaaaaaaaagtttttacatgcctacctatatttggcttgagtgctttggattttcaaagtccgatcgttaatgaaataaatttgcacatatttttagcacagagccggcattggatcaaatgattgtacgaggcgttgatctgttaccaagtgtaatgccgaatatgccggccacaccgctgaggagctacgacgaccgacggcactctggggtcggtggcatgcaccaaaaattacacagtgttgtcgccatggaaccgccagcagctgctgat

SEQ ID NO: 4466 - DNA, 2941 bp, Heterodera glycines
  unsure (1)..(2941): unsure at all n locations
agcaacaacaacaacaatgccgagcagtacccaacagattcttgacgacgtggaatttaaagaacaaaacaaaaaatctgttgatcagataaatcaaaatgctccagatttattgaattcgacaaatgatacaactggcggcagaaaaagggctcgtcggcgagttcgtcccgacctattcagagccaaaaatagtccaccgacaaatagctcaaattctgacagaaaatgaaaaaaactgcgtaaatgaaaattctcttgctgaccagtgaaaaacatttttttttgtggaaatatttatttattttatttaaatatttgtttgaatattacatattatacatatagataaaaatgattttaaacttatattataaaatatttaatcttgaaaagttgcaaacgaaattgataccaattttaagaaaatgaaattaataaaacagttgtttcgagaaatttttttagaaaatttttttatttttttctttgcacttttaccgaaaaaataaaaccgaccgaacccccttgtccggtctctagtaatggaactctgataacgatggatgtctgattttttccttaccagacaaagttacatagcaaaattttgccgttttgggaacgaatttacaaaaaagtaaatttaaaaaaacttgatgattttgaaaaccatttttttaatatttatttttttcataaaaacaaaacaattaataaaacaggcataaacttgtatagaattttccattaaaaatcattttataaaattcaatttaaaaatgcttactaaatgatatgtattaaaaatggttaattaaacacaaaatctcaatatatccgcataatatcttcaattggttttcgttgaatatccggcacataacattcttcagctgagtagcccaatggcagtaaaagagaaacctaaaaacaaataaaaaaaatttttaataaaattgcgaccttctcattgatgggtctttgcaaaatttcgcgaatcgctgcgcccgcattaagaggtgttgtgacgacagtgacgagaccggcattctgaaagaatatcaattaaataaaattaattgaattaattaattaaatgtcatttaataatggcaaaatgcaaataatccaattaagcattgcacctgaattgcagcgagcagtattccaactgcaattgatgtgctttgctcactgtaatatgttggtttccgatcacccatatgatcaagttgataggcctttattcgaaattttaaattttatttaaattattataaatcaattgggatggaatatcctttttttgtttaatttttcatttatttccgtctcacatgcttcatcaccaccagcaggaatggtgcttcggtcaagtatggcttgttccaattcacgttaagcggtgccacgtccaacacccattgggcacccattcgtctgctgtagttcatttgttcctgttcttccacaacctcacgaattgcacgtttgattcgcgcattcctaaccaaacaaaaggtccacggctgcagattggcaccgcttggcgaagtgcctgcaaaaatgatgggtcattgaatgttaaaaaaccaaaatttatggacaaaatagaaaacatggagcataacgatgaccagagtctgggtgctattggtatgtggaactttggtgtcattacaactcgtacaatggattaggctaggcctaagcttcaggctaggtcaggcataggcgcttgcttgggcctatgaataagctttattttggcataaaaccaaaggagtcatggcgaaatgtcacttagtcccagtaaaattttaaaaaatatattgccattttggcgagacactttttaaacacctgccgttttgatgatgttttgcaaaattttcaacggaatttctttggtgctgaagcaacggacgctgcgccgcgttttcatgagctcgtaaaataattgtgaccgtttgagcatttcctcctccccaatttcgttgggatggtaaagcacttcagcacattggacatggacaaaattgtcattttcctcctcaacagcggtgtccttatcagaaccaacctcaaataaaagtttaaaaaataattaaaaataatttttttttctattattggctaacggaaatttttaaaaatttaattttctaccaagtccgagactttttgattttattcctctaaattaaaatgatttaattgcagtatttcgggagggctcttgggagggcggggggatttttgaaatattgtaattaatttttaaaataaaatatgtacatttttatcggcatattgtcggtgtcgaatggcatcagtactgccccttgctacggctctcgatgcgccgccatcttgttgctctcgagactcgcgacgagagttttgccatgcaccaaacaaatgtcgggcaagtgccattgccagcttgaccatccactgcaggggggaaaagtgccaaaattggttgctccagcaaatattatttttaaaaatttatatgttttctacctcctttaatgccacacggaattgaatgaccacaacagtggccacaatggcaaccgccatttggccaggttctaccggaccagcagatgggtacgaatagggtggtggttgaggcgaaggcccatactgaggggggtaagaaggtcgttgctgttgacacataaatttgaaaaaaatcctatataaaaataatggaaaaattaatttttataccaaattcgataatttttcccgagttcagtgaatatatttaaatttttatttaatcaaatggattatttctttgtttttttttgtaataactatgaaaaatttatataaaagtaataaaaaatatataccaatttctttatgcgattgacagcaagcaattcagtaaattaggtataatcaaaagagaccnntgcag

SEQ ID NO: 4467 - DNA, 4067 bp, Heterodera glycines
aaaagaaaggaagaagaaactcaccaacggaacgttgcctccccgaggattttgctctacggcattgtactgatccgcaaatgccgcctccattatttgtcgctgcggtcacatccgttccggtgccgccgccttcacgctccgcttcgtccgtcagatcctccgagctggccacgggcgcaagcggtggcaattcttgcaacagccgtgccttctcccggtctaggaagtccagctgctcctcaaacaattgccgtgccgtctccatgttctgctgctgttgttccatgtgggcatttgtggtggtggtggtgttgtcgcctgttgcggatgtgttcagcagcaatccggcaccagttgcgcttggagtgccagcgcgagtttgatcatcgacagcaatgcattccgttgaaacggcggcactggcggacaagcgatgcttctataatatacaataccgtatttcctaaaatatagactcgcttaaatagaacccctcactgaaataaagccctttggaggagggggagggggtagaaaaatagagccctcgatggatttattttaggaaatacggatttagaaatcgcattagcgggtgcaggagggctctcgcaattaaacgagcgaaaatgtgttggaatgttggaatattgcaacaacaaaaatatgccaagataagcctgattaaattttttttattaatatattcaaacatacttcgatcagtctcagattctctgtcacctaaatattgtataaataaaataatggcatatttttatgattaaaattatagaaatttggtaaattcctactttttcactggctgattccagttcaataatttgggaaagtgtttcttggcaatgacgaagtttgtcttcgatcagtgtttgcacgcaaatctgaaaattgaataatgtcaaaattaaaattggaccccaaaaagctccgaaaacattgactcaccgcctgcttttgcacatccattagttgttcttgggcatgtattgttgatgtgttacggcggacaatgcacggctgaaaattatatttaatttttttaaactaattaattacaatagttattaattaaaaaattatgcaattattttaaaaagtgccattattaccgcaaaaataactgctaaatttgatgccgacattttattgacagattcctgatgagcgacacgggctaaaaaacaagtggaattgtaccaaaaaaaggtgcatcgtaattcccctttttattaagcatggctaccgtaaacccccattgtgttaccgcacccaaatggtagacgagtctgtcaagcacacatttgttgcccttcggcaacatttcgaccattgcgcgtaggcaccgtatacggtcattggtctcttttatttctacagttgttggaggggaacggtaattaaggagcggaaattgagtacggtaattgcctgaaatgttcacaaaattttcatagagatcagcagtgatcagcggctcagacagttcccggaaaaatgactttaccaagctggtcaacacatgaattggcacatcgtcaaatgaaatggagtcgggatcttaggaaaaatgagaattttatatatttttttataaaatctcaaaaatccctaagtgctaaccacccgcttttccaaattaaattatttaaaacttttccaaaaaaattttttttaaggaaaaacaactttttttaaaggccctctcctctaattttcaaagttttaatatttgatgaaattttttcatgctgagaaaatttttgaaattaattcccgacattttttgagggtattaattgcgaaaaaaaaaattatttttacaattggaaatatcattacaaatacttatgttgcactcactaccttcagcgagttcaatttgccgtcttgtctgtttgatcagtgccaattggccactctttcgataaatgccttcggtgaacaacgctttcacttcaatggttgccaacagacggttgagcaaaacgggcactgtttgggcatcatcaagcaaaagattggaaaggtcggcaccgaagaatttggaggaattctaaaaaaatttctttataattatcaagtgcataatttagttgacataaattcaatcaatctggaactcaaggtatgtcgtattttgggttcccaaataaaaaaaattctgtttttttttatgcttaatgaatttatttcaaataaaaattatttatataattttgagtttttcttactggcatttcgccaacagcagttgttgccctggaacacacataattcactttggtatggcactttttatggcaagacaatcggcatgagacacaaataaaaatcttaatttttaaaaattgatttatataaattgttaagacgagacatgactaaccctttcagcatgccacataaacttaaaatttggaattattttaaaattttaattaatccataaattacagtataccaaccatattgcaaatttcgcaatatgtcggaatatgaacatattccaaattgaaatgatgaccattgtgaagcttaaaataaggtgcaaacattttttttaaaagaattcaatttttggcacatactgtaatatcggaccggcggcgcttctttttaacagtctgaaaattttatttaaaataaatgataattaattaattaattttttttttggcctttttaagcttttaataccattctacaatagttccaatataatttttttttagttttcgtatttctttttttaataaataaataattttttcccacctttttttggctgttttatcgcttatattttagaagaattcagcatattaaataattttaaaaagctattctattttatcctcacttttaaaggcaaaaaatcgaaaaataaatacaatgttaaacaaatctttttattattaacaaattttttacaaaaccaaaatttcaaaaatttaatacgtcttttacacacattttttgccctacctttattagcactgctgctgctgtcctccttgaactgctgcgtcgcttccgttgctgcatgaactcgttaaggaaaccgcgaaatgcattcacacccaacacttacagcgaaaaatttttttttaaatttattaaaaaaatattatattttaaatatttaaaaaatatattaaataattttttgacaaatttacctgtcggaaatgtcacttgctcctcatggcacattttggacagtaagccctcaaaagtgttgatcatgtcatggtatttcagcacagtgttgccctcctcaaatgaacagcccatttaaatataatttaaaattttaaatttatttaaatatttttgtcaaaatttaccggatacaccaaagttgtgtacgcgcacagttccatgtgaaactcgcgcatactccgcttgaaaatggcatccactaatgtttcacgcttgttttgttggccaatgtgggtttgcttcttgaagatgaacacactgaattccctgaaaacaaataaacaatttaattaaaataatttttttttcatcgaattttttaacgcctgatgataatggattaaattaaataatatttatgctttaatctttctccgctactaatgattattaaacaaataaaaattggcaattacaagcataattgatgaaaacaaattttgacaactgtacctcagatcgtcaatagtttcaattaacagtgaggttgggtcagtctaaaaaaaatatttctataaataataaaatgttttttaaaggaccatttgcttggtttttgtaagattgaagctggtgaacggggaaaaggtgactcggtttggtgagacaccggccagcgaattccttggcgttttgccaacccttgaaaaaaaatttttttttcaaaaatattcaagatcgaaatcattggcacattatatcccatgggcgtctgaatgccagctcgcgttgttgcggtggaggtgacgtcattggggatgtgcatggaattttggcagcgaaatgtggcacattctttgtggaagatcaatttgcaa

SEQ ID NO: 4468 - DNA, 1907 bp, Heterodera glycines
  unsure (1)..(1907): unsure at all n locations
ttgagagagtttattacctcggccctaaagaattatgcggagtcgctcgaatcgattataaaagatggtggatctcatgcaccaataagaagaaagagaagcgcaattgagccaacatcacctcctaatgcacgtattgtgccaaagtcgcgtccgaatgtcactaaaaaagtcatagtaccaacatctcccccacgtgtgggacaagaacatgaagaaaatgcagaagaaatctctaattcattaaccaatgtgaccaagccaccggaaaaacaacaaaaaattgaaaaacaacccgaagtcgtaaagccacaaaatgaaaaacaacctgaagtcgtaaacccaaaaaatgaacaaataaatcaaacacaaaatatttcgcaccaaaatgcacctagtccaaaacctccaccacctgcttcaattccgactacgaaaaaacacgaagaattaaaaagcaccattgatccaactccttcagtttcaaaacctccacctccattgtcagtttctaatccggttgaccagaatagaaacgtgtcggtcaatcaaagtgtttcaaaaaaaaaaaatattcctcctccatcagtttcaagttcatcaataaatgtgcctaaaaagcaggaagaattaaaaaacagcaacggaccaacagtttcaaagcctccgcctccatttccagtaactagccaaactacagtttcaccagttcagcaaataacttctgctcaaagaaatgatactaaaccatcatcatcatcattgattaatgaggagaaactgaaggaaattggcccgccaccaaaacaaagaactgaaaaaagtatagtcgagacggtctcaccgacacctccaccagctgtacccacgcactccaatgctacagcgaaaaaggccacttctcctcctcgagttattgccaccgacattattggaccaccaccaaaacagagaactgaaaaaagcttaaataccaaacatgtgcaagcacagcttgttaacgaaataatcccagagactactaaaaagacaacaataacaacaacaactaccaccacaattaccgaaccaccaaaagacacaattgatgattttattgggcaaattgaaaaaccaacgaaaagaaacaatgcagagcagttgcttgctgtcttgtttggaaacgatgaatggaaaaaagttaacttgagaattcttaggcaaatcattgaaggagttgagttacagtatcatcccaattttgaacgatttaaagcggtttttacacatccgagaattgaatatatctcattttcgcctcagctcggctatgtgttgggttttgaaaattctcaatatgtaagaaataatgaaatagccaaatacggaagtgatctccgtggtggattcgcaagctttgccgtttacgcaaaaggtctaaccgagaatatgattgttggaaattcattgagctcactccttcgtgttgtctctgtgtcgggggcggtaccaggcgaatatacggaaaaaatttacgactcaccgctctatggcacgtgttctaccaaaagaagtatcagaaattgaaattgagttacggacgatgacagacggacgactgggtaccattttcctatggtacagtggtgggtcgtactagatatttaagaaggtgataaatttttgaaatcactcattattgtttttattatcacactcaattgataaaatggtacatactctttatgacacttcggtttcgggctatgatggcattttttgggcaaaatggttggggagtcggggatgactcctcctaccaagtttttcgaggagcgccaccgtttcagcngcgggtggggcccagcacagacgggtggggggataggtgatatttttcgtggactttggcgctttttcctggcact

SEQ ID NO: 4469 - DNA, 1876 bp, Heterodera glycines
atgaaaaacccggtttaaaaggaacgatagaaacgttggcaactgagagtaaacgtggagcggataatgttttagagaagggcggatttcggcgtcaattgggcacaggagggcgaagaaatcgtataaaagctaacaattcctccattctatcacatcaaacgctaattggaaaaacaataacaaaaccgttaattcaaagcaaaaagaggcttcgatcagacgcgtttgggctttattaaaaaatgacatttcacaaaattgacgcgagtagcatcgattcgattaccaatgccgttgattttttcagtatacctccgacaaatgttaccgtatcatcgtcaaaggttttcgagattttgccgagtaatccactcaccgacactccttatcattttaaaatacactcgagccaaaactacattgacctgtcaaagtgttaccttttgaccgaatttcgaatgcgaaaattgacaccaccaaatggtgaatggggacatttggatgctactgatcaggttgtaccgatacaattgatcgggcacaccttcatgcgagacctgaaaattgcaataaacggtcgtgaattttcaattctaattcactgatggcatacaaaacttatctttctcatgaactttcgcaatcacttgaagctaaagtttcgcatttaactgctgctggatacgaccgtgaagatgctagcaatctacaaaacgcaaattccgaagggttcaaaagtagaagacaacggtatttgggaggtcgaacagcacaatacattgcaaaaatcgatgccgatcttttcaatgtaccccaatatttgattaatcattgtgaaattgacataacgatacaaccccatgatgacaattttttgttaattgacaccttagacccccctggtcagccatatagccttgagcttgttggattgaaactctactgcaaaaaagtcagtcttatggatggtttggctcttgagttggcgaaaaaattggaaatgaaaccagcacggtatgctgtacgaaagacgatgatgaaagcactgttcataagcccgggacgctatgaatttaatgcaaacttgttcatggaccaagttccacgtcgcgtaacaatgggacttgtcgcaaattcagattatgtggggaacatcaaaaggagtccattcaactttcagcactttaatgtacgggagttaagtgttgtggccaatggtcgctcctatccccaggccccgtatgacattgactatgaaaattggaaatttgttcgaccctacaatgacacgcaggaggcgcttggttttgccaactctacatatggaaatggaattgattacttttcgtttttgcacactcactgtatttatgtgtttaatatgacaaacagcggagacgatcatggcggtttatttgatctaatcaaaaaaggctgtacagcagtgaacattaaattcaaaaaaccagtacccgatggtggaataacgcttattgtgatgggtgaagcggactctatttactttttggataaaaaccgaacaattgcaaccgatacaaccatttgataaaaatgtaccaaattttacttgcttccttattgtttcaaccaattgtttcattgatagttgaagaaggaataaaagcagaggaaattcctgcatatagtaagtggaaaatagttttgggatttaaaaattcgtcagaatttcgaaacacaacaactacaaaaggaaccgttacgtctgcgttatttaaaaatgtatcaacaactcgaaaaacaacacaaaagactactataaaaacaaaagtgacaactaaaagtgcacagacaatccaagcattaaaacagcatcaaccccagaaagcatcaa

SEQ ID NO: 4470 - DNA, 3391 bp, Heterodera glycines
  unsure (1)..(3391): unsure at all n locations
atcaaccccaagaaagcatcaattttcctttcatccctctttgtaaagaattaccaaaagaggcaaatgtgtattcacatattttttgttgggcaatgattatccttttcggattgtccgtgatcagtctaattatctaccaatttcgctcaattctttggctaaaattcactttgacggaacggtacagtaagaccaatggacagcaaccaaatcaccagaattttaacgtcgtccgaaataacgagccgcaagttccttggatgcttcccatgcgatcaactacctgagccgatggccatacgatttccggcatcattgattgttaatttggaccctcatcagtttcccggctctcattgggttgcaatatttgttaatggattaaataagaaggtcgattactttgatagtctatcgttacccattaatgaattggtagttaaatcctttcttaatgtctttcctggaatttattgtaaccagaagccctatcaatcagtttcatcaaattcatgtggacatttttgtatttgttttgtttattttttatccattggactaacttttacccaatttttagacaaattaaattcttttcataatccagaaatgtttgttcaaaattttattcgcaattttccgataaaataaaaataatatatatttttatttgccttggatctttttggctcactccgtagaagggatttagtggagggaagggaaagcaaacactatatgccgttcagtgccagtcaccaatgactgcggagggaaccgctttctttcatttaaatatgctcagagagtggtatatgccaaaaggtcaacagggcgagtgagctttgccttcacaaaattggcgaatgctgattggttgaaggagaggtcaggaaccaatgaatgccgatgggagtcattccattcctccccgaataaatggttttctgaatgtgtaaatagagcgagtgagctttgccttcacaaaattggcgaatgctgattggtcgaatggctcttttcgtattctctcttctatgatgctcattggcggaatttttgtgcaaagacgactgaattaaccaaataaacgattttttgttgaatatattataaaataatacaaatattttatataaaataaagaaattacaaacgaaaattcatcgaagagttgcttcgggaaccatacaacgagctttcgcccccacaaaagtcggcaaaagattacgtcaaaaaactcgactcggaaattgaacacgttccaaaatttcaatgggttaaaaacaagtctcgcttcgccattgaagacgtcccttccgacccagagggcttattgattggcatttttcaacactgtatggatgaatcgattagtgacagccggtcaagaggagttgagccgacacacctcggctgcattgtttccagtgcactccttacttcggatatatggattccaattcggcaaatgacttcagacacaataaacaccattctcaaccgctttaacgacgtggctcaaagcaaaaaacaggatggtgtgacgctttggggcgacccatttaccgtaaccatgacaacagtcaaccgaaacggactaccagccaaacgacaactgaaaggaggcgcagcgcggaagttaacacatgtccaccacagagttcacgaacagtgtctaattaaggtttttaattaataaatatttttaacttatataaatttagatcgaaaattttgatggagacaactattgtctattttatgctttgcaagcaacaatgattcgttctgttgctggattgacacgccaaagattttatgactacatgaatgggaaccgtggattccatggaaggctgaaaagtgaagcagtggacatgatgaatgtcgtcaaagcaccgccaaaacagccaagttatgatgctgaaagatatgtcccgcgggttattgattggtggaacaacgttaaatttgctggcgtttggaaattcaaggcattcatctttggagcaacgggccattacaagcctctgttcaaatacggcccggaggattatgttgtgccaattatcctttattttgaagatgggcatttcaacggggtgcagaaaagcggaaaccttttcggaaggccttattgcttgagctgcgaaaaaacatatgaccgaccaaaacagcatactttaagctgcaagtctcgctgcattaaatggttaaaatattttaaataaaaaattttcaaattaatttagttctcaaatgggaccaaatttcccttgcaagccagccccgggctttcgacaaaaatgcaatggatgcaataaaacgtttttcaacgacgaatgcctgcagcatcatctttcttccaatttttgtcaaatgagcaaagagtgtaaatattgcggggtcgtttgggacatgcacaacaacaagagaaatgggcgagaggtttttttttaatttgttttaatctgttcaaatcaataaattgtataagggtcataagtgtggtgaacgatggtgtgaaaattgccaaatttttcatgaatttgagcgaggttgttttattcggcctttggagccaaacaaaaagaaggaagcagtggggtggcggcttgttacgttcgatgtggagactacgcagcaccaagccgtcgaccctgattttccagaacgacgaaaacaccaagtcaactttgtcacagcaaacgtcgcttgtccgagctgtatttcgtcgggaatgtggaaagaaagcatgcgtggcaaattctgcaatatttgcggctttcatcggacaataacattcagccaaaagccattctgtgagacaacagtcgaccgacagacaatcgatcgtcaccctctcgtcgcattcgtcaaatggattctctataaactgccaaagaaatacgacacagttgtctactcacatttcggtggacgctttgacatggtcttggtctttcgtgagctcttcatggaaggactaaacccgtcaatgatcaaaaaggggaatcgcttatttgaaatgaaggcaaacattgattggttcactatttgttaaatataaaatttaggtgaagagcagaaaaaatctaaacccaaatgtgatatttcgcgactcatggaatctgattccgggtccactggcatcaatggtcccaatgttcggcttggacgtggacgacaagccttttttccctcatttggccaaccgctctgaaaattacggatgccatatcttccccacaaaggccgatttatttggcgacgnaatgaatccggtcaaacgaaaagattcgacaaatggttcgaggaaaacgaaacaagtcgtttttcctcgacgaagcattggcccaggtataatgaatttttaaaataaaaa

SEQ ID NO: 4471 - DNA, 7595 bp, Heterodera glycines
ctgcaaagatgatgacgtcaccactgcgaggggtacggtagtccagggaaaatcgcaataaataagtcgctggacggttcaaaggtttgttcttttgtattcgttttattctaaataaatataaaatccattttagcataccgtttcttgggccgttttatgctggactacatttggaattcgagctacccagaagacgtgttgaagagcctgttcctgttgtgtcttacgtacgcaatgaagggagcagaagccatgaacatcgtggccaaccacttcatcttccttctgacggcacgccaccttgactacgagattgccgtgcacttcaaaaacatcaagaagatcgacggaacaatggctgagacaattctgacgcgctttgagattgtcgaccagagcaacaaggcgaaggaaaggccctcaatctgcgaagaatcgttcgtcatcgacatcacggcgatcgagagcggaaagcagaggaagaagctggctggcaaagggaggagacccgacttcaacatcccgtacagcatctgcgatgggacaactttcgagctgacaaacaatgacaacttttgtctcttccgggcgtttgagtttctacgtgtgaaacatgagctacgggatcgacatcagcgatttactgaatacaaacgaaacagtcagtggcagctgaatgatattacgactttgtgccaaacctgtgaaattaatatgagactgctaatcaatacggagttgtccttcggctcgtcggggccaggccgtacctgtacgcccgtttccaccgtcttattcagcagttgcgcaccgttgcttagctgtaccttgaggggcctgtccttgacctcctttctcagcttcaaatatctcctcagctgctggttgtacagtacatttcgttcgctgacattcgctgtccgtttcctcttcacggtctccagctgtcgtttgacgaatcccaaatttgtctgctctgccacatcgtcgtctcctttcgcaacgccgacaccctctctcgctgcaactaatcctcggtaatgctcaaaaggcaggagaatgagcttattggccatctttgtgcagcagataacgagccgcctctaacagtatgggtgccaacaaaggggcaaacagtgaacctccctcctgctgtggttgttgttgttgtaagatcagctttctcgcactctgctcacttctcacgcgtgccaaccgtcgaatggtgttagcaaaaggcaacaatttttgtttctgtttccgcgtcaaacagaaggatccgttaagtaggtttaagcaaatctccaccagggtcaacagctcttcacaacctgcactgctcaacaaatgacgcctcttcttgtgagatgtcgtcctcccaagggacttcagatactcgtagttgtccaacacccgctgtccaaccatttgcttcttaaccatttttgggtacaaagacaatcttttcttcgtcgtctgggaaaatgtttgtcctcagtcgtaagaggttgtctgtgtttgcgtgtagggtcaccaacagatacccgtacggatcggcacacgcctgcttatacgcgtccatcagaaacccttgctcgcgaggaaacatttggctggccaaattacgaatgctcaacatatcgctgggcgcacgcatcagaaagatgtattgcgcattggaccttggcactctcatcgccttgtcgaacaggttttgggtgaggaatatcaccgaaaagttgttgtggtgtgacttcttggtgtacagatcagccaacttcttcgcgtcaatgtcgcccatgaggtcatcgtagacaataaggaagggttttggcaactttttcagcatttcttcggagggaggaccagcgtgcgggactacgccctgcctctcgagctcggggatctgcgaggagtactcaccgtaagcccaaactaaacccaaggggactgctcattactcatggcattggggacttacctatcactttcgacgggggatcaaacatctcgcgggcatgccccaacaggcgaaggaccaactgcgtcttacccgaagaggagggcccgctgacaacaatcccggagggaatgggaaatttgagttcacgctcatttattctcggggagtccattacgaatgataacaaaatggcttatcaacagactgagttatcactttgggtcaacattatcatcatcatcattgttctcagccattggtggaacttctgccagcagttcattcgcttccgctgcgacttgtgcagcttggtaaacttccgggtgtctcagtggcagggtgaacattttgttacgtgaccggacgcgaaacttggcattgtcgccaaagtccacttaagctgctgattactttttcgcagtagtccaaacccttaccgatctcatcaaatggcagaaagttctctccgtcatccttgagccgggaagagaagatggtcactccctctggctgaatgatgtagtccagctccacgttcccactcttgcagcgtgtacaccgacccggctgatcccatggcacaaaccgaggggtcttcagatggcgagggctgtacaccgtgacacccatcgtgttcacgttgaactcaatctcggggaactcctgcgacggtctcgaacgcttcatctctgtgcgggtcaatagacgggggttggctgccaaacacttcggaagccgaggtagtccaagtagttggtgtctgttggcttttcgcctgttatctctgcactgtcctctatggccaacaactctgaaaccgtgcgagattatgggctttcatcgcagcctaaagcttacccaacggatagtacttgcaatgacctttgctgtggtactcaacgatgcacttcagctgagggtacaacaggcggatccggtgctttatgtagaagtactggtgaactttgacctctgaactttccaaagtgagggaatgcttgcagaaaagacacttgccaaggaatccctcgaaggcgtacgtctccgaagcagactttttcgagaagttgccaaactcgacctcctttgtagtgccgcccttgttcgagtaggttgtcttgagcttctttcctcgcaggtatgcactcgccttgttcacagcttccgggttattcaggtactctgccaaattctcagctttacagttcagcagcttggataaggctgttgtcagtgggggcatctaaatgactgacagggaagtgaatgataaggggcgtggcataggagggcatactgtggatggatttcgaaatcctcccgtctggaggtccctgcgtgctctcacttgagtgggcgtggcctattcccacgtgacacccccctctccatcacgtcacatacagtacccccacacttttcccttctcattttcatcttaacacacaaaaatattcctcgaaatggctcctcgtaagcagaatgagcagtttttggacgaaatccagagtaaattttaaaataaaacacaaaatataagcattttatagaagcgaaccacgtggaagaagcacaaaacaatcaaagaaaacataaaatgggtaaaatttttcacaaattttacaaaaattttggatttttttctcatttttccatgtttcagatagtgatgacgacgtcaagttggttgactctcagtcatctcacgcagaggaacgccctgtgctcaagaagaggggccgaaagtctcgctgggaaaaactgctggaggacgtgaacaacgcaaagaaagccaaccccgcagaggttgaagtcgcagatgtcgacgaacgcaaagcagccaacgtcttcgactacccaacaattttctggaagctcgcacgtccaaaggtaatgtttgctctggtggcagccctacaatgttcttcttccgttgcagtatggggtgttcacctttatgtgcaacgaatgccgtaacgaaaacttcaagcgaggcgacaagcgcttcatcctcaacactggcagtggccaagagaagctggagttcacccaaacattctgccaagactgtgccaagttgaactttgactgcaccgacctgatcatgaaacaccaaaagaaagatgacggaccatctgcacagaagaacggaggacggaacacctattttaagatggaaaagtgatctctgatcattcattcattgatttttcgttgaaatgagcaactctttctttgtaattttgcccagcaatacgccgggatttgtcggcaataaaacgaataaattcaaagtacacttgccaaaaaaattagtgtttgatgggccgggttggatggtgggcatgtctggcataatatatcccaacaggtgtgtgggtttgcacagttctcattgcccttgtacagtttagctgggcgactgtagggaccctggagaggcaatacgtagtggtgcacctgcgcgatgggcgcaagttccggttcagagtgccaaggggcagcttcctttcgcctcagcagctcgaacgtggaatgcaccatggcatgatagcggaaatggaacgacacctgacccgaaaaaggtcaatacagtacccggatgagggggagattgttgacatggaagtcgttgaggaggaagagcctgaagaagcaccattaaatccgttgaaaaatcgcacaaaactcgcccaacttagcttgaagcatgagcgagacaaaaaagagagagaggaggaggataaaaggcgacagcagcgagaagagcagcagcagagaaagcagcaggaagagcagagaaagcagcgagaagagcagcagcagagaaagcagcaggaagagcagagaaagcagagagaagagcagagaaagcaacgagaagagcagcagagaaagcagagagaagagcagcagagaaagcaacgagaagaacagcagcaaaaacagcgagaaaaggagcaagagaaggcaaagaaatctgaggctgaccgcgtagccaaagagaagaagtcagaaaaggagcggttggcaaaggaggaagaagaacgactcgccaaggagaaggcggaggaggaacgcttggccaatgtgaaaaaggaggaggaacgcttggctagagagaagaaggaaaaagaagacgtacaactcgccatggaggcagaggagggccgtttggccaaattgaagcaacgagagttggagctgctaaaagagctgaagccgtggcgtggtggctacatgcgactggtccacggcaaggacccgacccccgacgttcattatctgcacgagaaggatgattatcactttgtgaatgctgtgcacaagtacattgtgcgacatccggaacttccatgggactcgccggagtttaacccatcagcaaacattcaacaaaacatcgcagaattccggaaaatctttgagcgcgaagttttcgacgaaaattatgagctaaagacaagagaggagaagaatgagctgatagagctggtcaagggatttcgattctatttcgcggacgagcttggacgttttacgctaaggattttcagcgacaaaatatcacacatcactttgacggatcagctggcctacgtgttgggctacgaacagcagcaagaaattcataacgaagaccaagccaagtacgctgttgacttggccggtggtgtcagtcacctgtgcatctacttaaacagcggaataatcgagagcatgatttttggcaactccttcgccaatctcctccaagtgattgcggtcgagggtacgtcgggcagtgtggtcgagaaggactttcagtcaccgttgttccacaaaattgtggctagagaggtggacgtactggacgttgagattcgtacgctcacaggacggtagtgttgtgattttcaaaatattttccctactttttttttggtttaagagaggtgccttttgaatttggccaagttgtgctgactcttcagtttaaaaaagtcgtaactttctgatacaatggtccgagttatattcaacgggtcgaacttgcggttggagaattatcatcagcagggtggcagagggaagagaaggcatgaaaaccttgctggacaaggcgtccgcatcgctacagaagggcatagggagaagaaggaggaagagagggacgaaagccgagatcattttaaaaccctcagacattgttggacaaactgttccccagagagctctgttgaaaaagaaaagatttgattcccttggttattattaatcggcatgttgtataaaaaagttgatgctgcgagtgcagaggtggtcaatagcggattggacttcttcagtacaccgccaacaaactgtgcggtgtccaactccagctatcgggagtacttgacgctgaacccgatcagctcaaggcctttccattttaaggcaattgtttggcaatgtataactcttatcagtgtttgttcagattcatccgatcaccagctacatagacctcagcaaagtgtttgtgtgcacggaattcaagctcaagaaaatcgcagaagacggagtggtagttgacgtaccagccaacgcggctgttggccttatacaaatgcccggtgcaactttcatccgcaatctgaaggtgcacatcaaccagcgtgaggtgtacgactccaaccagctgtacagctacaaggtgtacctggacaccgagctcagttaccctgcggcaggcaaaggatgcctactttggcgtggcgggctattttcgagacagtgatccgacaaaagtgaacgaaaaacggaaaaaagcggtggaggagagcaagagcttccaagcgataagcaagctgagtgccgacatattcaaccaggacttgtacatgatcagcaatgtcgagattgacattgagctcgcactgcagtcggacgactttatgatccaccaggacactgcgaataaggacaagtacacggttgagattgttgactgcagactgatcgtgaagactgtcgatttgatggacgggctgagtcttgacattgccaggaagttggacactgagcctgccagatacggaattcggaagtcattcatgaaatcgcttttcatcactggtggtcgttatgacttctcggccaacctattcacggagaggtgccacgaagggttgtcattggcctggtgtccaaccagaattatattggccataatcagaagaatcccttctattttaatcaccacaacgtgagtgccacttggcagctggttatgaatcagattattcaggtgcgggacattgagcttacggcctctggcaggacatatccccagtacccgtacaatttggactacaagaacaacaggtacgcacgggcttatcacgatgcccaagagcacctcggcatggcgtgcacaacggagagcaacgggatcagctacagcatgttcaaaacggcctactgcctctatgtcttccaaatgaccaacgcacaggaggactcgccaggctttgagctgataaaggaggggtgtactgcagtgaacatccgattcactgaggcagtacccaacaagggcgtcactttgattgcgtacggcgaggcagacgggctcattcttatagatcgtaaccgatcgatcact

SEQ ID NO: 4472 - DNA, 5777 bp, Heterodera glycines
  unsure (1)..(5777): unsure at all n locations
cgcactttgctgttgctgttgtgccgccaatgggcccccttcttgcagcggatgcggcaccaagttgctgctgctgaactgcttgaacatgttgatgctgagagggcgacaagacgagtggctgttgttgtgatgacggcgactgttgttgttgcgcttgcgccgaaaaatgttggtggntggtgaaagatgccgacgccagtgccaccggatgttgcagcagaagcggcaccggcaccgcttagtttgtgctgttgncggcgacggnctgctnngggaatggggcttgnctgtggcttggtgctgcgtcagacaagctgcaaaaaagtgatcagaagaagaggtgatcggaaagaagcaaagtgggatttccaattctgatttcaaaatttcattcagaaacaccaccaattatttgtgctctaccccttccatgattaagcggatgtaatgcttattcgggatcggaaagccgaaaaactaagaaaattgtggcaacactcacgaaactggacctttaaaatcctggaaaaatatcctgaatcagtaggttggcacggaattacgacccattaaaagccagggaaaatttcgagggctgaggcgctcgggaaagggactcataagcattcctgacacgtgaatgatctgatcacattgttttccaagtgatcagggcttcaagtctagccaattataccgtgagtgactcaccgatgggnctgtgtcgccggtgttgcgccgccgccgccggacgtgcgcccccccggggcagcgttaaagaacaacagaggggacaacggcgttgccgtccgccgccgctgcagcattgaaaaaactgagcgcttgcgctgcttcaactccgccgcctgtgccgactatgccggttgcagccgccagttgctgctcctccttagtaggcccaccgccgcccgccgccaaaagtgcggcaattgcggcggacagttgctgatgcgcggcagaagcgtccgccgccgccgccgccatggagttggatatgttgttcaactgctggtggtgctgctgctggacatggttcagctgttgctggtcgtgttgcaagggttggggcggcagttgcgaagtgccggacatggcggcggtgctgctgatgcattcgcgcttcacctgctgcagcaccgcctgctcaatgctgttactgcttgacgatgctgatggtgccgaaggtggcggtggcggtgcgggcagagcatgttcctttgattgcttttgtttacgaaaatgggaagaacaaggtaaaatgggaccatggtttatcatactgtatgtataccgtagcggagcctaaagtccgaataccactattggtcctcctctcccccggtctcgtctctctcggcaagttgatgtctcagaaacgactctcgagaagggtacacttcattcccccgccctttggaccgagacccaaaaaagccgagactgagattctcgagcaagctgcacaccccacctctttgatgtaaatgttctccaacggcatgccgatggcttgtctttgttgttgcgcagcgtccaatgccgtcaacgttggcgttgcggttgttgccccgccggcggtgcaaaaatgatgctgattttgcgacgatggtgacggcggcgaatgcctctggcgccgctgctgctgcttctgctgttgttcatgttcctcctccctctcttcctgcttgtgatggctctgtggttgtgttgctggtactgctccaggagctacgactgtgccctcctcttcaccgacgaggccgggcgagaacgcctgttgcttggcaacttgttgctgttgttgctgtcgcaagtgcgcgaccatcgcttgcattcgcaaccgctccaggcacagccgttgctccagtgagtcgaccaggtcaatctgggcatggcactgctgcgccgtcgcactgctcgtggcgtcgtcaacggcggaatggcactgggacaaatgggcgagaaaggcgggcaacgagtcgcagggctgaaaaacaaaaacagggggcatcagtcgccaattgccgtcttgaaaccagagaaggaatggcaatttgtttttatctatcggtccaaaaatgaaaatgttgtcgggatttttcggcaggattttcatgcagattctcattagttagggaaatacaagtttccgcgtggctcagtcggttagagcccatccctcattgtttggagagccgtgggttcgagtcccacacacccgcctgtcgatccccaacaaataattgccgtccacgggtgcactacgtcccccccccccctcggatcagttcccttaaaaaaattttcctttataaattttcgaactcttaatgattcatcataaaattttgaaaaaaaacaatggttcatcagaaattttttgaaaaactactataaaaaattaaataaaatgttttgtttgtaaagaatttgttaatttttggatttttttaaaaaaatttcgggggaggaaacgagctattccctgctgcccacctggtcgcagttgaaccatgcgcagcgaccattctggtacagcggataatgttgctggtcatgatgatggtttgggtcgtccgcgatcagtgacgcggccgactgttgctgctggtgttgtctcagcatcagcagctgtgacgacggtgccgtcgccgccgccgttgttgtactgctcgctgtcatcgtcgccgccgcccgttggaactgttgctggagcatctccagcgagttaccgacgccaccgcccgctgttgttgctgcaatcgctgtcgccgcggcggccgccgctgcggcgactgcgcccccctcaccgccgagcagtgcgtggtgcagctgctgatgttgtggtggcactccgacggcaccggcaccgccgccgagcaacccgagtgccgtcaactgttgccacagctgcaagtcaatgccgccggcatggccacctatggcgaattgctgagccagccgatcctggaccgcaagcagcaacagttgctgctccaactgtgttaacaatggggggcagtgagtaattagtggttaattagcaattttttccgttagatttttattttattttgacattttgccaatccattcgtaacagcatattaacaaatacaataataacaacaaaagttagcgctttcgtcaatagtttgggttaaacattggtaaaatttgccataaaaactttcggaaaaatccctttgacttggtcctccgttttagcaattctcgtaactactcgagactcaacaaaaatgattcttaggggtgttgtgccgtttcatcgtgaatctcccagtctcacgggtctttcccgggtaaattaaggtaattgttgggggaggggggggggggcgctgttataacggaaaggtgtggtggcaaaggtacgccacccctcaggcagtctgcagaaggatatttattggttttctcattccgaagctcccgtcgagagtctcgagagaccaccaccaacgcttacggcactgttgctgagcagtggtggcggcacgtcacgcggctgaccaccaccaccagcagcggcggggggagggggtaccgcgtgggcaagaatgtggtgaggcggcacggaattcggcgcaatagtgccctgctgttgactttgcggatcgccgacgacgacggcaccggcggtgtcgtagctggtgccagccgcagcgttgttcctcccacttgtgccagcctcgccgccggcaccgatggtaccgtcgccatttctgtgcccgccgtcgtcgctgccctcgtcgatggtgttggtattgtttgacggattgttaccattgccattgccgttgttatcagtgctgtgcatgtcgcagcagtcgtatagaaagagggatatgctaaagcgacggaagcgacctgcgctgattcgatcaggcctgatcactactaatcaatgtgtgtatgaatgtcactaattgttgtgtgtcaagagtgagatatatgcataataataatggaaatgagaaggaccataacgattaagcatcaagtaatcaatatcagtgatctgatcagaaagtctgatcaattacttttaatcagcaaagcacctttttaggcagtgtgatcagcaaattaggacagtgtctgatgatcaattgatcagagttccggttggaataaaactgattaaggcaatacaaatggaaaaagacaatgcacagattacaaaagaaggcatgcaaaaatttatgagacgaaaagatttttgagcaaaaaaaataaatcaaaagcaattaagatttaatgaagtgattgattagtgtgagtggagtaaaagagaatattaaaaaacatcattaccaccaaaaagtgcatttcgaaacatttttaagtcaatttttttttgtcaaaaagcaaagttcgatcgatcagaataaatattagcaaaaatgtgtctcagcaccaaacactaaaaaagaaagcaaaatattacgtcaactaaacccgaaaacaacaattttcatacataaattttaggctattagggccccacacaaaacgcttaaatcgtaaacaaaagcacaggcccccgcggggggggacgacgagggggggggggggggggggcccattccaaccaatgtgtccactctccgatcattctttgggaatggttaaccactaccaacaattcttaaagaatttgcggtgcattcgccaaccgttggacgaccttttgaaacaggacacggactggaattggtccagcgaatgtcagaaagcctttgatcaggtcattggcacgcttcagtcggaccaactgctcacacattatgacccatcacaagaaataattgtgtccgctgatgcctctgagcatgggatcggagcagttatttcccatcgttatgcggatggaagcatcaaggccatcgcgcatgcgtcgcattcgttggctccggcagaaaggaattatgcccaaattgagaaggaaggcttagccttaatttatgccgtgcaaaaattccacaaatacctttatggaaggcattttatcctgcaaacggatcataaacctttgctgtcaattttcggcaacaaaaaaggaattaatcctgcaccgccaatcgattgcaacgttgggcattgattttgctcgcttatgattttgatattgagtatcaaaacacatcggagttcggacaagcagacgctttgtctcgattgatctcaaaaacgacgattgaagacgacgaagtgatcgtggccaatttgatgaatgtggaaacggaacttttgaatgctgttgtaaagcaatttccgttgaattccgatcaattaattgttgagattggaaaagatgaagtgctaaaaaaggtcatgaagtaccttcgcactcaatggcccacttcaaagaatatgtctttagaaatcattccatttcaacgcaggcgagaagccttatcaattgagaatggatgtattatttatgctgaccgggtggtgatccccgcatcacttcagaaggaagtcttgcagcaattgcaccagggcacccgggaatgaaacgcatgaaaaatctggccaggcaatatgtttattggcctggaatggaccagcaaatcgaagacacgaagaacccgtcgtggatgaagctgatcgagcccccgaagtgcccgctcaatcgacgaccgcctgatcgctacactccatcatgaacggacggatcagacggacgaatcgaacggacgtgtaagacggacggatcatggaag

SEQ ID NO: 4473 - DNA, 1538 bp, Heterodera glycines
  unsure (1)..(1538): unsure at all n locations
cacatcgaaaagttgtgggagagagagancggggagagttcccaccccggcttcccccatcccattttacgccgccgccgtcggcgtcaaaaacataaacacacacacacacacacaccaaaataccgtaaccatgtctcgagagtggggggaggtcgagagtgatcggatgggaaaccgcttggggggcattacggatcgatggacagatctgccgcacggcccctcgagcgctgcaaccacagcagcagttgaactatgcagcagcaaaaacatcgattctcaatttggcttcaaatttttaaactatcgctggcgctcagttggcccggggagggtcaactgagcaccgccacggcagcactgacaggggctgaaatgagggggggggaacaggtttcggcacatgatggacatgcataaaagatataacacatcaacaatgtcaacaacccaagggggagagggaggaagtaaacatgcacgaaggcaaaaggggtgatagcaatggcatcacttttagtgattgatgctcgagattcgagaccaattcattcagcagggaccagtggagagagggagagactcgagagtggtgagagagtgaaggagagaaaaggagagagagcgacagattaatgaaataggggcagagagaggggtgggaagtgaaaagaaccgatttcgaaaccggcattggcacggaaaaggcccaaggcaattgtcggtggacatcgagagacgagactctcgagcaggtaggaaagcaaaaacaaatatgctccgccggtggtgtgtctgtacattaaaagtggcattaggacgggggcgggaaaggaattgccttaatcggaattcggacaataagcggggcacatactgtagggcacatcatcattttgattattgccaatatgccacctccccccgccccctcccgtgaatggcaggcaattaggatgacggcacaacacacacaaataattagtgagagggtggggtgtgccaccggtggagattgactgactaattggcagcatcactccgtgccatttttgtagcccaagggtttcgaaatttgtacatagattttggtggtatgatcgacgtcaacgaccggcagaactaccgtatccacgctcatatacagtaaaaatgcaaagatggtgaaaaatacagtcgctgcgcgggtaattcacgagtgccgagaaatttacatatttcccgaattgttggttctcgaatacaaccaaaccaaactctcgtcgaataataatggggtcaattttcgactttgtgtcaactgaaagtgatgatgatcaccagtgatgagtgatgagagaattaaatttaaatgcactaaaaattttgaaatttttcgccgcgaggcaaaaacacaaaactccattagtcggtaaaagcctaattaattttaccggaagaggtggggggacaaattaatagggagggaaaagaaaaaagaaaatcatcggtggtgagagtcgatgagagggggagagtgaatgggggaggaggat

SEQ ID NO: 4474 - DNA, 726 bp, Heterodera glycines
agatgactttcgtcggttcaacagtgactattttcaccattagttatgtgtgctctcgtcattaggttgcgaaaacactaattacaatcattggtgctcagttcagttcagaggagtataatgaattcgggaggaggaatggatttttgcgtgggtgttagtgaatgggggaggaggagagactcgatgagagggggagagtgaatgggggaggaggagagactcgatgagagggggagagtgaatgggggaggaggagagactcgatgagagggggagagtgaatgggggaggaggagagactcgatgagagggggagagtgaatgggggaggaggagagactcgatgagagggggagagtgaatgggggaggaggagagagttaatgagaaaatggggaagtcgagagtaaaagagtggggagggtatataatcgagaataaagggaaaggaggaagggggtagatgaagggaagaaagtgtgtggtgatagccgagagtggagagaaatgaacaggaagggaaggtgggacattgaagaaaggaggggaaaccgaaaatgggtgggtcagtagagagtgttgggagagagaggagacagagtcgggatcggaagggagaaatggaggggtgccaaaataggaaggaggggggaaagaggaaggaactgtcgagagtgaggtagagggccgggggtcgagggcaatggatgagacatgtgacag

SEQ ID NO: 4475 - DNA, 1473 bp, Heterodera glycines
gagcgggaggagacaacgccgcccatgtcaacaacaacaacaacggcaaattaacaacaaaacacttttcaaattctcacgcccttttttcgcgcctcgcctaaaaaacaacacaaaaaaacgcaaagtttgacaaaaagcaagcaaaaaactgtttgtttttttaaaggagtgggtggttattttgttgttgtttttttcgactctaattttggcccggtgccaattttatttggacagtctcgaaattgtgtacaaaactcactccgagattctcgagttttggtcactaagagtctcgaggaacggtcccatttcgagaggctcgggaaattcttgaccttcaaaacaatctcgagatcccggccccggcttccttctcattgtcagtctaaaaatgatcacagggagggtgtattaataacctaagttatggctctgaatcagtctcgagattcgcgaccttttcggctctttctcggtctgtcgagactctcgactaaggcaaataaaaggaagcaaaaaaaacacattgaatcactcacacacaaatacataaatataaacaaatgctggggggggggggggggaatttgtgcactttttgttggggataaataccaaataaataaatatggccccgcggcatttatttatttatcaatcaccgcccgccccgacaaattgccacacaattataattatttattcaattagtgttacattgtggtggcggcaacgcgcaaaaagtgcatcatcacacaaagccaaccgaccgaccaatggacaaataaataaacaaaagaaaataatgccaataaacaaacggcgggggcccggtggtgatggcacgtgccaaatgccattcacaaagaaagggggcaaaaattgcgctaattgctcctttctttgttcccaaaaacaattcttaaaatggattttaaataaagttttacatgaaataataaaagtcctttgttcagattaagcataatgaaaatgaattagcgttttttgctaaattttttgcttaattaaaattcggtgccattcatttcaaaatttcttaatttttattgacttggatcgttttaattgaccactttaattttgtggtttttattttggcggcttttgcgtataaatttttattttatttttttgccggattttgaaaaaacgccgccgattgaaagaggcacaattttaaattattttgttttttttgtttaaaaggttaaataagataagaaaagtttttttaaatggagggatttttttttgattttggatgctttaatatggtcattgctgtgaataataatgattatgacgtgacaaagtgccaaaaacaaaaaaaaatgccaaaaatggccaaaaacaaacaacaaacacttgggcattgaaagattaaagagaaaaaacaatttaaaaaattagggaagggtcggcagcctggacacacagcggggg

SEQ ID NO: 4476 - DNA, 7188 bp, Heterodera glycines
aattgtaaagcctaaccagaattaattaagaatacccatctcaaactcctaatgttggaggtggtgaaagcgcgactagtgaaaccattgagaatactcaatgaattagaaagtgccgatttaaccatcatcacgaactatagcgaaaattgaactggacaaatcagtgaacgtttaatatgataaatggactttatgacaattaaaatgaaataactctgtctaggtaaacaatcattttatgccaaaataaatagtacaaattccaagagacaaattttcatatgacacttctctgaacccggcctcattaatcatttgagcaaacttttcatgagaagggaacattctgatactttccaccaggtacttataactgttgaaatctccaactaaaagctgacccaaaactggaataaattggaagctgtaaatgtcatagatccgtcttaacatcgtattctcaatttgtccaaactcaaggcaagcaaaaacaccatttggcttcagaacacgataggcctcagaaagtaccttagaaacaaaagaaaatcagaaacaaactcgaccaattcaaaaattgacaaattattagccaaatttgcaaaatgacaccgtcgaaccttgtccaaatgtgtgcagttcctaattccgaatgaaatcgtgtagaagtcgtaagtgttgtcttcaaattgcaaattttccgcatcagcacagacccatgaaagtcgggcttggtcagatggggagagtgctctggtggctcgagtctttcctgtttccagcatattctgtgaaaaaaaacatgagaaattcatagataaatagaaacagtgatcactgacatcattgatatcggcaacagtgattgatcccttgccgatcggttgtttgcgcatttcttgtacaattcgaaacgccacatcgcccgtaccgcctgccatatccaacaccgttgagtcttttgataagttcagctgctgcacaaaatattccttccacaaccgatgaattcctaagctcatagcatcgttcatcaggtcgtattttgtagccacattcgcaaaaacagtacgaacttaaaagcaaaaagtacccaaaatatgaaggtgaaatattatcaaggaaatacccttttcctgcttgtctgctacatcaatttttgtaaaaccaaagtgcgtagtaacgttccttgtatttccaagtgaaaaaggacgagaaaaacaaaatttaacaaaagatttttgtaaattcgaacttaaaagttcactcatcaatagctgcaaaattcacgtaaataatgtatgttttttggtatttttgagattttagggcgattcttagtgggtggttttatcagaaatttttgggttgattcttacaattatgggtgcatttttcgttttattgcattttgctaataaattttgggcaaagcgccaaaaatagttttttttcaaaaaaaaaaatagattttttaggctttaaaaataaaaaattagaaaataggccctaacaactcgaaaagtagcgtaacaaccaccaaaaaaaaaaaattgtcgtgcgtttcagaccataggagttcaggaaaaaataggctaaaacctaaaatcttatctttaatttattaaacaattttactaattttttcatttttatcagctgttgagaatgatcggctcaaaattcatcggcaataaagccggcatgagctccattgacaaggagcaagtggcgcgcataattgctgagaataccagcgcaaattttgagggttatgaaaagaaaagggcgagtcgcattgatgaacaaataaaaagaaaccgacaaaggcttgattcattgacggaacaacaaataaaacaaactcgagaagaggtgggacaaattcctggaaatttaactaaattattaacaatgaataataaacatttagttggacagaattgttgaagacatggagaaatggcgtcggctggacaggattaaagtgcacattgacatggacgcgttttatgctgcagtcgaatgccgtgacaatatccatcttcgagacgtgccaatggctgttggcagcctttcgatgctggtgcgtcattttattttataccattttaagagaccatgaattatgagtccatgcaaactttccttcattgaatggtttaggtatttgattattctgtagttttaccaaaaaatccattgataattactgccgatttaagagcacttccaattacgctgcccgtaaatttggcgttcgttccgcaatgcccgggtttattgggaagaaactctgtccccatcttctgattgtgccttgtaacttctccaaatataaacgggattcgtcagtgtttcgggcggttttccagcgctatgactccgaagtttcaatgggaagtttggacgaagcctacttggaccttacccatttcatctcacagcgaaaagaaccgggtgggttttttcgccttttacttttatttgaatgtttagtaatctgtcgaagggttcgttttatgggcccatgcgtttgtcgccttcctttggtagcaaatcccagtgaaattgggcccgaagtcgaaaaaactccgacaatttgtgcaaaatgtgggaatgaacgtattgaagttgttgactcgattgaatttggacaagacgttgactcaattgtgcgccaacttcgttttggtatgaaacgatgcgtggggaaacgaattgttgcggactaatggggacaaacctgtattctgtaggggcatcctaaaagttttttttgctctcattgtcagtccaaaatttgaactaactattcacaatcgacgacatgaaaaaaagagagcatttttagccctttttattttattcataaataaactaaaaagttattgggaatcggaatggaaatttcagaagtggagcaagcaacaggcttaacatgcagtgcaggtaattttccaaaatgagttgaaactgatctctgtttctccgtttatttttttcgttgccatttctcttcaggaattgcctcaaattccatgttggccaaaatttgctctgatctgaacaagcccaatggccaatttcgccttggaaattcccgagaagagattgcctcgtttatgcattctttgcctgtccgaaaagtgcccggcatcggtgcggtcaccgaatcgttgttgaaagggttggacgtggtcacttgcggcgatttgctggagaagcggtccattgtgcatttgttgttcaccaaacgctgttccgagtggctccttcgcgttgcgcttggcatttccggccacgaaattgcggacgatggcgagacggagcaaaacgaccaaaatggtggggtcaaaaacagtaaaactcagaatcatcagcaaatgatcattgccatttgtgtccagacgaggacaacccgaagagcacgagcattgagcgcactttcactccgacaaataattcggacgatttgctgtccattgtccgttctctatgtgcccgtcttatccaatcacttccatcctctgaaattgtgggaggtcgtgctgtgacgctgaaagtaattgcgtaattttttttttttcatttttttcactcagataaaattcgccaattttgatgttgtgactcgctgcaaatcggttaattttgttgtcaccgccgtcggccaactcattccaattattgaagcgatgctgcgcaaggaattcaaagagcgaagaaacatggcggtgtgttgttattgttcattttaacaacaacaaaaaatagtcatactttttgagattcgccttttgggcgtaagactttcccaattggtttccgctgatgcaaatttgggagaggaggcgaaaaagggcgttcagctgagtttggccgggtttatgtcgcgacgtcctttggccaacaaaaagcgacgagacgaaccccccgaggtggtggaattaagctcatctgatgagatggaaacgaaggaggaggaaggagacgaaacaatggaagtgaaaccaatgccattttcggaggaaaaagagccggaaaatggccaaaggaaaagtgaaagcccaaacgacggatgtgacaaggcggagacgagcgaacgcagtcggagcaacggccaacgtatgcaatcttctgacgaatgaatggaacggatcccatgtgattttgccaatttcagaagcaagggaacgcgacagcgcacatggagacatcattgtgatagaggacgatgaggagggggaggatggcattgtgaacattgacgaatactttgactttgttgacgacgacgacgaagtgattgactgcacaaagtcagggggagagaaaagggcaaaaaacggaagaaaagggggaggacagaaaagaaaaagacggagggaagagagcgagaggaaaagggatgggaacagaaaaacgaacaatttgttcaaatatttccatacaattcgttaatttaacgacttttgccgtacaaaagaatctgatctctgaaattgacaaatttcattttaaaatttttcattatttttaactttcgtgcaaaataaaattctaaacttaaaacagttcaattttttatattcggtttattcacatgttcaaaaatgatgaggaatttcgctgggtgccttgggggagagatcattttgcatttctgctgattttccataaaatattaaaatatccgtttttcgctttcatttcgtctcccattcattgccttttaaacaacggttgctcaagcagtccgtgcggggtcgccaattgttgattcactctttgtgcggacttcttcagcttggcccgtttgttctgaagcggcaaaatgaaaagaaaaaatgcatttgtttttgaatcttcgaaattttcccgcctcgcaaaatgcccctcaatcaaaattccgatggaatcattaaaagcggagatttttatcataaaaacgacgaagagtgtaaataaatacatatgtaagtgagtgagtgcgttgtgtccgccaaataaatgtgtcgggggggggggggagggcggctgtcaattcaaatttttcttttcactagggacagtcagtcaattcatttgctacgtttgcgctaaaagcggttgtaattagcggggaaatgaatgaaaaaaagggagaatggagggtaattgttggcattggtaggagaaaactcaatcaaaagtcaatccgatcaaaaggaaacctttaaaatgggcactcattttcccaattcattttgaaaaagtggtaattaaaaataaccgtgttctttctccgttttattacgctgatttgtgaatgagtcgaaaagtgagcatctgaacccatttattcaaatgattctgttttaaggggcgaaggtcacaaaaggaggataaacgatcagattaagacgatcattattaatcaaaacgtgtcaatttacgagcgaagaaacggcaaaaagcgagaaagatggggaaaaggcagaaggaaaagccgtggtaattggctataagatggcaacaatcaccaagcataatgactaataaatattctcttctctaattggctgattcgagacggacgaattcaaattacgggagggggggggggagggacgtcagactcttccattattcagttacattagttttgttttacaacaacagtctttccccccccccattctctccctccagcgaacaaactcaatcaaatcaaatcgctttgagcgataatatcatcgcgcctcgcttcgctactccctccccctcccccgccatccatcttttgccgacaagcggtaaatgatgcgcacatttgcacgagtggggagagaggtcataagaaagagacagacagacacacagacggacagaggcaataaaatgagagggacgaatgaacgaaaggacggagagagagggggggggggggggagagagaaagagggaaaaggtcgaactcgacccgagtctcaactctcgaaagagacatcgcaaaagttgttagctcaagtcaaactaaaacacacaacaaagggtgtaattgaatacggtagtcggaaaaagcttagggaattggcaaaatttactctttgccccccccccctttggcttacctgaaaccaaattttgatttggcactcattcagtcccaattcgtgtgccaattcctgccgtttcttctccgtcaggtagcgactgtgcacgaattgcgttttcagccgttccaactgttccgttgtgaatgccgtcctcggccgcttttcctcctccgtcaattcgcgccttttgcttttccttgtccttggcccttaaaatggaaaaggcaaaggaatccaacgcaacagaacaaagaagaagaagccaaaacccgacctgaacttggcctgtcggaatagcgagtgcagaagatccaagaggggagagaatcgcaattggacgaaacgaacgaattggggggaggaggagagcaaaaggaaagcggaggagggaccaactgagcatgggcatggccatggtgaggggacggcgtcagggaagaagcggactgaaatggaaaagccaaaacagtgagtgataagcagagagagaatggaggagagagaaaaagtgatcagatattacggtgagagagtaaaggagaatgggagagaagtgatcagcgaatggaaaaggagagaaaaaattgaataaagaaaggaaagtgatcagagaatggtaaaggagagggaaagggttggactaaaaagcgattaactgacagtgccgaactcgggctgtagaatgttctcaatgccgaatttcagcgagctgttcaatgacagtgctgctgctgttgtggccgctgtttgtgttgttaggcctttgttctgtcgattttctttgccgtttgggtcgtggagatgctcaacagaactcatctcaagcagacgagcaatgttcatgacagtaacctgagaaattgaggtaaactctgaaaatgagggaaattaggggcgggggggaaaggcgaaagaaaggagaatggacagaaaacaattagccagctaattatagcattattggtccaaacgatctgttcaattgatttaaaatatgagccaattaaacactaattaggtacatagcaaaaaacccaaaggtagtctccctcaccaatgcctcacttccattttctgccccccc

SEQ ID NO: 4477 - DNA, 2145 bp, Heterodera glycines
  unsure (1)..(2145): unsure at all n locations
cgtgggttaatgggaggccaaaagtacggtaggcaaaaactttaaaaagattgggtaaatataagaaaatggcaaaaaataaaaatgccaaaatggacaccaacaattcaatgacacacggcctaatgataatgaccctgtccaatgaacaacagtctattaaataagcgatgatgacagacacttccattgagcggttcaaataaaagaaaaactttgagatttaccagcgattttttaaactgtcaacggagcgaaaacatttccgaatggacattcatttcattgcccttctccccaattacccccccccccccccgaggcgttaagcggcactaatagggcgacttaaaaaagggcaatttggcgcaacgcatgtggtggacaaatggataaatatttaattatccaacgcgtctcccggcgtttgttcgacaccgcaaattgtcgggaggagcaattaaaaggacggaaggacaaaacagtcgagaaatggagaatatccaattaggaggggcaattgggaaagattgacaggcgaattgaggcaaatgcaaaagcaaacgaaagggagggacggaaaggacgaaaccgaacgacggcacggcacggatgaatttggcacaaaaagcatttcccagggattgttgtgcaacggatactgtcggagaaggatgacgaatgaataaatgaaaggggcacaaggctcagaagccgacggcgaagggataggcatggggaaagatcggccggcactttttttgcccgtcagcaacggtcgtaccactctcttcaacctaacaattttgcacatcactttttatgtaaaagatgaaaacaaatgggaaagggggcggataacttacgccaaactaacaaaatttatttttcgccgtttgcccttttggttttttaagtaatggcaaatacagtacattctcattggtccaccgtattccgcaaaagaaccaacaaaatttataaaaaaataaaacaacggaggcaaaaatcactcggtattttgagaatttaaaaactcgttgtatttcttctcaaagtcgaactcatattcaatgccaatttcgcgcagtttcgccattctctttcgcaattcccccacaaatctctccttaaatttgcaatttccatttgcattattttctcaattttcccaccattcgtcgcttttccttctccggcgttcgttgctcattttgttctttcgcctgtttaacgccttaaatatggcaaactcgatgattaatttttctttcgttgaggttccatttttgacttacgcttctcggcgatctttggaattttgacgaagcaccggcccttccgaatgcatttcggcacttcctcttggcctaacactttgcatctgagccgattctctgccagcaaataattgtccattgcgcgcgccgcgattttcgccaccgctgcctctttgaactcgacaaatgccgtgccgttgtgacctccctgacaaatgagaatcgaatggcgattggcactatccgacaaaattagagaaatcaaccgcacctttttgttgcgcatcacccgaacgcgcttcacatcgccgaactgactgaaaccaattcaaaaataaataaaagtagaacacaaccaaaccgtacctgaaatagccatgaatttgcttctcaaaaaatccgtacggaatgtgtctcagtcggacgacgtgctgaacagcggcaacttcagaggaaggcccggcctccaacttctgcttggattttcgcattcgcttaattcattaaaaagcaaaatggttcatttgctaacgatagtatcacattaattatggcaatttataaactttaaccaacattaatattttctcaatttatttttaaaagaaaataaatgctgactaaatgtaaacgatggatagatagattaatttgtaagtgaagaagcgaatgaaaatgaaatgtgtaattggtaaatggcacaaccaaaggcatacgtagcaaatattgcgaaaaaagagcacaaagaatgaatgggagaaagaaatattgaacgaattctggggaacgtgaaaccgggcgaataaaactcacaaatcngtgaaaaattaacattttaaacttggaaatttgcgtctgaaaattt

SEQ ID NO: 4478 - DNA, 1953 bp, Heterodera glycines
  unsure (1)..(1953): unsure at all n locations
atatttaatgatttatcgttagacttaatatcagaaaaacaatgagttttgtgatattttttaagggatatgattggctacgttaaaaaacttaccgtatatttggaatgcatatttcagcttcagctgaagcggtgccatttcgctgaacactgaaaacatgtccaagaagtcatcaaagctcaaattgcnctggccatcctctgaaaacacctgaaaataggacaattatgtttaaactgggcagatgcagtccattaaaaaaatcgaacaatatatttagacttaattattattttattaattttatgcaacaaattaaaatgaaatattttgaaaatgacaagaaatggaacccggatttttctgggatcattcgatagatttaaaatgttttctattaggctgccaattttaaaaataatattaagttacaaccaaaatattacccgcagggccaaaatgataaaaaaaagtaaaattttagagatttttggtgatgtctttttaattatagtaattttttataattttgcattcaaatggagctacaaagtgcctttataccatattaatttttctttatattatgtaacaaataaaatgttaaagcatttgtcgcaaaatgacccgtcctatgtccgccggacctgacaaattcgctccttgaacggattctcgcgcagctccggcatttgactgatctgctccatggacagtttgacctacagtatgaggaacaggaaacaattagaaaaattaaatcatttaaacatgttaaattaaagagcgattattaatgctaagatttaatcgaaaatatttattaaatcaatttaaaaaacattgtatccatctaccgtttgcgcttgtccgccttgaatatttgctggcacaatgcgcgagtccaactgatggaagcgcttgtacaggcgcagaatgtcttttcgcgtgaaaaatgtgcaatcctatgaatatcaaaaataaacatttataaaatagagctggaatccgaagcagcccaaaatgacgcaaaactcgggagtcatacacagttggaaaacaaaataaagttattttatcttagaaaaataaaaatttgtcatatttgaaaaaataaggcaaagatgcaaaaaggggtcataaattattgaaaaaaaggaaataaaaaaacacaattcatttcttcaaattccactttttcccgaccaattcgttttgacttgggaatttgatattgtgaatgataaaagtttttttttcgaaaaagattttatcattttttttcaatgaattcgactattttaatggggagacttcaaatttttgagttcatttttaaattttaaagaacaaatttgtaataggcgcccggaaaaattagctgattcgtttagctgtcacctggtattcgtccaattgttgggggctgaacggtgcgcggcccttccataattgaagctcgccaattttgcttttggtattccccattaccataaaaagtatttgtgaaaatcaattttttaaactgataaatttagaaaaatttaaaaaactttttttataatttcaaaaaataaacttttttcttttttgtaaatttgcattcaaaaggcgcccaattactaaacccaatttaattggacatcacttagtaagacaaatggacaataggccttgcgttaatgtgaaattgaagtgatcagtgagtggtccattaggacgaaaacactcggaagaattatttattgatcagtgatcgcacaagcgaaacaactgacaaatgggaagaggattaaggatcctttaaaaaatatttttaaagacaaaacatgcaattagttagttaaatcaaaaattattttttaaataattatgtctaaccatactttactaattttttatttaatttaaatttttaantttatttttaaatttatttgtactgccgaa

SEQ ID NO: 4479 - DNA, 1026 bp, Heterodera glycines
taaacatcagttctcaaaagaagtttgaaaaaggctgcctagaccagtaggtgttatgaagttactcaaaaattttcatcttttttgagttcctctggccataacttttttgaaagttaactaaattttttgaaattttgcaggcttgtcgagaatatttacatagggtttatcaattaagcaacgtctggtttcttagtaacgatgaagcatcaaccagtaactttatctcatgattgaccggcacccttttttcaaaaacaacactggaaaatttagtgtaggaaaataggctgtccaaaatgtcttaaaccagcacacacctagacacagaataatccaggccaatctttatccagcggggttcacatgctgttttttatatttcaacaaactttgttcatgttctaaaagaattcgaaccttgaaaatttaaaaaattaccaataagtaatctaaactgagataactgtttaaaattcaaataacaattaatcaccatggttctattgagtttcgtttaatttttgtgtattagataaattttgaacaataaaataggagttactgcaaaaaaaaactcacaaataaattaataacaaaaatagaaaggcaaaaattttaaaagcaaaaaaatgtttgaaaaaattaattattgcttagaaacatctaaaatatatccaattaataataatgatgatttttaaatttatttaatcttttttttatcgaaaacttgaaaaaacaccggtcacttgaaataataaattctaaaattttgtccgggaaaatacaggggttttcgtgttttgccttgaagaaactggcgaaaataattgactcaataaggcaaacatttattttccttcccctttagaaattgtggataaatttttgtcgtaaatattcacaaaacaatattttattttactgtaatcttgttccaaggtaagtgaaatgcaataaataacgcttggagataaaagaaactggcgaaaataattgactcaattaactgtcgtgaaa

SEQ ID NO: 4480 - DNA, 4160 bp, Heterodera glycines
  unsure (1)..(4160): unsure at all n locations
agcaaacataaatttntcggacattgggaaaaattccaaaaagccaaaatatatggcaaaatcaaaaatattaaaaacataagcaacagatgcggttcaatcatttgaaaatataaattaatatattaggcaaacatttattttccttcccccttagaaatggttgattaatttttgtcgtaaattttcacaaaacaatattttattttactgtaatctttttccaaggtaagtgaaatgcaataaataacgcttggagataaaagaaactggcgaaaataattgactcaattaactgtcgtgaaacagttagggaaaaaacttgccaagaaaaggcgaaaatatttccaacggctcatgtgcggttccaacaagtgaacaacaaaacatgaaataaaagattctaaaaattacttgacttcctttttcgaaattgtcattaattttttgatgtaaatattcattaaacaaactttgtttttattgacaatttttttcgataaggccttgagcttaaacaaataatgcatatgcgtagagataaaagaaatcagtgaaaaaaattgtcacacaaatctgccgtgaaacattacaagaattctggagcagtgcttcgtgtttatgcgtcacactctgctttgattggccatatctcgcctgagagtggcgataggcccttagttgatacgtctgaatatgaagagcgcgccgagctctttcgaacctgcaaaactccatatttttatggccagcatagtaaaataagcactgaatgaaacgggcaatataaattgagatgaatggagttttcaaatttaaaaaccttctgcattttctgggaaaatagttgagaattttttattcgagatttatcacaatactaaggggcgggcgaagcgaattcatttgttgagaaagtattatttttgctgaggaaccttctattaaggggcagaattgaaggcgcaaccagtgctatactacatgtatagtgcaaagaaaaatattgttaaatcagctgcagaaaactattttcattagaggggatgaatggctaaatgactttcatgatgaaaagaagaaaaatacaaaaataaccaaatcattacttatcatgtaaaagcaaacataaattttcggacattggaaaaattccaaaaagccaaaatatatggcaaaatcaaaaaatattaaaaacataagcaacagatgcggttcaatcatttgaaaatataaattaatatattaggcaaacatttattttccttcccctttagaaattgtcgataaatttttgtcgtaaatattcacaaaacaatattttattttactgtaatcttgttccaaggtaagtgaaatgcaataaataacgcttggagataaaagaaactggcgaaaataattgactcaattaactgtcgtgaaaaagttcgggaaaaaacttgccaagaaaaggcgaaaatatttccaacggctcatgtgcggttcaacaagtgagcaacaaaacatgaaataaaagattctaaaaattacttgacttcctttttcgaaattgtcattaattttttgatgtaaatattcattaaacaaactttgtttttattgacaatttttttcgataaggccttgagcttaaacaaataatgcatatgcgtagagataaaagaaatcagtgaaaaaaattatcacaaaaatctgccgtgatacattacaagaattctggagcagtgcttcgtgtttatgcgtcacactctgctttgattggccatatctcgcctgagagtggcgataggcccttagttgatacgtgtgaatatgaagagcgcgccgagctctttcggacctgcaaaactccatatttttatggccagcatagtaaaataagcactgaatgaaacgggcaatataaattgagatgaatggagttttcaaatttaaaaaccttctgcattttctgggaaaatagttgagaattttttattcgagatttatcacaatactaaggggtgggcgcagcgaattcatttgtttagaaattattattttttgctgaggaaccttctattaaggggcagaattgaaggcgcaaccagtgctatactacatgtatagtgcaaagaaaaatattgttaaatcagctgcagaaaactattttcattagaggggatgaatggctaaatgactttcatgatgaaaagaagaaaaatacaaaaataaccaaatcattacttatcatgtaaaagcaaacataaattttcggacattggaaaaattccaaaaagccaaaatatatggcaaaatcaaaaaatattaaaaacataagcaacagatgcggttcaatcatttgaaaatataaattaatatattaggcaaacatttattttccttcccctttagaaattgtcgataaatttttgtcgtaaatattcacaaaacaatattttattttactgtaatcttgttccaaggtaagtgaaatgcaataaataacgcttggagataaaagaaactggcgaaaataattgactcaattaactgtcgtgaaacagttcgggaaaaaacttgccaagaaaaggcgaaaatatttccaacggctcttgtgcggttcaacaagtgagcaacaaaacatgaaataaaagattctaaaaattacttgacttcctttttcgaaattgtcaaattttttgatgtaaatattcattaaacaaactttgtttttattgacaatttttttcgataaggccttgagcttaaacaaataatgcatatgcgtagagataaaagaaatcagtgaaaaaaattatcacaaaaatctgccgtgatacattacaagaattctggagcagtgcttcgtgtttatgcgtcacactctgctttgattggccatatctcgcctgagagtggcgataggcccttagttgatacgtgtgaatatgaagagcgcgccgagctctttcggacctgcaaaactccatatttttatggccagcatagtaaaataagcactgaatgaaacgggcaatataaattgagatgaatggagttttcaaatttaaaaaccttctgcattttctgggaaaatagttgagaattttttattcgagatttatcacaatactaaggggtgggcgaagcgaattcatttgttgagaaagtattattttttgcggaggaaccttctattaaggggcagaattgaaggcgcaaccagtgctatactacatgtatagtgcaaagaaaaatattgttaaatcagctgcagaaaactattttcatttagaggggatgaatggctaaatgactttcatgatgaaaagaagaaaaatacaaaaataaccaaatcattacttatcatgtaaaagcaaacataaattttcggacattggaaaaattccaaaaatcaaaaatatatggcaaaatcaaaaaatattaaaaacataagcaacagatgcggttcaatcatttgaaaatataaattaatatattaggcaaacatttattttccttcccctttagaaattgtcgataaatttttgtcgtaaatattcacaaaacaatattttattttactgtaatcttgttccaaggtaagtgaaatgcaataaataacgcttggagataaaagaaactggcgaaaataattgactcaattaactgtcgtgaaacagttcgggaaaaaacttgccaagaaaaggcgaaaatatttccaacggctcatgtgcggttccaacaagtgagcaacaaaacatgaaataaaagattctaaaaattacttgacttcctttttcgaaattgtcattaattttttgatgtaaatattcattaaacaaactttgtttttattgacaatttttttcgataaggccttgagcttaaacaaataatgcatatgcgtagagataaaagaaatcagtgaaaaaaatgatcacaaaaatctgccgtgaaacattacaagaattctggagcagtgcttcgtgattatgcgtcacactctgctttgattggccatatctcgcctgagagtggcgataggcccttagttgatacgtctgaatatgaagagcgcgccgagctctttcgaacctgaaggactccatatttttatggccagcatagtaaaccctggtgggagaaacgggcaatataaattgagatgaatg

SEQ ID NO: 4481 - DNA, 7460 bp, Heterodera glycines
  unsure (1)..(7460): unsure at all n locations
aaaaagaggggtggggacggagccgtcccatggcattccgtgcgctgtccttttcggggcgctcgctcatcagtcacattttgggtgtcgatcgggttcagcggttcgcctccgccgagtgggacgaagggaccggaagggaaagaaaggaacagcgaatgttgcgctttttgatcagtggaaaaatgggactgatcagagaagcggggacggagccgatcatgcaaacagatgctgatcagttgagcggagagagagagagagagagagaaagaaagagagggagagagagggggggggcggagagagagagagagagagagagagagcgacgaggaaagagagagagagagagaaagaaagagagagagaggagaaagagagagagagagaagagagagagagaggggggggcggagagagagagagagagagagaggagaggagagaggggaatagagaggagagagtagaaagagagagagaggagggcggagagagagagagaaagagaaagaaagagagagggggcgaagagagagagggagggggcggagagagagagaaagagagagagagaggggaatagagagagaaagagagaggagagagagcgacaaggagagaggagagagagagagagagggagaaagaaagagagggagagagaggggggcggagagagagagagagcgacgaggaaagagagagagagaaagaaagagagagagagagaggagagagagagagagagagggagaaagaaagatagagagagagagaaagaaagagagggggggggcgaagagagagagagagagagggagggggtggagagagagagaaagagagagagagaggggggagagagagaggagagagagtttttgctggaaatgagcaattttagcgatttatcccccaattaacgcgataatgaagaaaatttgttgataaaccggcgaacggacgacggaacaaagcgagtcaagaaaagctaagcgacggacatttgacaaaaaacacgccgaattaattgcctccgggggaagggaaaattcgccaaaaatacaacaacaaatgcatcgattcaaatctaatcatttttaaattgactttgctcaaattgtggcaccacagcaaaataatttatgggaaaattgaggcaataattgcaaatttaaacataagttcatagaaaaatttaaaattcggtgatgctttattttaattattttctgcgtcaaattgctaactttgatcgatcggcttatttttatttcttcttttcaaaatgggaggacaattgaaggaattggccaattctttaattcggaagggaaaattacattatttccttttcaaaaaaaataattattattttccattttttgaatttaaatttaaacaaaaatcctcttggtaattggctgtttatttgccaaaatgctcatcgtttgaccttaatttactcgattactttgacccatagtcactttttggtggtctgttaattttttgtactctttcaaatgcccccccccccttttgtcaatttgtcctctcacttcccgacatattctttccgtatcgaattttgatttagtaacagaaacaaagtattaattaatcgtttattttattatgatagtgaaaaataattttggagaaaatcgcgaaaagaaacaaaagaaaatggtataaagtatgtgaacattgaaaatgatgggaaagtgctgcaggtaatggatgaatgccgagttgaccaccgctttgaactcctcaaaagggcaattggaacaattaggcaatcattgcaaatggtccattgatagggcaatgcgtttgctaattatgccacctgtacataattatacggtaacgtgcgatgttcgcccttcgcagtccctttgactggctctgttgaaaatgcttcgtcgtgccgatggagaaaactggagggaaattaattataaaacgaagaatgggatgccattgttcgcatttggcctacttgaactgacaaaacatgtccgtgtactccttgggaacgttgagcaattcgacgacagtcaaacggaaaatgaattcactgcctttggcaatgtgtggggggaactgaacgtcaaggtcagtgccggaagaatgatctgcaaagtcaaagctcaaaaaaagaaggaaaagtatgggaatggaaattaagcattgaaagccctcttctcaataaaaattggttctattttcgttttgatgctctattaaaaacccaaattattaaataattgtcaaacattatgccaatttatcaaaatttaaaaagattctgaggattttcctcaaaagcctcaaaaatcctcaaatcctcatattccaaaaaaatcctcattgacctatcaaaaagccacaaaatgaggataaatcctcagatctgggagccctggatatcatagtgattcaaatatgtttcacattgcaaaactttatcttctcaatattttactcagatccccattcttaccggtgcatatttttttgcctatgcctcgggttgagaaaaatttcgggttgagaaaaacctcgggtttcgggttggcatcactgccgcctacctacttgcaaaattaaagaaacttttagagtgccacgggaccgggaattttgggcaaacccgggaccgggacctttttgggttgaaaacccgggaatttttggctgggaaaaccgggaccttggtactcagttgtccgctaccaggtcccggtcccgtggcactctagaaaaaatacatacataggtatgtaaaatgaatgtagaaaaactttgttaactgataatatttgtttttacagttttttccactgataatatttgtttttacagttttttccacttttctgcaatacaataaacaacaaatgcaagcagtgacgcgtccacccattgttttggagcgtggagtttccgggcgtgtaaaatggttcgatttcagtaaaggtttttcacattttctcgcactttgattcaccagaacggttgtgtttcttgtccaggttatgggttcatcacgcgggatgacggaggtcaagatgtgtttctgcacgcatcatccatcgttcgcaaagtcaatatgtacttcgtgctgattgagggccagcgggtgagtcggactgattttgagtcgaccgagggattgggacacggagaatcaggggagtacaacgatccccgaattcaggtagaattcgacgtcatcgatggtgagaagggcagggaagcggccgctgtgtcggggcccggcggaattcgcgtgggcaccgccatccaatacaacaacactgcgcgcagtcagccgttgccggccaatgccaacaattccgccggacggatgttcatcgccggcagatttcggcgccccgttggcaaggttttgttcggtgttaaaatgcgcttttttggtcccctcacttttacaccaaacaaatcatttttcgggctatcaaaatggacttctaatggactcgtatgtccgtacaaatgtgtcctgccttcggctgattccccgccaaatttgttttccccatcagccgaacaacaaagccaagtcggccgtcgcttcggtccccgcggtggtcaatggcggcgacgacggtgcaaagggtccgccgctctctctgtccggcgtcactcgcaaaggccgtcgcatgttcaaagcgaatgatggcgaaaagggcaaaaacagcgacaaaaaggaaagtgccagtgacggcgttggcaaagaaaaggacaacggaggacgggagggcgaaaacgacggaaatcgtggggaaaaggaagggacgaacggggcacagaagagtggcagtagcgaggcgtgaacgacgacgacaaatgatttacgattgttttattcgaccccgagacattggcaatttccatccgtccacatattgttgatacaaatattccaataaatcaaacgaagacgcgttggactaataagatcagaacctttcataatatttctttattaaaaatgcaaatcggaaaagaatgcaatgcgacaatagaacttaaacaaggcgaaatagaaatttgtgataaatgtgcaggttctgtcaccaaaacgggcaccacccgacataacactggcacagattatcattcagcgtggcttgctcaatcagccgatcggcctgcgaattatacgcatcggtagagttatgaatgtataaccacctgttcctgcacggagatctccacacacgggttgaagtcgcgcccgcacaatttggcacggactcggctgatcgcttcgctgtccccgcgactggtgccaagccctctgtgtgggtgttggaagacatgtctgaaattgttaaagttaaatgattggcattgggtgggtcagtcatacctgtcctgcgggtttaagtgcgtcgcatcggaattgtcctcagtgggagccgctttaagtgaaaattattagagtttggaaggaaacaagtaaaaaaatcagttttttttgccagtttcaaaatatgtgtgcttcaaatgtcccatcccccacccagtgcgccggttggcatgtgatgtgttccgcccgcagcgcgtcgcgctgtcccggcctcttgtgtaagacgccagttaagcaccggatcgtagacgaacgcctccaacacggccaacacactgtcattgtggtttcgcaagaggcgaagaacgcgttcgcaggtgatacggtagttaccgtcaatcccagtcacttccattgcctggggagagaaaataatctttgaacgtaaaaagaggtagctcatgttttaggctttcacataatcaatgtcgacagtcaactatttatttttgtttatttttccacctgaacaagcatcctcgtgagtcggaacggaatcttttccggatacttttcccgtttcatcgccacttcaaaacaatcgccaaaatcaatatgcacaattttcccgctaagccgatccaacatcaaatttgatgggtgtctaaagaaactgcctttaaaaaacaaggttccccgaaaatcccaactcaaccgtacctgtcaccaagaccgagaatatagccgaccattgacatgcaagccatggaacgcgtgtaattggtacgccgatcaaaccaaatctcagaactgaatgaaactacaatatattaacataaatcagaaactcttgaattcaattatattaatatcggtactaaaaagtatagtcataagtcccctcctgcgctgaatggactggactcactttggcgatttcatccaaagcattcgtcgtaagtcgtcacccgacgtggtgcgcaatgcttcctcaaatgcttcgaccttttgcagcaaagtgcttttctcaacgtcaacagacactttttgcattttgttgtgctcctccgaaatcggaattttacgtttttcgcgatagtctctaaacaaaatggaaacaaaaaatatttgttttatcaatttaaataaaaatgacataagtagatcatgagcattgactaataaactgaaagttacttgatcagctgatgtaatgtgtcacagtgcggcacccatccgatcagtccgctgctctgactcagtgtggtgatcgaatagcgttggatggtcaaattgcgacgggacgtttccgcttcgcgcaaaattagcgaattgactaacccgaacagttgcatcacccgttctgacaccaaaggaaatataaaattaatcaacccacttttaaaggttaccgtcctggcgtggatcttcatgccctttcaacagaaagatgtactctttgccgtcgcttccgcgaatgtaaattttgcgtggccgttgtttgcttgtgatcacttgcaaatgcggatggatggaggcgatggtgacgagcggcgccgtggggtcgtaagtgcccggcacggacagttccagattctttgcggcacacagccgaggcgcaatgtaattcaggtccaacgtgctcatctggcgaagttggccgatgatccgtttgaacaccgtgtagtacaaatcccaagcaattttctaaaagcagttttcgtcgaagaactatttaaattgacaaacgcacaatttctttggggtttcggctgcgccggaatgcttcacaatgttcaaaagcatctttgagatctttgtagtaagcctaaaaataatttaatatattaatcacaaatttgagacgatttttattacaacctaaaagccgatggatcacccaatcccattttaaattccaatgtccgacctggttgaaagattgctccttaagcgttgtgtggccatgttcaattttctggtgcaacggtctcaatacgttcatcatttcctccacgtttttgtcttcaaaatataaatgagatgcgttgtccaacgcctcgtgccacagctcgtgccaaaggatggcacatcggatcagctcgtcgttgaccaagatggcctgttccaccagcaaaggccgagtctccgccacaatgtccaaaatctctttggccacctgggaacgctgtgtgtttcgagactttgtggcagcagtcagcgcgagaacccaagcctaaaggaggacgatagaacgagggaattaatgggcaaaagggatgatgttttaatgtatttcgaatcgaatgaaaatgataattttaatggggccgagtctgatcggaaagtgtctgaagagagtcgcacctgaggataaactttggccacgtcaatgaccaactgtttgacaagtaatccaatgttttgctgggagtcaagacgtccgatcagttgagggaccacttccaaccaaacttccagaggaatcagcttgaccgagtcacgcagttgttctttaaatatatatcctttttaatcaaagtcacaaaacgaagtagggaacaggggatgggagccaaagccggtccgggaatctacagggaggggtaatgagttactcccgcagaagccgccatcccaaaaaacggaattcattcattaaagttagaaattggattgcatcctaccccttgtaaggaattgctattttacagaccaaatacttccggtcgatcgccatagtcaaaccaaagcatcaaaagtcgaagggtgtcgtcaaggcgtgagcctaatttcatattaataaaaaaataatgaaaacgaaaattgttttataaccttcagcaagttgaattgttttgaagaaacagcgaacggcattcaatgcgtaaacagtgatcagttggtgacttttgagaggcgactgaattgtgctgatttgttgtgctggcattgttggaggtgcaattccctgaagaaaatagcaaatagaatgatgacattttatttattattttttattaaaattcaagcgtatcaaataataataattttttccatcgcgattcactntgtgctgttgtgtacaanntgttggcantatttg

SEQ ID NO: 4482 - DNA, 3126 bp, Heterodera glycines
  unsure (1)..(3126): unsure at all n locations
tttatttttcatttattcttntggtgaaaatttcaattgtaaatttaaatatgagtatattgttaattacttgtcttgtgccaaccctggaattttttttatttccatcaactcggaaaacatcaatgccaatgttaaaagcatgtttaaacagtttaatgaaaccttgatacatttagggttattctgaaggttcgaaaatttacatttattttttaatgcttgtcatttacaatttttagctatttgatattggtttttagttgattcatcctttaaaccttgaatatgaaattttataataaattatttattatttatatttaaaaaatatattatttgttgtaaaaggtgagaatataatttttttatttatctatgaattatttgaactatgttcgcaccgctgtgcgtttcatctttattcgaacaataatttcattattttgctgatattatttaaattatagttaattacataaaaaaataataattatgattagggctgtgatttttaggcaaatgcctaaaatttctgcgcacttaatacgcacagataagcacgaaaaatgtattttccgcttggtttggggtgtctacgatgacttttataatgtctaactttgcctattttcaggctttttggaaaaatccacaacaaaaatgcaataaaaaaatacacccctaagaatcaactcgaaaatttttagaaaatacacacctaagaattgaaaaaaaattttcacaaaaattgatcccaaaaaattattattttttcatgataaagatttttgatttaaaaattatccttattcgagaaaaactttaaaataattgaaatataagtaaaataaagtggtttggttaagttttcacgtgttttgcaacctacaaaccgttaataaaaaattttatttgcctatttttgtgcctatttaatgcctatttagctattttttctgcctctttaggtgcctatttctcgtttttttttgcctaaaaatcgcagccctaattatgataaacagtaatttttttgagtgatcttgtcgatggacaacagctgctcatgaacatagagcttgatcaacttaatatttatattaaatatatttggacttttataagtttttatagagtttttaaattttttttgttctatttttaatattagtagtaatttttatgtaagattattgcccgcattgatgtcaaggttcaatttagatctgtagtcaacttgagttcgttgatttttcatatatttattatttggggatttgtaaatatttctatatatttttgccatttttaaaacatattttacatattaagcgactgttcttttaaatttaattttcattatataataattaaataaagcataatttgtagtgaaaatgtttagcaagtcaattaccaatttttgttaagattatttcatttgattatgaaattttaatttcaaactggtcttggcaaaaagttgtgttttttatgaatttaacaaatttgttagaataataattgggcattatttataaacaattcataaatatattcaaattcttaaattttaatttctaatatattattaatacatgaactgaacagtaatttgttaagtttcgttaatcgattaattttataaaaaatagttttcgcataaaaatttaaattcgtgttaagggcgatcgccaactcagcttccacgggctttttactccgccgaagttttcccgtcgaaattaggtttctcgtgtttctaataaaaggctaatagagttagtatacataaaatattttattttttattaaattataatcgattctacgaaagagttataatttttttatttttacgacaaatacatatttattctcttaagcaattaaattgggcgccggacttttcgacagaaatatttaaaatttgaggaggggacttttcgacagtaaagagtaattaagtttctaaattagaggtgtaaaatcgtaaaattttatcgaaaaagcaacaaaattaagccagatcagtattgagataaattatttttaaaatcaaaaattattaccaagaaaataaatagctaaattttggagattaatttttgagaaaatttttcattcttcttagaggtatatttttgaaaactttaggggccgattcttaagggtgtgttttctgaaatttttcattgtaaaaaatgtaaaaatcgtatccctagtaataatgatttagcaatacattttagtatgttaatttaaaataaatttagtaaaactgacaagcaatataattcattttaataagaattagttgtttttgtgtttctgtcgaaaagtccgggagccaattaaatttattttccaaaatttttaattattcaatatttatttcacaattcacatttttttttagtatttcttaagtttaatttacgattgttttaattttgataaaaattcaatatttcatttattttattttatttaaatttaaaaataagtcttttgcttttgcatttttataaaattttattatttttccaaattttgcagaattattttttcgattttattgttcattttttaaacttatggaaaaaattaatacaaatgccatttcctaatgtcaaatcgatggattacgtggcaaattctatatgcattaatattcaggcaatgatgacggactgtctcattccaatttcctggcaaaaaatatctttttaattttaaaaaaataaaaattattattttcttattttaaaagaatgtcaactttttcatttctgtccgtctgtttaatgttttgtgtgattttgtgctgtcaatacggttgctcaccagcatttgcccaaggatgtgtggtcggactgctcaaatgtttgaaaataataattaaattatttaaaaataaaaattgtgtcatttcgtaattatttatttaaacataaatatttttggagaggtcgttttattcttcttaatttgaaatttgtaaatgttgctgctttttctgttctgcttcaaaatttaaaattgctaaaaagaccaaaaaataaattcttagggaactntcatcaggcacatgataaagcaacatttatttgttagcgcaat

SEQ ID NO: 4483 - DNA, 4097 bp, Heterodera glycines
agtccatccaacaaatttttgagttttttgcattttttaaaattttctagttattttgataacgattattaacatttaataaatgataagaatgaatcattttatttgcaagttatacgataatcaattattgttggagtattcttactacttttagttagagtagagcgggaccgggaattttgggcaaacccgggaccgggaccttttcgggttgaaaaaccgggaatttttggctgggaaaaccgggaaaaaacccgggactggtcccggtcaaaaccgggacctcggtactcagttgtccgtgttttggtcccggtcccgctctactctacttttatgtagtgtatcaattttttagtccattgtttctcaaagtcttttaatgagttttaccaaccatgaataagcaacatttgcctaaatcctcttattctatctcaagtagcctcgctagcatactttggaatttttgaagttaataattattgttccattctcttgatttataataaaaattatcttaccagaataaataagactagatttattaacaaaataatctttcttttagatgaaaggttttatttctcgattttaattacttacttttttatcttttaatattcaatagtttatcttttaatttataatttttattttaaaataaaatatatcaatgctacttatttttattaagtcttaaaattattttaattcgaaaacatgcataataatctcaaccgtggataattaaatccataaatgtgatttttgaaaacaagtatacggattaatttgttgcatctcttttctaatttaataaatccagatctttagaaatagggattatgatatttcgacaatgttttaggtgcagttttttattttaactgtattttaaataaattaatgattactttttttaattaataaagtcttaataaatgatgttttatattaattttaatttactttcttataattaattagattaatattttaattcattaatatgaaaatgacaattgaaactttgagcatagtttatgtgaaaagttttcaaaaatttatcgtgacttcaatcccgcggaatcccgcgggattggcaaaatggtcgggagggatcccgattcgggatcccgatgaaatcccgatcccgagcaatcccgatgaatttaaaaaatcgctcgggacggatcccgaggtcggtatcccgaatttaatcccgcgggatcccgaagaaatcccgcaggatccctatcccgtccggtctctaatttaaaacctccaaaaaaaaaattcaatttctattcttttataaaatgacatgacaatttcttagttttttttttttgcttttaaattgctctttttgtggcacggtttttgaaaaaaactttttgggaacattggggggagggggagcggcagtgccgataggcgctgccggaaaaaaaatttgcaattttgagtgcgatttgttaacaaattttgtcaaaaaatgattttgactgagggttttttgaaaaaaaatgtttaagatttgaagaaaaagaacattttgccaaatatacctaatttttcaaaaaatcatgcgtttttgtcacttttttatcaaaagaccacaaaaatcctcaaatttctcaaaaggtgttgtgactggggagagtagtccactcggcttggaatattttttttaattaaaataaatgaaataaaatttaattttttctcaaaaatttctccttcatcaccaatttcctattcttttctcgaccagaccctcattcttaccagtgcaaatttttaccggcggtaccggtactagacaaaccggtaccggtactttgatttttgaaaaaaccggtaccggtaccggtaccaaaaaaccggtaattacctgccagtaccggtaccggtaccgtgcaactctagctgcaattgcgcaccattcattctcttcattcacttacacaataattctttccttcaataattaatttttggattttgaatgagtatgttggggattttaccaaaatgttatttttagagttttattcgaaaaaatgccttttgacataaaatcttatctctaaaaaaatatattaacaaataaattatacgtaaaaaactttacgacgaataacaataaataaattaacagaggcaactcaacttgtaccataattatcttcttaattaatgaataataaactattcgatgtaaaaatttagcgagaaataaaaatttatttgaattcatattattgaatatggtatatatttctaaatcaaaaagtaatattcacagaagctgttgaggcaaaaaatcataaaaaataacacaattataattcgcatattatcaaactttgatgaaaatcattttataaacgtgaaaaccataaatctgatataggtataaaataaaaccattaaaatatcatgattattttcaaatacatatttttaatcaaggtaatattaaatcacttcacaatgaatttttcacctcatgaaatattactcaaataaatgttaataatttacaaaatattttttaaacaaaaaataaatataaacttaaataacaatattctgccagcaatcgaaaaatgttatgaattcattggtctaatttaataaaaaaaatccgattaaaaatttgacatcaaaaaaaatctgttcaaaatatgcgggagcatctattaaaagataaagaaaaaattgaattaaattaattatatagacaatataatagaattcttatccaaaatcgtcaaaaagatggacatgcttagattatgggagaaggatacagccgttttggttgatctaattgataaatttaaaaaaatttaaaaagaaatcattcagaaaggaaaaatatttatttaaaaatttttagacataaaaataaatgagtatgaaataaataattgaattttagactaaaaaacctccttaaaatcaatagatttttttaaggcttatgtggcgttatataagaaacatcaccatcaattaaactgaaaaatttagtgatctggatcaatttatgaaatcagcgtcaaacgtaacagatactataatttttttatttctcggcgtaaagctgactgatatccagcatttatgtttaccttctttaatttttaataagttcattttcatttttattgatgacattttttcgtaagttatgctgatttttccttgcataaattccatcaatatgattttttattttgaaatattgatttcaaaaaatttctttatcgtcaaatcagcttttcttgagatattaaaaattcctttgttgtttttaaactgggtttatttttcgtttggtttgatttatttcttcctcattgtcgcatatctttcgtttatttcatccgctatttaaaatttaattgttttgttctttctttaaatattccttaaaaaaatgaacgtagaataactaaaaaattaaagttaaataatttattgataacacaaccttacaaattagggggttcttttttatttctccttggaatttgatatataatgacattgaccttaaaatatttttaaaatttctttgccagtttttatattatttacactaaaaaaccaaatatgcgcataaaaagccttaaaaactgccaaaatggctttaagccttcaaaaatgccaaaaattgtataaactttcaaaattgacttaaaagcaccaaaacaatggctaaggagctttttttgataattaaaaaaaaatttaacaaattttttttcaaaaagtttaaaaattttgattttaagggtgtattttttaaaatcccaaaaagtctatccttaggggatgtatttttcgtttttattgcatttttcttatgaaaatttgccaaaaataaacagaaatatgctctaaaacgcaaaaatgtcaaatatgcatttattctcgaaaagctccaaaaataagcttttatatgcactaaaaaccttcagcaaaacaaaaaaattttaacgtagaaattctatttttgtgccctttcttcgtaatagcatatgcgcataaaaatatgcaaaagcatataatttata

SEQ ID NO: 4484 - DNA, 4793 bp, Heterodera glycines
  unsure (1)..(4793): unsure at all n locations
aaataaaatttaattggtttgaatcaaggtaaaaaataagcaagtgattgaaaaaaaaatcagggacgtgtccaacagcgctcaaatgcccaaactaagctttanccaggctcttagcgccagttcagatttagttgtaggacccgtattacatttgtggaggattatggacttttttaaaataaaaaattaacaattttgtttttaattattgttcatcaagaatcaatgtgttttcacaaggttcatttaaaatggcaatgaccaatgacggggaggctaattaacgaaaaagcattcaattagtaatttatttttgtctttaaggagcgccgggctccagcaaatcaaaatttgcgcaaaatatcgccaaaaaatatgatggattcgtgttcatcagcatgggcgaactgttgcgcagaaaagtgcagcaaaatggggagaatgaattgtgggcaaaaattggcaaaaagatggacgccggagaaatgattcccatggtgggcgaagtccaaccttttttttaataaatatttattcaaatatgttattaaaaattttatttattatactactcgtataaaatatggtgcgtttaatctgcaaaatttcattaaatttcaaaaagttatgactaatgaaattcaaaaaattttggttttcaagtttggttgctttagcgtaaaattataagcaaaattttgtagtttttttaaataacggcatagcacctaaaaatacgccttaaatggttgcaaaacaataaattttctattttttttaaatcatcatattttaaggaaaacctcattttatttcgtaaagaaatttttcaaataccttttttaatctggcatattaaaaccaaaaaatgcactcactaatttactaattaatgccataatttgtaaattcactcactaatttattaattaatgccatcattagtgtgttttcgcctttgtcagagaatatgccgtgaattgatttacgcgtctgtccatgaacgctgtcccaacagttggggcttcgtcgtggagggctttccgcgcacgttggcccaggccgaggacatcgaggcacagctgggccacattgacttggcactgctcatcgactgcacggaacagttctgcaaggacgcgttgcgaaagcgttacacgcgggacaaggaggagggagcggagagggcgggtaattggggaaaaaaggggaaaagccaaaagactaatagccctaattgacgaacaattagccaattaacagcggataatgaagaaaaaaggggaaagccaaaagactaatagccctaattgacaaacaatagccaattaacaaacgaccgattattggagtataaaacccctaattgtgcaaccaattagcaatttgaaatgttgctcaaattaacatccagggaacgcccttctgatcaaatgccatttgcgcctatgtccacatcggttaaaaaaatgttttttttttcaaaagtagctaacctaaattaaaatattgttttacaaatttaaaatatttgaattaataattattttaaaaattctataagaatgcgagtatcgaatgttatcttttcatataacttaatgctttttaactaggattgaaaagaaattggaaccgattttggacatgaacttaaagcttatggtcctcccaaataatgcgataatgaatcgaaactctgccttagattaattttggaattaaattcggtcattgaatgtgaatcaaaaatgaaaaaaaagagacggggtggacaatcaagagtaattagtgaaagaatccaaccccaaaatttgaccgttttatttcttctaatagtcaatttgaaggatttctagtccaataaattttgaaatttttgaattttattatgttgtaataagcatgtttatttatttttcttgactcttaagatgatgacgagggcgtggtccgaattcgcatggcccagttcaaggcaaacactctgccgatgctcaaacatttggacgaccagggcaaactacgcgtggtacgcttggaaagagcggcacacattggggcggtgtctgaaatggcaccgatgggaaaggtcggtggtctgcggcccagcaaattagccaattaaaaacagcaatttttaattgtttttctttttggaaatcaaattacataaagttgaatttaaacgaaaaaaggactcttaaaattaaactctttttgataaattgtcaaaaattgccatttttagaaatattttatgattggcatacggcagtgccagaaagtgccgttggaagatttttgggtttttgacgaattccccagaagaattacgcataaatatcgccgtattaaattaaacaaattattttacgattaccaataatggccgcagatcaaaaactgaacttcaaattgtgtggtttgtgaaatgttcgcactcaaaaagaatgcacgagaaaattttctgttcaattacgacctgaaaacctttggttttggtaattatttgttcgactttaaaaacaaattataatgggattaaaaaccggagattccgggagtcttccatttattgttagttcattttgatttgacttgcaaattagtagttcattctttgtccctctccataattttatgtttatttaattttaaaaaataatgcccttttggacattgcgttcaacatacaattatggtcatatgtttagcataatttgcgcctttttgggtttttgattgacaaaaaaattttgagattttgggctaatttttttaagaaaagataggttttggtgggggccggcggtgccgataggcgccgcagtgggaaaattttaagaatttttaatgaattttgttaaaaaatggccaactgatttttcataaaagtcggtcggtggggcaattgaactttagaagaaggaaaaaataatggaagggataaccactgggccaccgacgctcacattggattaacattctttgtaaaggatattatatatcaaaaaggaaaagcttcatatctcggccagaagcttcatttagcaaaaataaaaaaattttataatacaaagggggggggggggggaggggtaaatctacctaccctgtaagtttcattcggaagtcccaccgtcacttgggtacctctcctttgtgaggatcgacctttttggaaattaaaaatatacccttgaaaatcgaaaaattttgatttttttgtaagaacttttggaaaaaaattgttgatataagaaaaatgtaattttgttttgcatatgataaaaattttaaaaattcgaaatttcgtatataaatttagaaaataaaaacgctccttagccatttttttttgatgttttaaaagtcagttttgtattttcacacaattttggcattttttgagggttataagccattttggctaatttttatggcatattttagtgcatatttgggcatttttcgagtttttagggcatatttggggtattttagtgcatattttattcgcttatttggcattttttagtgcatacaacttataaccatagttataagtgattgacacaaactccaattttgttttgatgtttttgtagcattttttgtgggttttcaaatggtaccattagttggacaaaaaatattttgccaaatgagtggacaaaagacccaaaaaaaatatatatatattttctaaatcccagcacaacttttacacatgaattggttttaatgtttgaaaagatctcacataacctgcacaattcacatttaaaggcaccaacttacatttttttccatgttttgtttattctaatttggtataattaaatattagagatttatttaattagatcgaaggcgacaccaatgaagaggccgtgttcattaacatgtgccagataattgagaacaccatattcatacaaggtggtgaattgaatgaatttattcttattcattttctgagtcgcctccggggtaaaattgtaatttttgtttgaatttgttaagaaaattgatgtaaaaaaatgaaatccattatttctttatttttttatatagaaaaaaaattttttcaaattccttaagagtctaataaacaaatattttacaacaaaatgaatttctctcaacaaactatttaaataaagaatggaatttttcttaaaagctcttcgaaatttttaaaaatttaaatttttacgtatgtttaaaaatttgtgggacttaatgtatactcaaatttgagcaattagttaattgtttcccctctttagatgatgggaacggcaaaagtttggagtcgagcaaacaaaattcggcggatcttttgccgtcgaccagtgaagctcaaaaggcgaaggaataataaagcaataacatttaaagcaattaattaattactcatcaaaaaatgaatcatcacacattcttaatgaatttttatttctaaaatatattttgcacgatggaaaaacatggaataaaagtcaatcatatgtattgcgctcgaagcgcataaaaggtttcgcccacttttggcattcgcgggttcaaacgatggatgctttaagaaaaaaaaacaaattaaaattttgccgaaatttcctatttttatattcccatgtttaatgtagaatttaaatgaaggagcccagcgaggtcaccttcggagaattgggatgaaaaatatattttccaaatttttactaaattataagaagcctaattttttgaccagngctgtgtttttgaaaaagctcaaattttta

SEQ ID NO: 4485 - DNA, 4503 bp, Heterodera glycines
ttgagtttccatttaatttatttaaattttcatttaaatgataaaaagaatttttatttaaaaataaaatatttttatttcaataattaattagaaaatatgcaaatgtatgtcggtgtcagtctcctttaagcaattttcaaattggcttttatggcaaaatgctaatttcaggcgtcctcctaaaaatatttgcacaacaaattgctgcaaaacaaaaacgttaactgtttgcgacagctcacttaattaggtatctctgtaaaatatatttatttgcgctttaaaaatgataaattcatatatgtatttataaaaattattattttttttttaattttacaaattttttattaaacaaatgcaaaggcttttcaaaattaattcggttttattagagtttcattgtcacgaataatttttttcaagaggaaaagctcgcattaaattaatgtatgctaattggcatgataatttacatttgtggcaaaatctcatggcaaaacgtataaatgtaaaggtacaaattattttacaacttaaactttcaaatttatttatatttttctaaattatttagaaaattttcttttgaaaatatgaacctttttgtatggtctttaaaaaaatgagaagaacatttttagaaaaagttttttttaatgaaaaattacgaagcgttggcatttaactgaactttactttaacattgtcatttagtctatcaattaatttaacaaaaatgccgccttccattctggatacgtccctgcttccaagcaaatataaaatgcatctgtgcgccgaaattgaataaatttcaattttaattaattgaatttatttttttgctttaaagaaagttgaatgaacaaaaaacatggataaaaatgccgatataataaattaaataagaaaatattgtgtaaaacttaacctcaatggaatgaatattcaatggaaattcatttaattaatttgaacatttaattggcttcaattttatggactaattaaagtcaattaaaacgtttaattactttcggaggatgaattattttttttttgaattataattgaagtaaattggtcaaacaaaaatttgtacccacccaaaagggccgccatcatttaaataatgaaataagaaaggcattcaattaattattcacgtaaagacaatgttaatgttaattactcagctaattgtttccgaattttaaagtttatgcattttatgcttaagaatatgaaatattttagctcatttaacgtgtcgaaaaatttttaataatgaattgtcaacacaatggggaaagcttacttgaaaaaagaatcaagaaaaatttttggcactttcattttgtcaaattcttaatcaatttttttttctttaaaatttaggttaatatccttttcagcagttaaaattgtttttatcgtgtcgataatgactttgattccttgaattatttgtcgcactgcacgtcatactcttaaatgacttttgaaaaatttgaaatgctttctgggatgtattaattcttctgatcagatgttcaaaatttgcctggctgactttgccttcctcttgggcaaatgtgaatcccagaatgaagcggattgtggcagaaagtgggataaaggaaatgggagaacagcagtgaacgcctgtagctcagtcgttttcagcattctacgatattgaaatgccgtaggttcaatgcccaccgggcgagttaaattttatatttcttttaaattttattgcaaaaaacattttttgttgattttttattaaattttcaattgtagaccaaatgctgtctttgaaaattttcagttgggagcactgataatggtaaacctcgctaattgcttttgttaaaaaggctgaaatatttactcacattaattgccacaaaaaatgcatttatatattttattttatttttgctttgctgcaaattaaatctatataaaaaataataattaaatatctaaacaaattgacttatacaaagtcactaattattatacccatcattttcataggtttcactcatcgacaattaaggatcagatccagaacattggacccatcatcggatatctgtcgccgtcattatgcaaaaagtcacgcggatcttctaaatttttatttgtttaattttaccttggaattagcagctaattaattcattagctaatcttttgatataattgttctcccctattaaccattttgttgacgttcggctggcatattcattatgacataacgacatattgggcatgaattattcccaccttgaagccttaaataaataagaaacattcgttcgtttgagtcgtcaaaatttaattatatgaaaataatctaattgagttttcaaaaaataccaagtgcttaggcaatcttcatgaaaaatatgctaaaaaatgaaattttaaattttttaaaattctaaattggcttaacattgcatgctggcaaaggcttcacacttgtgccactcggaattggatcaagacaaattgcacaatcgaattcagtgccaacaattgttgacggaatttcgttgaaagcatttaataagcctaaaaaatgttttaaaatgactaattgcccattcttaaaaggaattttaagcctataaaagtgtatctgtccattattattgacattattattattttgcaattactcaaaattatacgtcaaattaattatttaaaattcatataaattattttcgtacttattccattaattgtttgctgcgtttgatgaatcgccgccattggcgcccgattaaaaaattggttgattcgcgcatggaaaaatataaatccgagagtaattacaaaaaccgtgaccaaaagtgccagtaaaattactaaagccacatttaaaagtgaaaatgctcttctgtgacgtcgaaatgagcctaaaatacgttaaattgcttcatcctgaaatattctcaaaagaaatgaaaaagaaattcggcacggaataaaaataaaaaaagaaaattttttaaatcgaaaaatcaaaaatcgaaacaaaaaattgttatgagtacaaatttctgtatataaattggtttggattaaatgggatttgaatgtttttatggattaactctcatggaatattcaaaattaattattataaaaatagaaattctaaattaatttattgcacgttttcgtctctttgccgtgccatcctcgcaaatttcaattgtttttgccacaaattgcaaaaattgctttgtccgctttttctcgttaaattttttgtcattttcatggtatttcgtgcaattatgccagcatttattgtcattttgactgcatatcttgacctaaattaattttaaaaaagcaattatttatttaaatcaataaaaaataaacaataaaaaaaccttttccaaaaaatgactcatctctcgcaacagataaatttgaccattttctgaccaaaaatcgaagttacttcgttcgtcgaattggatttggagacgttttgcaacaaaattaattacaaattttaagcgctgtttcaaaatttttatcccaaatccatcaattttatctgaatttaaaaaaaattcttattttatattattataagattgactacaattttacctttttctattccatttatcacgctcattacagaaataattagtttgtttaacagttggctcaacggtgggtcattgtgataaattgataggatacggtatttgatcaaattgtattcgtgattatttgcaaaatattcaattgaatgggaagaattctttaataaaaaaatttcaatcattttttaaataattatttttactttgattggttcatttgctgagatctttttcaggatcaaatgaagtttattcatttcacagacaatgttcaccagtttcgcatctttttcgacattgttttgtccatctttttgtttataaaatttaatttgaattgaaaatggcggtattaataagtatgatcaaattaaatactgatcacttctgatcaaatatcataaaatcacctttatacgttcgttttatgctttcataaaccgaattggcaaatccttttttgtcgattgattggctttgctcattattattattgcattttaatgagacaatttctgttgattttgcataacaaagtgatgaaaatgtaagcaaagtaaggagcattaaaatgcaattattaaatgttttgttattaatattttataaaaaaaataatattttgatttaattaaattcgtatttatataatgtaaaattttgttggctttcatgtatttccgtctgaattctttgaaaaaatgaatattataaaatttttgcacattttattcacattttttaacaaatgatgaaataagaaaataaattacaaaaaatttgatgctgtcaaattaaaaaaggaattaattagtaaattaattcttttcatagaaattta

SEQ ID NO: 4486 - DNA, 2411 bp, Heterodera glycines
  unsure (1)..(2411): unsure at all n locations
aaaaaagtttgtatcacccntaatgactaaaatagagaaaccgatggggtgtgcatttattttggggggattcggggaataaatccatttttacgttatccatttttttcaaattttaatcctttcaaatttttcttttattaaaaaatgtttttatcattgaattggttctgcggtttgaaaaggccatgcattgaatttgaatcccccgaggcgaataattttaaaattgattaataataataatgatatttaatttttcaaaattcagcgaattttagaaatacctagattaactgtgattattagaaaaaaaacgtacaattgcaaaatttctaattggggatggaaaattcactttggaggccagtcacattatccatccatcgatttggcctctcaattgttggatttggccacaattcgcctttcccgcccaattttggcattgcatggccattcattcatccacgacatggcactaatctgcctcactatagcgatcacattatcatccatcgattttgccacagccccacattttaatttggccacaaattcgcctttccccgcccaattttggcattgcatggccattcattcatcgacggcatggcactaacctgcttcattatccatccatcgatttgccacgccccacattgtttggtttggcttcaaattcggcgccccccccccctccaaaattaggcatttaagcccagtttgcccctactaaaatcaaactttgccaatttgttcgatttggcatggcttctctccctgtgcttcttctctgcttctgcccccgcttttcaatctctataaaaaaattgcataaataaaccaacctgctctcttccctcggcagagcattcaattttttagaaaatctaataacaaaatttgggatttgaaaaagctaaaaaaactccatccccctaactcaacaaaatcctcagcctccatattttgtttccaaaagggtagggggggggtaagaattttttttacaaaatttttctctcttaaaaatgacaaaaatccggttctattgcagtttagactagagttgagcggtaatcggtaattgcaaaaaaaccggtaccggtactgaccggtactgcaaaaaccggtaccggtaccggtatcaactttttccaccggtaccggtaccggtaccaactttttccaccggtaccggtaccggtaaaaaccggtaattttagaacataaaaatttttggacaaaattttccaaatacaaaatttttattcagttttcgcgcgagtacctgttttttagcattagaattgttcagaagtatatgtatattcaggttgaccaagttttttttttcaaattcaggacatagaacactaaaattcagatatagacctcaaaattcagattattgcaaaacaagggatcagcggccaattttccaattttgcgaaggggtctccggccatgtaaattattctatccaagtggggaattgaacccaggcgaaaaattatgaaaggtagaaagtttaaccactacaccacatgtgcatgtgtgtaatcccatgactaaatgaaataaaatttaattttttctcaaaaatttctccttcttcaccaatttcctactcttttctcgaccagacccccattcttaccagtgcaaatttttaccggcggtaccggtactagacaaaccggtaacggtaatttcatttttgaaaaaaccggtaccggtaccggtaccggtaccaaaaaaaccggtaattaccggccagtaccggtaccggtaccggtaccgctcaaccctatgtacataggacataggcgtatagatggtaaatattttttgtttgttttttaaataattaataaacaataaaattcactatgacataacaatagttcgccaatcggtacaaattagccgataaaacttttttttgttataccttatgatactgatgagagacaaatatttcgagtctcgaggcacaattaatcatgagccaggatcccactctcgcggatggaaggaggtgattctcggttgttatctcgggggaggggggtggaggtttcggtattaagccattaagaaaattattattttttaaagcttactagacattattaaacaaataaaatttacataactcttattcttttatccttcaaatcaaaaacatcaaatttgcaaatgtaaaattaatttattgtaattaaaattatatgatcaaaattctggtcgaaggtctattcacttcatatgacctgacctgctccgaacagatgctgagctcctgcgttttcgagcatttgaccgcatttgaagaagaaagttgatttctagtaattctcttagaaagctgtgcaatttcatttgctattccattaatgactccg

SEQ ID NO: 4487 - DNA, 2256 bp, Heterodera glycines
tttaatttattatgcttttgcaagattcgttttatcttttttgggacattaatgaaacattttcactcaaatgaattttggcgaatatccaagcaaaaaagcgtggcgcaatttgcttctgatcagttggagctgcgcgatcagcggcacatttgttggctacgccacttccagcattaatggtgccattctgttcatcgcgcgcgacatgcaattggagttggtcggcatcggcttgctgacctcgtgctttgaagttgaaagcacaaaatgagaaaaaataatagaattaaatttacacttaaatacattactcatttcaatgcaatttaaaattttattttttttgataacaaatattttttaataaattaatttaaaacaatcttctcatttttttaaaatacatttttttgaaccttttcttatcaaagaaacaaagaattatttccattttttaaaatttttgcattaattttcattttcttttttttgcaggaaggactattttcgcattattatttttgacattattcagtttgtttttaatttctttcaggttggtgctggcactggcagcattttaagcggaatcattgcggacaaattcggacgaaagcccactctgctcattgccgatctgttctacatcattaccatctccgccactgcgatggcaccagatttcatcgtacaaaaaaatttttttaaaatttaatttgctttcgtttacaattttttgtgcaccttttgattgtattcaggaaggacacccacgtggttgggtagggggggccccagaatttttttatcacttccataaaaaatattcatgaaaaaaattccttatgataagaaatcacatacaaaaaaaggtaaaaaaaaatttctcagcggagaagaattactgataaaaaataaaacacaaaataattatcattttttaatttaaaaacttttaatggttcatcaaaaaacacaaaaaacaactataatttttaatttgcaaaattcattggtttcatcccaggggcgtaaattttacaatttttgattattttttttattttgttaattttgattgtttggcttagtctctggttctgtgccgtacgatgctcggcttcgcctccggcgcgatcaatgtaattgcccccgttctgctggccgagttctgtacggccaacacgcgggcacgcgcactgaccggcaatcagctgctgaacacatcaggcgaggcactggtgttcatcgtgggcgcactgcttggcaatctgtggtttgacaagtgagcaatgcgagcgaagaaattttattccttgaaaatcaaacgataactaaaattctccattaaactgctaaatttctaaaaaaagaatctatggccaaaactgtttaaaaaccaggttttttcagactataacacttatttacttttgagcaaattagcggataattatttgtaaaaaatttgttttgataatttttgatgagtacgacatagaccgacgcgacctcgagaatccatgtcgagaccaatatccaaaagcccgagacttttccaaaaacacgagccttttctggaaaaaacccaagaccaaaaaaaaaaccccagaattttctcgggtcaagactcgagaccgagactctcgagaatcatttatcagtttggatcactcgttcatttgcagttcctccatttggcgttggatttattggctggcagtgccacccgccattttgttgctcattttgcatgcatccgttgtgcccgaaagtccgcgatggctggccaaaatgggtaaaatggaacggtcgatggaaatattgcgcaaaattcggcggacaaatgccgagattggcaccgaaatgtggtcagttttggtgatgaaaaatgaaatattttaatgaaacggggacaaaaatttgaccaaaaatacaaaatttaatattaaaattagaggccgggtccggtaccgggttttcccgggcccggcaacccggtccggcgatttttggaaaaatccgggttgaccggtttaaccgggtgaccgggttttgagaggccgggcccggaacccggttacttctaccagcccggcccggcatttttggaaatctcggtctctaattaaaattatgaaacatttaagggatttcatgttttaaaataaaaatatcacaaatttttattatttaaccttttatcgtttcttttaaaaaaattaattaaatacttcttttagtgaaattaaa

SEQ ID NO: 4488 - DNA, 3831 bp, Heterodera glycines
  unsure (1)..(3831): unsure at all n locations
aaaaatgcactcttaaagaaatgaaaaattttgtctccaaaaattttttgtgtntaattactagggatggattttctaagttttacttatttttttctgcggctttaactcaacgagaaatacacgaaaaacacattttttgtctgaaaattttgcattttcacgcccttattcgaccttaganatccttatttttgatgttcgcccttaaaaatccttattttggatgtttgcccttaaaataattttttacccttagtactactgtacttgttgtcttactgacagtatgaccggcttacaaaaagtgccacattgttgcactttccctttgatcaactggcatagggcccaaagaatgagtaaattgggtgactgacgttacaaaagtgcatttcaagcccaattccttggccctaatatggcacggcatacctctttccattttaagacacgtggcagcaaaagtttgtgcagcagccgacaggacgagagcgcattcggtgcggcattttcggcagggatgagaggcacaatttcgaacaaaagttcgagcggaaggcatttgggggccattgttgggagaagcatagttttgttatttggggtaattagtgagcaatagctgattagcattgaacaaaaaccgccgtcgtcgcattggcactttgaacttggtttggctcgcttcgtcccggcactaacaatagcagcagaaggaatggccgtttttcttttctctcatttgcgtttgctttatctcttctgctttgtctgcctttttttttcgctctcactctctcctctctctctctctccttctctctctctcctatgctctcttcactctctctcttcactctctctctctccttctctctctctcctttgctctctttttctctctcttcactctctctctctctcctttttattgtctctatgccttgcgttgcgttgcgttcgtcgtttcacaatgattcggtcgcttttcgtggtcccccaaggggttttgtgaagtgtctgctaaactgtctcactttcctcttcttctaacgtgcacactccttgtctttgcttctctgttctcgctttttctctcctggggcaacactctttgcgttctctcgcctttccttccgttgtctatctttatcacttattcgttttgaataggagagagaatacaacctttgtgtttaatgtattttctagagtccggaccgggccgggccgggtaccgggttttcccgggcccggcaacccggcccggcgatttttgggaaaatccgggttgaccgggttatccgggttgaccgggttttgagaggccgggcccggaacccgatcgtttttgaaaatccaacccggcccggaacccggcatttttgaccgggttttaccgggttatgatttagccaaaatttgttctttttccattcgaaaatctctttggcataatgtttataaatgttttttgtcaattttctggttaaattttttcattcgaacaattctactttatagaaatgagaatttacttcttttttctttttaatttaaagataatgagtcttatttgggaaattggcctatttaaaaaacgtcaataaaccagaccctaaaaaatcattaattttcgtgaaaaatttgctcaaaatcgctaaaattagtcctttttgggcaaaatctgtcaacaaatcgcattaaaaatttaaaaatttcccctcggcggcgcctatcggcaccgccggacccccttattccccaaaaggcttttggaaaaagcgccgctgtaatagtcccttttcgaaaatgttctaaaacaatgtaaaatgaaaaaaaattttgatgaacatcattgaataatttttcaagcaaatactaaaaaaataccaaaaaatttccgatttcgaaaatttggtacctatgccaaccctgatgcaaaacattatttattacaaaaattcagagcgcgaggaaagttttctaaaatttacttcttggtttttctcttatagaaaatttaagattttttttgttgaaaaatttgaagttataattgaagatgtcgatttattgacgcctgaagtgaaatagagcagaaatttaacgattgcccgagctttttttgttaattttggagttgaaatatatgtgaaaattaaaaattttaccgacccggaacccggtcccgggcccggcaatttgaaaacccgggttgaccgggttttgagaggccgggcccggaacccggttacttctaccagcccggcccggcatttttggaaatctcggtctctaattaaaattatgaaacatttaaggaatttcatgttttaaataaaaatatcacaatttttattatttaactttatcgtttttttaaaaaattaattaatactttttagtgaaattaaattggtgctaaatgatgaacataagcactttaacagtgggggcgtaaatgtgctaaggtcagtgtactaaattcttacacttttttttgtcaaatctcaagaattttatgggacaaaagaaaagggggacgaaaatcaaaaaatgccattgattaaattgaaaaaaaaaattttccaatttatttggcttactatttattattttgccaatttgttcattttaaatgctcaaatctttttttgccgtttcagtcgtttgggcactccgtgggtgcgacgcgtgcttttgttgggcattggagttgccataatgcaccagggcaccggcgttagcattggcatgaaattcggcactttcatgctcggcgaggctggcctttcacaacgaattgcactccttttgaacattttgattggtgttcgttttacatcattattagagaccgacttttgaggcatatgccttctttctttctttttttgcattttcgggattttcatgccctgtaatgacttttttggcgctttggtgttttcatgccttttttcaattttttggtgtttattatagtgactttttttgcgatttttggtgcctttttagtcaaatctctaatcatttcgacatatttgattagattaaactttttacatcattgggttaattttttagaagtcagaaacgtagaagtttttggttagttgtgtcgtcaattgaaactccaaatttttaaattgttttcacttttttcaaaatttaccatttctaattgcccccttttcttcgacaaatgcctatttccggcacagattgtctctgtggtcgcaatagtctgccggactttggctggtcagccgggcatcgcttcgtcgcatgatggttgttgcgcagattgtcatcatttgtgtccatttttgcattgctgccgtgtccatttttctttcaccggatttgacccgcggttggctcaccttgggccttctgctcgtccttatgaccgttgtgcagggaatttgtgcgccagttgacaggggggagggggggggggggggggggggagcgtcaaggaaaatcccggtgattatcccgacatttggactcctgtgaaaatgcagtagacaaaatatattatggtaatacgtaaaatatactgatttgattatttttactttaccatccattaatgagtcgaataaagatgaggataactgtcgttataagaatttttgaacttttaaaaagctcgaatagacatatctagtggttttcgagggcgttgaccataaatttgagctaagaaaacttaaagcgaaagcaagacataccttttcatgtgttcgaagtgatccaattgcataaatgtgattttattgagaataggatttcaacattctgttcacattcgtgtcc

SEQ ID NO: 4489 - DNA, 2176 bp, Heterodera glycines
ttcacattcgggtccgggttttggaattggtcgaaacatgtcaaatccatgaccagcgagctagaaaagctctataatcatgcttttacaactttttaatttccaaaaattttcatataagggaaactgaccacaacaagcttaaatgtgaaatcagcataataccgtatcattttaattcagtcttttgatgaatgaaatattccccttggatatgcgtggattcggaaagggcgtcgccaatttggccatttacggtaccgcgtgcgctctcgaccaaatgtttcctgtaattagtttttttttgccaatttttcatttctattttattttcgcagatttttctcaaccaaattggccaaccgcagacttttgccatttttgcgctgatcggtttttgttcactgtttttcacgtggcgatgtttgcccgaaacgcatggcaaatcattggaggaattggagaaacaattcaaattaggcgattggaatgcgctgaaaaagcgccggcaaattcacaaaacttacgacgcagcgatcagaacagcccaaaatggatcaatcaataatattcaaatcaattgagaacagcagggtctcctccgtattttggccatttattataataatgaattattttggtgtttttttttgggaaagccgtaatgaatccaaaaaatttaagcaaaattcgaatatttaatgtggcataagatttttgagttattatgattgttagcaattttctcttttttaacataatgtcccaacagaatttatcagtacgttccggtaaaaaggcatttaaaaaattcatcgtttttgaatttacacagaaacaaattaagcagcaaaaaaaaacatgaacaaaattgtcgggagggatcccgatgaatttaacaaatcgctcgggacggatgccgaggttgggatcacgaatttaacaggatcctgaaaaaatcccacgggatcccgatcccgcccggtctctaatctaatgcacttctatgacataaaaatatatattataaaaaaaggacaaaaaactttttcactttaaattaaatctaaccaacatcggcggtgcttgttcagttgccaagtgccaatggaattaagaaagttatcaaaaaaacgagtaattgtttcgaccaaaacaaaggcttctcggactcgcacctgcaaaatttgtctacagttatcgagcgaaaagcttaaaactgttcataagtgaacccaattttcattttttaataatacgcccactaataaagtcaggagtctgatctccaaaataaaagcgtaattactaattttgaattatacaactttttttgaatattattaatagagcttgcattttgaggcatatgcctattttctgcgtactagtttcgaatattaagttaaaaacgcaatttgcaattggtttaaggcttctaccttgacttttattatgccttcctttttcgtgattttcgtgcctttaatgccttttttggcattttgccgttttggtgcctttttagcgttttttccgaaaaattccattaaaacacaataaaatcgggaaaatacacctctaagaaatgagtttttttggttaagttttacttgttttgctccctaaaaatccttaataaaaaattttttaatgccttttttcatgcctttttcgggattttcgtgtcttttcatgcctttttttcaattttttggtgcctattatagtgcccttttcgcgatttttgtgcctttttttgcgagctctagttattaaatatattttacaaaatgctagatgaccaatattattgttagtaagtttatttattggattgtggtacagtattgaactcttcttttagtccaacacagcttctccggttcgatgttattaaagtgtttttatgtccatcccaggctgcgggggtccctgtttccgtggatgggaaaaacgggacggggaagtggatggaaactctgtgtctaccctggttgggccccaccatgtttttggactataacttttttctttgtcatccaaatcaaacataattggtatcattccaaagctcttcagatgctctattagtctgaaaaattccaaaaaatttcgtcaattttgaacaaatttatggccaaaaaggttggaaaatttggttgttgaattcttc

SEQ ID NO: 4490 - DNA, 2061 bp, Heterodera glycines
  unsure (1)..(2061): unsure at all n locations
attgatttgttaatattgtgattncattttcttaaaaatatctcgaaaaaatagggtcatccaaataattcgttgagagtgagtgcttttccaaattgtttcctccgtcatcgtcaatatcctggtgccaatcttggcgttggacaatggtcgcacgaccctcctgcgccggcctgtccgacttggcctggtagtcctggaggtccgcttggcccgggtggtcctgcaaatgacacggtgactcatacaatgctttttcctcttaccccgctgtcccggctctcctggcggcccggggggtccattctctccgtctttgcccacctgaattcgcacattatttcccccctcttctcgggatttacctgtcccggctttcctggcggacccggcggtcccttaacgaatcgatccattggcatttcgtcctttctctctttaacttacgggtcttcccggctgtcccggtggtccttaaaaatggtctttttcttttgtgacttctcatttctcacctggcggtggcttttctccaggaattagctgtcctggttctcccgggggacctcgctgtccttaaattgtttgaaaggttttggcttcgtttgtccttccgttcgtccttctccacctggtggtcccggctgtcctggcggtcccactggacctgcgggtccaattggccctgtggctccgtcttctccatctgtggccataattaataatcattgtcactttctctcggttactcacttcttcccggtccaccggggaggccgtcgttgccggggggtcctttaatggtgtgactaatagcccttcaattttcccttcctcaccaggtggtcccgggggtccgggtggtgcttggcatggacattggggcgggacgggcagcactcggtcgtgcagttcggcatcgactcccggtgccccaggggggccagggccttctcccggggctccatcctttcctaaattcgccggttttgaaatattttgttgagtaaaattggtaaccagcttcgccgggtgctcctgaatgaatttagttagttaatgcgtcgcgttgacttggttttgctgtgtttatcaccgtcgggccctggtggtccctgttggcaggtgcagcacaaagtttcgtcttcggcttgacgccgttggcgacgtgccattccgagcagttccgtcaccatcacttcctcctcggcacccctcttcgatggtgtgccgcccacttcgtcctctgtgtccagcgttgccatctccacatcgaccatttcacgccacatgtcccgggagcgggatttgcaatattccacttcgccctttatttttttgttgcgcgtcggtgagagaaggagacaaatcaaaggagggaccgacctgaaccgtcgcctggagagtttggacgtaatggaagacgagcggaaaggtgagcagacaggacgaaatggccaccgtactgaacaccacggctgcaaaggcaaccgggcggagagtgcttttgcgggggcattgcttttccggggaaatgtccgcggaagacgaagaaacgaacattgccttgggatactgatggaccagcacagagagaagcaatttatatgcccgattcaaagctacggcaacaatttttctttttgtaaaaaaaagaaaaaagagacaaaacggggagagatgcaaagagagagaggagagagagagagagagtgggggagagagcgaggggagaaagagagagacaacagggggaggggcttttcctcacaaatagtctaatggatgtgtacgccttttgaataaattggaagacgaatgaatggaaggaatgattctgatcactgaagctgacgacggctgcggggaaaataatgacggttgagacgatgaaacaccactttgtccattgacgacgaaggcggaggaggaaaagcaaaagcctgtgggagattgcctcagggctaaggcagtcgcttttggtggaaagcaatgattgttttgcgcaagtcgttggaaaattggagggctttttgggagaaagacggggcgcagtgcgaa

SEQ ID NO: 4491 - DNA, 1342 bp, Heterodera glycines
atatatatttggtcacatattttgctatataaagaaaaagaaaacacacaccacaaatttatcaggtcattcttctcattaacatgaaatctaaaaagtgtaaattagaaataaatagttataaaaatatttaaatatcttatgaaaacaaaatgaaagtgttcttttaggtataattatagtaatttaagttcatctcataaataaataaaaaggttaatgaaaaggagcagctaaatggggggggacgaacggctgcagaaacggagggacggcggacaaatcggggtccggacaatccgtcagtggataattcgtcgtggtcaatccgtcagtagacaatccgtcagtgaaggacaatccgtcagtgaaggacaatccgtcagtgggtaatccgtcagtggacaattcgtcagcaagtttttgtttgagcaatgattaaaaatcttgaaaaaatgattgttaaatttaataaatatattttttttagattcttaacatttctagttactttatatttcaattaattgaccatatcgagaaattatcatttaattcttttaaaaatggttatttcatatattttttaaaataacacaaattattaattcagatttttagcgaattaaattaattttcacatgattttaaataaatctgggtattttaaaaataaatttacttatggattagttactgacggattatccactgacggattgcccacttactgacggattgactactgacggattgtccactgagtcctggagccggacaaatcgaacgaattacgcacttttgggaaagtgttcagaaaagagaattgaagcgagaattaatgacttaattaagggaatgtacctaaccaattaaaaaaagagcaaaattcgcccaaggcgacaaaatgtgccgggtggcaaaacaaacaatggacaaaaaagttggatgaatgcatcttgtcaattacactaacttttttatttttgaacaaaaaagcataagttttgcttcccctcatttatttatttaatttttggtgataaattattattttttatttattttttttattttacttttggtgcaatatttgagtccgatagcaatttttggtctttcgacatttgatattgtgaaatggaacaattatttatttccaatggaattgtgaactgttcatacatatgtttagttaagctgtgtttattgtcatctgctgctgcggatgatgtgtgctgctgttctcagttctcaccatcagcagcagccaaagtcatggcaaagagaaagtcatccgtttcacccccccccccctttatcctcctttctcctctctttc

SEQ ID NO: 4492 - DNA, 2490 bp, Heterodera glycines
attaaaagtttgaagaattctgaattttttcaaaattcaaagtgtttttctcccccgtctaacttttttttgtcaatttttttcatctgagaaaccttttagcctgaattgatcgcttattggggttatccagtggaggtgcacacagtgaccacagaagacggatatgtgctgcaattgcaccgaattccctacggcagaagtggcaacggtgtgattgaatttgctatttttcggcaaaattcccccccccccccaaaaaaaatgtcaatctttaggccactccgccgtgccttcctcgccccgtccagttttcttccttcagcacggtctcattgcttccagtgctgattgggtgactaatttgcccagccaatccttggcatttattttggctgatgccggcttcgatgtttggatgggaaatgtgcgtggaaatttttactccgacgcgcatatcaattggacgaaattggagaaaaaattttgggaatttacgtgagtgagccaaacaaagcaatggtcggaagaagaacaatttgagatgggacgaaatggcattcaaagatttgccggcaatggtcgaaaagtccttaaacattagtggccaaccatttctttattacgttggccatagccaagggacttcgattattttcgccaaattggcatcggaaaacgaaacattcgccaaaaaggtgttacttttttgtttgggaagcaattgaacggctttttcttcagattcgaaaggtttttgctcttgcgccggtcgcttcggtgaaaaacatcgatggtttaatcgcctttttgggccgttatttcgggaggaatctttgggcgagtgccgccgtctctctccgattgtttcaatatttctttgctcctccttaggcgcttcgcttcgttttcggcactcatgacttcctcccccacaattggatgagcataatgttcgccaaaatcatttgcggaatgagttggcgaaatgttttgtgcgaaaatgtcgcctttcaaattgccggccccgaaagcaatcagatgaatcaggtgggaaaaggaaaagcggaaggaaaagctaagctaactaacgcagagtcggctgatggtttatgcggagcatatccccgccggcacttccacttggaatatcatccattgggttggcctaattaacaaaaacaggaagtaattaatgatgggcaaacatcccaaggcacaaatgcgcaactcgggaaagatgcaaatgttcgactttggagacaaacgaatcaatcggaaacactacggacaggcaaatcgcagattaatcccagcaaagtcaaatccgatgacattttgcaggactctccgccgctttacaatttgagtcgcatttccgtgccgatttatttgtattacagtgacacggattggctggcggatgctcgcgacattgaggtgagaaattggaagaattgggaggaaattgcgacggacgccccctccaacaaaaggaaacgattctccgctcggtccgtccccaattcatcaaaagggcactgaaagtgaccaagtttaatcacttcgacttcgtttggggactgttggcaccggaaaaaatatacaaagaaattattggaacggtgaaaaggcacgaaaaagcgattggaaggaacaaaaactaatttaatctctttttttaataatgtgtataaaaattcgactattttcgcaattaatcccttttccattcaatgattgacaagtcaatccaaggacaatccctgcgcaaaacggataatgtcctcgcccaattctttggggcattcgaatgccgcgaaatgacctccgtcttcaaaaagggtcatttgggtgaggttgtactgacgagagaccatttcacggggcaaaacaccgcccaaatcgtagggaaaggcggcgtacgccgtgggcacagcgacgtattttctgaaaataatgaaaaaataaaattcaaaaaaaactaatttataagcattcgttggacctgtacagtttttcggtatttgaatcactggcgaagtgttctttgtaatagcgttgcgaggagagaatgtttccattgaaccagtaaattgagacaattgtcaaaaggtcgtctcgagtgaattttctaaaaatggaatccaaacgaagaaatttaaaaaaagaattcactttccgagtcctccgtctgccaatttcaaaaatgaagggtttgtccaacatacgaatttctctaaaatataagccaacagacccaacggagaatcattcaaagcgacgccgacggtgtcaggtttagtggcctaattacaaaaaaatttaaattcaatcggaaaggattttaataggcaaaggcaacgaaatcgccagttgttcacctgaatgtgcatatatccactctcgcgaaaaatgaacgagaaaatgccggccaagctgaaagttgggacgtctggcccggagaatatccaacgggggaccaaagaa

SEQ ID NO: 4493 - DNA, 776 bp, Heterodera glycines
ggaaacatgctttcatgccttttgaacaaaaaaaaactttcaaaaaaggggggggggggtaccatcgacagtattacccaattccgacttgtaagccttcgatttgcgtccggaaatggtctcccattgcgttcagctttttctccgcttctctccagtcgtactcattcagccaccggtccctccattccatcaattctccgatgggaaaaccatactcaaagtcatgcacatcctccagctgttcatgtccaattcgacatttggtcagcctgtccttcagaccagccaattctttgttcgacacattcacagagaacggaacgatggacagattgtcgacgaagggattgccccgcccgaagaagccgttcagagggaagtcgacctgaaatgaggaaattagtgaaccgcccacaaaaatggcaattgatataccaaagagttgtctcggagttaagcatgaaaaatatgatttataggccctaagctgcaatatgtcgccggtgcggaaatgaaatattatgagatttgacaaataatgttaaaaaacattttgcaaagataggtttaaactttaaactcatttccgcaactaaagacttatttttaatgctaactcattgagactaatcgattggtaattatcatttgccttattaatgaaagtagagtgccacgggaccgggacttggtagcggacaactgagtaccaaggtcccggttttgaccgggaccgggactagtcccggttttttcccggtttcccagccaaa

SEQ ID NO: 4494 - DNA, 2670 bp, Heterodera glycines
aaatacaaattaaatattttactcatttattttctgttttatatacaattgtaaaatcaatgctcctttctgaacaaaaacacccagaattaacactcaaaaacaaataaaaaagatattactattgtttgtgcagttttacatagtgtaatctgttaattgacaacatgttcacgtgccttttctgcttttgccctgttatgatgaactcgtttcgtattcgtcgctggcgggggacgacgacgccgacgcatggggaggccttcggaccgtttgaagcgtcgccgaattctcagcaagaacctgaaggaaaagcagcaattcaatttgggacctaatttgtggttgaaaaacctcgtcaatgaccaccccggggtcacgccgcgtctgttgcactcgcgtggacatattgtggccgaaaccgcccggcaccgtcgaatatgtgcacacattggcacttaacgtactgctggccattgcacttgtcgaactgatcagttgggcaggaactgtgtacagcgcttgaaccaccacattttgcgaagccacttaaaaggcatttcttatttatttagtttgatttctatggtaccggtcgaatttgctgtattttcttgtggagttgagctgattgattttgggtcgggagacggaggaggtgcctttcggtcggcggggtttaaaaaatggcccaattggtcagaacggctatgaagactttccatggaattgctgcgacggaaaattgtcgatgaattaggactgaaaagaaattatttatttgagtgaaaatttttcttagatttctctaaattgatgacattttgaagagagggtcggccgagttgtgctgcattctgacaaagacgtacactcgtgagttgtccgcgcgctgattgttgtcgtatccgtccaccaaatatgacctcgttatgcctttagcaccgctgtaggcaaattctgtcaaattcagaataacaaagccaagcttttgcggagttcggcccgcacggtcctcctgaataatatgagacaaataattgctttatctgccatgaaaacggactttcctgagagaaattttaaaacgacatgcctgaaaataaaattcattgaatatttctggttttaactacaacctccaacattccagtctgttttgagtcaaacggaatgcaacaactgaatttgaatggttgcgggtccttctcgacaaaaccaatttgaccaccctcatcgtgaccaccatttccgacctgaaagaaacgaaccaactctttctaaatcactcatttgttgcctctccatttggtccaacctcattgctgcccagcagccgttcctcattctcctcctcctgttcgtcatcatattcacccctttggttgccgttgttttcgactagtcccaattggtgcgtttgttgtggcttcgaaattgtccgattgctttcctcagaaagtgaattccgccgtcctggcaaagggagttgttccgtagcaaagcaagtcacactatgcctgaaaaatgattttggtgcttaattttaaatctcatttacctgtgaacgccaccattttgctgtgatatacttgggagatccaaagttttagcgcgaatttgcacattttctaattcattttgatgaccaaaagaggaggacggactcgtcgtgaagtccacctcatgtgaacagacaggtttatgcaatgtgatacccgcaaaagagccgcaatccaacagacggacctgacaagatcgttttccgcaagttaaaattttattgtacctttgcaaaaataattgcatttaaaagtggaatgtctgtcagtttcagaacacaaagctcgacgttaaatttcacttttttcttccgtaaaaatgatatagacatatgaaggcggctcacaagaagcaaaaatatttcttaatctttgtgtaaaataatggtactaatgtcgtttacagaccataaaaaaatagttttaataaatcatacatttaaacatttctggggggttttcgggatcgctgatcacgaatctgacatccatttagaataatttcgaaccccggacccgaattcgaacagaagccgaaaattaatttttcatcaaagttcatttttatgttagaatctgaacagaattcaggtccggggttcggaattggtcgaaatgtgtatcaaattcgtgatcagcgaccccgaaaaccccccagaaatgtttaaatgtatgatttattaaaactattttttttatggtctgtaaacgacattagtaccggttcgataggtattgcgcattggcccgttcaaaaatcctgtttttttccgaacacctaacaaggtcccgactgaactcgtacgtgattttgtcagtcaaagacccaacaaaaattttgccctacccaacccccaatcccaagtctggcaaacctggacgccagtccgctccgcgtacgccttcttcagcttgcccatggatgtgccgtatttgacccggaaatgcacttcatttgagtcctaaaaacggacaattaagtggttgcgccatcacacaatgcaaaaaacagacctggccaaccaccttcagtttgatgtactcggcgggctgagcgccaccagcggcgccggctcctcctgcattcgtggcactttcgtcggccatt

SEQ ID NO: 4495 - DNA, 1329 bp, Heterodera glycines
gttgttaaaatagttttaaagcttttccataaaacggcatgattcaatggataataaaatgctgattaaaattattaaatgataaatggaatggggggaaaaacaattaggtaccggtagctatttaggttttttgaatgttttttttaaagtaagtgtttatttttaatgttttatataaataaaatgccaagaaaaacaaatttaaatttcaaattcaatgttttgttccaaaagcaaaggtaaaaatgcaaaacgaaattgaatttgtgttttttgattcacttaattccttcctttctgaaaatttacaattgctctcccaacaaattatttgccccttgcaaagcctggcgaatttcaaatggaaaagtaatgggccaaaaacattgttatgccatgatcaccggggagggtatttggactatgaaaggtgggcgaatgttgaattttttaaatttatcattgaatgactcctaagtttaaaattgtggatttatttaaagcttatatggaactcgaatatgctctaagggcagtgaacaaagtgctgaaattcccttttacgccttcttccattggtggcacattgacattttcgtttacttctcccaccgtttcgtcactattccgccctttgcttggactaatcaagcacacaaacacggcgttctgattttgggtaatatttagcggttaattatattttagagattccattttatgtaagtctaaatgaatacacattttgtttttatctcgttgcattttcattccttggtcaatttaggaacatttatcattgaaaaggctgaaatttgccagcaaactttttccaatagagaaacaatcgacagattaatcgcatcactcgtcgattgctgtgtcgtctttaagtttggtaatttcacaaatgaccccctaatttgcattctaatattaataaatccctttttaaatgggtggttaatcaacatcgaaagtgaagtgaattcggactctgtcgacaatttggaatactttctgttctctttgcggaatgctttgcatgataatgttcacaaagatgccaaaagtgttatatttttgtcttttgtcggttcttattgggttttaaattgttcagttgtttggtatgactcagtgacaacggacgggaaattatcgtggcaaaatgcattgaatgccaacaatttgtgagtgtactttttgtggtgtaatagtttaaaattcgattttattcagacgatggggcaaaagtgtcgatgccttctacacaaattacgcctaggggaagaacacattcagcaaacggttcgaacttttctt

SEQ ID NO: 4496 - DNA, 1631 bp, Heterodera glycines
tgatggcggatggaattgcgtccaaccgatggaaatccttcgccgttacgctttgtccgttgccatttttgcccccggatggatttgtgaaaaattttccggccaaagtcatcgcatcctttttgacaacagttttcgtttttggaattcgttgagtacatttttgtatccccatgctttgcgacaacggaacttccgaaccagattttgcggttgccattcgcatcggaacgcccccaattggcatttctcgcaattaccagagaatgtactaattaatatttgttaaattgggaaaaccgtctgttgctctaaccaatttctcacgcacttttcaggaaatgggtgaaaatcacttttgtcttcaaaacgctgacctccaacccttttacgggtgctctgcggcttttggcaaagacgatggaagcgggacttctcgtgaagggcactggcgattcataagtgagttgggctgacgggcgaaaatccattttgacattttaaaatgatttcgctttggagtttggaatgagtcgagatgggtgtccgaatctgatcctcctagccgaaaagcccgaaaaagtattttatttgaaaaaaaaattcaaaattttttcttttttcaaaaaagggctaccatcacaactataatcgaattttcagactttttatttgcgacgattccgattgaggaaaaggacgagaaaatagagctacggtacgttcattcacttcactaattgcagcatttaagctgattattgctcggggcaaagttgtcattgttattcctttgcatttccgttttaaagcaacaacttcggaatgttcccccatctttcagtttcgattgttctcatccaattggtctcgttgtgacgatctccgatggcattgagtcgctccatttttgtcaacattcttttgacgacaatccgtccgatgaaacaaataaacggcatgaaaaatccattgtttttgatgtcgccggaaagcgcgggtggaaaatttcagacatttcaatatttaacacaatgacagttcctatccgtttgtatacggtacatatgaaattgtactgaccagagaccgaccaaataaatttaaaaaatggaattaacaatattaatttagtaaaatgttttccaattcgcatttctgtcatcgattctccgagactaaacgcatggcaaaagcacaaacacatcgaagcatgaaaattaggggttgtaaaagtgatgagccgacgagtggcgggggcggggggcagcgaatttgcagtcaattccattccgtgttatgagcaaattcaattggccgctgcacttcttcccatcccttcccctccaatgcttttggtttccattcactttccttgggtttgccaaaaaaggtcaaatttccattatttccgccctttccctttttcgtttattcgtcaatgcatttcatataaaatgccagcagaatgcgctttcctttagcacaaacattctcctcgaagaattcggatgtcgtaaccataagtttgaaatccgcttgttgtccaatgcatttgtgtgggttcctcccgcatttttaatccgttggacggatgactgatgggaagggggtgcggttgccccgccccc

SEQ ID NO: 4497 - DNA, 3217 bp, Heterodera glycines
  unsure (1)..(3217): unsure at all n locations
tttcagtgccgttgttgctcacttaattttatttgcctcttctagtgtctccttttgtaattcaaattggatgaattgcattttttatagcttctaccaatttaaaaagttccatttcacattcttgggctgatcagttgctgctgatcactccttttaagactttctccacataattaacggccgatggtggcacaaattccactgatcaaatggacaacagttttcgacgagcttttcgttcaattgccgtcaatttaccccttaaatttcatcgcaataactttaacaaatattttgatcagcacagtccacgcgacattttttgacagggacagaacggcacacaatccaattcaaatgccgacgcatcaactcattcacacatttgaaacgaatgaacagttaaataaaaagagaaataatgcaaattatttaatttaaaatagttttgcaatttctgtttaaaataataattattttattaatattttgtcatttttgggtatatttattgccaatttctctcacaaaaagatgctcaacaaattgcccgaggccttgcgttatgcaaattttggaagaattggaaatgatgccccggtggatttgcgacccgtcgagccaaagcaatgtcagtgcaacggaagaggagatgaagccgcttcatccccccccctcaggcgcaactccccccgttggccaaagggacggcccaaaatgcgcgcagtttgaggcctttgctcaacgacgacggcggcgacacattcagtcacagccaaattctgctggccattgcgcccatcgtttgcctgctgattttgtgcgtcgccatttctctgcggcggtgcagcgcttccgcggcaatggccacaatttgaacgaatgccttcagagggacagaatttacatttaccctttttaatgtaattaattagattgagaagaagcaaataaattcttaattttcaccaagttgacaacatatttctcgtgaaattgttacaccacaaatctgattaatatttatttttgtaactggcaacagagcctaaaaagtacaaatctcacattaatatttaaattaattaataattattttctaatgcagaataatgaatcacaacttacaattagcttanacatgatcaaattttaactaaataatacagaaatctttggtctatctattcattanagaaacttatattttgttgatttattatttgagcttgggccgggactaacggggctaaatttcaccagtgaaaataactcagatttgaaaatatttaataattattttggcgaaatgtctttaattcgaaattttcaagatagaactttggatttcttgaaaatttggggcaatttcaactgttaaaaagaccctaaaattttttggacaaactctgttaacaaaaacaaacaaattttcaaaaaattttccccggcggcgtctatcggcaccgccggacccccccccccccccccctcttgtacgacgaaatgcaaaaaaggtcgatttacatggcttgatataattctaagctaaaatgaagactataaaattttttcgaatttttaatcaaaatttcaaaaatttttgaaaaaagtcccggtcccggtccaaaaactgggaccgggagtcccggttattttggacaaatcaccgggaccgggagtcccgggatcccgtcccggtccattttccaagtcccggtcccggccatttcaaaattccgggctctagatgttactacatatcactgacacttttttaggcatgtttcgtttttttaaactttgaatttaacacattgtttcaatttggaacgaacattcattttaagcattactaaattgagaatttcactgttttggttgtaaaaattaaagaaaaataaattcgagaaatttaatacaatgtgaataaataacgacaataattaacgggaacccaacagaacacaaagtcacatattaacaccaacaggaaccctcttcagtgacaatctgacggggcttaatcgggccaatgtcaacgacttgttcttaacaatgaaaacagataaatagggtaatttatccattttaattatttttacttgcgtccgcagccttttccacctcaatgccgggaagtgcgctggcaattcgtcggaaaagctaaatttgtaaaaataaaaaaaaccagcaattcattgttgttcgttcggttggtccacctgcttcacgttgtaaccagcctttgccgatgtctcgatgaacatcacattcagctccttcgccttctgctcgccctcttccgttgaaacttgtctaaaaatggcgtaataataaaaactcagaaaacgaaaattaaattcttatcagtttaaaaagtatttgagtagaacggcaaattgcataaccttttgtccgcgagatcagttttattgcccacgagcatgatgatgacgtcactgccccgttcggtgcgcacgtcgtcaatccatttggacgtttgatgaaaggaattcgcatctgaacaattttacagcggtgccatcaattcaattcaaaatttatcttatatgcatccattttactctgtgtacctttacggggctttaaaaatgaatgataatgatacgcattaatttgttaaatatcttagtaggaaacttaaatttctatttttgtatttcccaagagaagtcttacttgtaatgtcgtaaacaacaacagcaactaaaaataatataaattaattttaaaaaattcgagttttggccacctgtggagtccctaatgtacgacggaatgagcgaacgaaagcgttcttgaccagcagtatcccaaagttgaagtctgaccttaaaaagcgagtttagaattggaaaactcatttaccgttctgtcctcaagatacatagttttgctcagaaaatctatcccaattgtggcctggtacgtattgtcaaagctgtcatacataaatctggtgataagagaagtctttccaactgaaaattaagacattaacattttgtatttaacggtaatttaaggaggacaggaagaatgaagatggcaataaatttttataacgtaccgctttgttcaccaagaaacacgagtttgaacttcttcagagggtttccaaaatcagatgacattgccttagttaatactaaaagtgtattaatttgatcaatgatcgttcgggaaaaag

SEQ ID NO: 4498 - DNA, 1925 bp, Heterodera glycines
  unsure (1)..(1925): unsure at all n locations
gagtttgacttcttcagagggtttcaaaatcagatgacattgccttagttaatactaaaagtgtattaatttgatcaatgatcgttcgggaaaaagcaaaaaacaaaaaacggattatggaaaaccataagcggtcttttccaacatgacaattttaatttatttntgatgcaaacaaaaggccaaaaattaacttttcgtttctgtttctctcactcactttctcttcattatccactctctttctcgtttgctctttcactctctctgtcctctctctcctcacacttttttcctttctaatgatcggctgattgctgctttatattacatactcctcatcaattagcccccattaccctttcattatctttccgtaaacatttctttcagtggcgccgccaccgccacagagtccaaagttcgctttggcgtttttttggcctttcttctgcactttccttcttttctgcccatgagaatgaccttttcccctcatatgtaaaagtaatatttttgggtcctatcatttcccccgccgcggttttctaggatatacctatataacgttttacttattcacccaatttttaatttggtatacatattttctcccatctgttcaccaaatctggaattatattttcgttagaaataatgcaaccatttgtccattggtcgaaatgcatattcaaacgtccattttctaattcttcaaaattattttcgtcgtcattttcaatggggtttaattttggtaagttttatgcatactaactaatacttcatatcacattttcaattcttaaaaatcatattgtattaattttcagaatttaccgaagaacaaaaacaactccaagcggctgtaaagaaatttactcaagatgaaatcattcctaaagcgtcacattatgataagacaatggagtttccatgggaagtgataaagaaagcacacgccaatggatttatgaacgttgacattccgtcggattgcggtaaatattttggtacaatgtgaatgcaatttgtaaatgtttatatttaaagggggtcttgacttggaacttgtaagcaacgtgctgatcagtgaggtcattgggtatggatgcaccggaattggaacggcaattttgggaaatgacttagccgcgactcctctggtcattggtgccaaagaagaagtcaaaaagaaatttttatcccgtttgattgatgagccaataatggctgtgagttttttttgtgcgctttttatacctttctaatttagtcttattgtgtgactgaaccaggcgccggttctgacgttgccgcgcttaaaacgaaggcggagaaaaagggcgacgaatgggtcattaacggatcgaaggtaggcgatattccccttaaagtcaatcttcgattttagatgtggataactaatggtggagttgccagttggtattttgtccttgcaaggactgacccggacccgaaggcttcgacgggaaaagcatttactgcatttgttgttgacgggaatactcctggaattgttaggggaaaaaaggtgggcaagccaactaaaacagatagatagaagatcactgacaacaaaccattgctatgtctaaaggaaatcaacatgggccagcgatgttccgacactcgtgccatcagttttgaggatgttgtcgtcccaaatgcccaggtcatcggtgcgcccaatgaaggatttaaagttgccatgaaaacttttgacaaaacgcgcccaattgttgctgctttgtccgtgggacttgccgctcgagcgttggatgaggcgtcaaaatatgcacttgagcgcaaaacatttggtgtgccaattgcacaggtcgacaaatcctaattttttgtcagtttattctttgattgtttccatctttagcatccagggtgtt

SEQ ID NO: 4499 - DNA, 1313 bp, Heterodera glycines
  unsure (1)..(1313): unsure at all n locations
attaaattcatttaattaggataactatgaaaggaatacttttcaagaaaccgaactggcgcccatttggncggcactcctttaacggttttgactaattgtcaactttcagcagatgtttttctcatattctttgctctcttttcaaatttaaattgatgaaaagataaaattgttaatttcaaattatgtacaaaaaacaattatacatttgtttttgattttcaatcatttgtcatgcccaatgataaatataagcggcgctaaaatttattggcataagcaaagccttaaaaaatgccatcaaaattaggcaaatgccacgccatgccggggcatatccatgacactcggcattccaaccccatatttaatagcatgggctaacatctctgcattttatttaaaaaaatataaaaaaaatattaataataattttgcaattttattcatggatatcatgcatattttttattgaattgatttgtattaattactcttcttctcctcaataataattttatttttttaaatatatttttcaattgaataattttatatttataatttaattaataaaattccaaattattatttaatatgcatagataaaaaaatgatgatgaataaatttgtgattctaacaatggcatttgcaattttggcattaaatttcattggaattgcaccggcgggaacagcagaaggccaacaaacaagcaaaacaggtaaaagattagtgcaaatttgctttatggaagtgcgtgccaaattgtgtgaatttaccgttttggcaatataaggcacaattcaattattattttgtttctagggctttatttaaatttttttggctgcaagcgaaaatttataaatttaattatttttaatttatttgatataacaattattaaattacgatttaaaatataaaaatataataataaattgaggatcaccaaaaataaaatagaagtataaatttgtttttaaactttgttttaaatggttttattcacgcaaatttaaaaagaaacaccgggtctaattaggcacgcctattaattagattacataaaatacaatggttattaatttattaaaaccaattaaattgatatatttattccctctcttccgcaggaagtggcatttcttccgcacatcgaagtgacgttggcactgcctatgcaatgattgcgaatgacacgacgccaaatgatgttgccacattttagtccttttaaaaaatttgaattttttaatataatttcatccataagtgcccaaaaaagacgggaatcggtcgttcg

SEQ ID NO: 4500 - DNA, 3331 bp, Heterodera glycines
  unsure (1)..(3331): unsure at all n locations
cgcaagtttttctgtaattaggggccaattcagccttacccaatgtgctgcaatattggcataatgccaaatagctgaatgcggcatttgtaagggccaatttaaaccctttacagtacccgtacaagcgaaagcactacggtagtggtggtggtagtcgacgacagcgtcgtggtaacagcgaaagtaacgaagattcgccgcgactgaagcagcagcaggagcccctaaatttgccaacccgtggcaccacatcgctccggcgcaatggaaacgccaaatcgggccaacttttggccatcgaattgctgacggacagagaggcggaaaaccgtgcagcgaaaaaagtaaaaaaaaaaaaagcgaaacaaaaaaaagagggggggggggagacgaatggattaagctagcccactgtagatataagccaagatttgttattgaatacagtatcatatggcaaaatattggtcaatctgtacacctttagtagccagcttacttgtagatccatgattgttgattgattaacagtataatatatgtataaatttgctcatcggtacactaatggtagctagcctattgtatatataagccaagattattttattggttacattatgataagatcaaattaacctactgttcacgacattggcggatcaaaaatttatttggcccgaaaattattcttcgttgtcaacacaaattcaattcgttgaatatgaaccatggtggcataaaaaacaattttgttgcaccgcttacatcgcctacccccaactcccccccccctcccataggaaatcgcaattacggattaacggctacggattacgggaattacggcaatttcggctccccgtaatcacggattagggatttccagaatgaaaaagcctccgtgattatggttaagtatttccgtaattgaaatgcagctgcgtgcagcactgttggtccccccagggcttggccttttggcagctccaccagcgcttagcctctggcagtgctcacttggcgggcctcagttgtcccgctccggacaaattttttccttttttttagattaatgaacaattgtcgtaccttacgcttggtgttgtgcttgcacaaagtcatgaacaactgacaaaactgaaggaactgctcaaattggcactgtattttgagcaattactggaactttttaatgtaaaataaattttaaaaaatttttaaatacaaatttaaaattttacgaattagaaagaatggcttaatgagagggaactgttagaagatgccaaaacagtactgatccaaatggacagttcaaagaaaggccaaatggccgaccagcagaaacttgtggccgatttgcaaaaaaatatgaaccaaatggaggaaatcagtggaaaaattaaaaagtaactaattaattagtacataattaatttaattaataattaattgatgaataatttgttaaatgagtcactagtcactataattcggtaaataattcactttaaattttataatggttatttaaattattattacagaaatgaattcaaatatttttaatttattttggttattattagtttaaatttggtaaataaaattattataaaaattaatcaaaataattaaaattgtattcaaaaaaaacaaatattaatttaaattggattcataaatcaaaaaatatattttaaaatatcttttttttaatcaaaatcccccccccccaaaaattaattaaattaaatatttaggcattattttataatcgttaatttaatttttacataaataattaatttttaattatttagtgaaatggacggattattaaaaatggcggaaagtgacgaagaattttatttcgcccggcacattaaccgtatgaaagagcgtgacaaccagtcaccgtttttgcacaacacaattgtcaattgggagaagcagaaaccgtacgaatgggaccgtcagcaaatgcgcatttgggtgaaacggcactccactaatgaggcggctaatgagcgtgagcaattaggtgctaataatgtcaatcaaatgaccaaaaagcgtaaagatatttaattttattttatttaaaaattcaaaaaacatttagattaatttgctttgttttcgtttctgacaggaaattttttggatcacggtcacgattcacgggaccaattcagggtcacggtccacggttcacgggttttttcagtgacggcgcaccactagaatttagtgtctattttaagagcccggatttgtatggattttaaacttagcaaatctggcatcatttgaaagctctatgtgttctctatatttatatttcaaaatagaaatgaatgattcaaaaataaaaaagttatggcacacggcgccaaaaaagccaagaaaaagtcaatttttgaggtttttggccataacttttttgtaaactgacgaaattttttgaaattttgcagcaaaagatatcgaacgatactaagcgttttaccctcgtccatattttgcgattttttttttgcgatataccgggttctagtcatgagaataaaaaatttaaaaaaatgacgtccgtatcactggcgcataaagctgttacaaattgccaaaaaatttcaaaatgccaaaattgtttggtgtaaatgccaacaaaaaattttcaatttcctcatttgccaactacgcttttctgcagtgcatccgctttacccacttgcgaagcgcaacgcaaccaatgaacgtctggtgcggaatgtaagccatctgctgatgcttgacgcggcatttgaccgcgaggcgcgcgaactgtgccgacagttcgccgcgcgggtgccgttgcgcaattgggccgcaattgcgaagaacatggacgatgaagcgattaagaaatttgtggtccgcccattaaaagtgaatttcctaatttcactggttaaccaaacgagggggggaggcctttggcaaaatttaggaacattagaaaaatggatcttgaaaaaacctgaaaaatttgtaaaaacagtttttttaatggaaattttgtaaattttaacagctaatagtgtaaatttgaatttttttctaaaatttaaaatttttaggaattcatttaaagaggcatttgtttttgttgaaatttcaccctcaaaattttcatgaaaatatttttggcgcctcggattagtgacaaattttcccccaaaaaatagaatccattcgaccggataatgtttttttctgacaaattactttttttcatataatttgatcgtcttaacgttttatgggaattntggcaatccca

SEQ ID NO: 4501 - DNA, 4560 bp, Heterodera glycines
tgaatccttgtgtatcggtgccattttcgaatggcacccatcacaattgctatcaaaacaaataattttgcttataactttgctctaaatcatcaaccatattttaattcaaaagaacattcgatagctctaattattcgctattattctgccaaatttcaaaaaaaaattgttaaccttattcgaaaaaaggctttttgagtttatttggtcataggattttcaaaatttaatgaaatttttgaaattatccacactaataaagaacactttatggctatctaattatataatgaaattaacattttgttgcttttaagcaaagttattataattttcatcaaaaattttcataattggttttttaaattacgacgactccgcaccttttgccagggatgtggacacacatcagcgtgaactgagtgcgcagcaggagaagtgcgtgtggggcatgttgaacgcggtcaacaagttggagttggacagggccaaggaatgtgtgaagggcgcactgttcattcagctgttcattgagcaagtgttttcggaggaacaatcacaaaaattgcaagaggccaaaggtgccgtttatttatgttcatgcaaaaattatagaatttaaatttaaaaaaattaacaaaattaaatatttttaaagatttaattggttgaaagaaaagttttttatgaaaaattatagaatttaatttaaaaaataataaaataaaaatattttttaaagattttacctttcaaaactaaaaagagaattaaagaaaaaaaagaaaaaaaaattaaaaaaaagagaaaaaaaaaattgacagaaatattttgtatattttctttaaaaaataaaaaaataattttaattttaatttaaaataaaatatattatttgaaataattaataatttcgacaattattatgtttttcattttttagttttttacattagttgataatttaagttctcattcaataattttcttgaatttttttacaacaaataaaatattttggatttaaaattcatttcaattctttgaaattgtttgagccaaaaaagtgtatagataagcttcagttgcatattaacttttcaaggccttgaaaaaagttctgatttgtccttgaattttttggaatttaatttattttagacaacgttgacaaactcaaagatgagcttgcgcaattggagcgcaaatttcaagcatttaaagcccaacagcagaaagcggagagaggtgccaaagaagtcaaagaagcctacgaacggagacgaagaactcggcgcggcattggcaaaaaaagtggggaaaaagtgccgaaatcggcggccaaaaacagaggcaaagccaaaatggaagaagcgcatgatcaggatgatgatgatgattttgatgatgatgatggtagtaataacgatagtgaaagtgataccacggaaagtggtggtaatgaggaagaagctgaatcctcgtcggcaaagaacaaagggcgcagtgccaccagcaagtgggtcgaccgagcggtggtgggacggacgttagccaaaaagccattaaatggaaattttttgaaagaaaatattcataatttcgcccagaatgaaccaaatttttaatacttgatatcattcggtagccctaagagttttctattttcatggaaaatattaaaaaaaaaatttgttataaatttaaaaaaagatataacctcagaactcaaaaaaaaaaaaaattcatttgatagtttttgacggtgctgggacgttagtcaaaaaccatcaaatggaaaatttttgacagaaaattattcataacttcgcctaaaatgaacaaaattttaaaattttgttatctttcgtatgcttatatttcgggcggcaccgatccaaatctcggcaccggtccgaatctccctccaacctttggctttgaattcttttcctattccatctaatcgccccgtcccctaaaggtttaaaaaaattatgtcgggaattacgccgaaacgaaaaacgaaggcgggcaaatcatcaaaatcatcaaaagaagatgaggaaaagcatgatgaaatgatgatggcatcggaagatgaagaaaaaatgatgaagaagcaaaaacaaaaacagtggaaaatgccgacaattcagccgcccccgtccgcccggcggaggagcagcaggccaagaaatggtatccaattattgagcgcggactttcaaaaaattcgggatcagttcgggattagataatttgacccgtaccgggtttcaggactggatttaatatcaggttttccaggacttctgcttgatccggatcccaaattttgatccggatgctggcccagaatgggtgaaagtaggataaaggataagagaggatccctaaatggggcgcccccgtatctcagtctgggaatcagagtcccgaggcctaaaaatgtcgaattttctgcaattgaataaatttagaaattgcaaaataaatgcaaataggttcactggctccctgaaaatgcgtcagtgaaaatttcaatgtcatcaaaacatgttctttggcttttcggggtcatttataacgaatccggtatccattttggccaattccaaagcccgggcctcgattcggggtcggggtttggaattcagaacaatgttcttatagcattttgcttttatactatgtacaaatattttccggtcatgggtacactcccaaaaaaaaaaaaaaaattaaaattggcagaattttgtttcaaaattttgaaattaaatttaatttatgtacccccccccccttcaaaaaaactcttttagcatcatcaacaagcagcagaaacaccaaccgccagcatgagccgttgagacaaattgatgaggactcgcgggagggggtacacagctcggacggcagtggcaccagcgccgccggcgctggccgtcgccggctgaccgaaaacgataatagcaacagcaattattatgttaatgagtggattgatcagcagccggaaggatatgatacctacaatgatcggatcagcaaattgcgtgccaaactccgagaggcggaggacgagtacaaaaagcaggagaaaggattgaagggaatgctcaagtgaaaattttgattattttaatttataaaaaatagaatttttagcatttgccataaaagatagcttacattaagccattaaaagtttcaaaaacaaaaataaatgtaataaaaaaaggcaaatgatctaaaaatattgtaaaattttaaattaaaaaatgattttttttttcttcatttgtttaaataaaattaataattaatgtttaaaaaatcaaaattgatcaaaatagacgtcagtgatcaaagaccccaaaaatctctttggaaacaaatttccattaatagacattattttacaaaaaataaattaattaaaagggtttttataaaattcaaaagatacggcggacttttgcgctaattgaaatgtaacatctgaaaattttttcaaaatttacaataaataaaaatttaaactaaaaaataagtaatatttctaaaaacccaatattttgtagatttcagtgggtttaagcattacgaatgtcatctattgcactccaaaatcgaatgaaaatgtgcttaaatgagtttctaagaatttcatttttgttttaaaaaatttctgtaaattttttttccatttttatgaaaatctacggtgttggtacgttcaacaaaaaaccatcaaatggaaaatggttgacagaaaattattcaaacttcgtccaaataaccaatttttaaaataatgatatcgtttgatagctctaagtgttttctattacaaaatttcaaaattcattaacttgagaagctcaaaaaacgaagtttttttttgaacatttttgatcataaccttcttgaaacttaaagaaactttttgaaattttacaggctaatcgaaaatacttagggctatcgaattaaggaattaaaaaaatttggttgctttcaagcaaatttttttttcattttatggctttttgactaacgtcatagcaccaaatttactccccgtctcggacatttttttaaaatttgtccagccgtttacgacaaattttgtttgggcaattttctccccgatttacggtatttaataataattatttaattaaaatttgctcaaattttaatgcataaaattcaaattttgctgacagtgtgcgaaaacattaccgccgcttgcgcctgaacaaaaagtccaaatcgcacaccaaccaacagccgattgtcaacttttttggcctacacaacgaactgatggccgaatggggcccaagcagtaacagcaacaactgtgaagaggaaaaggccattttcatgaaaatctatgatgatgtggtggaaaatgcgaaaaagcaaattgaagagaaatggtggcgatgccaaaagcgtaaaaaataaataattattaaatgttttcaattaaatatacggatgaacaattaaataattttcaattaaaatagaaataattat

SEQ ID NO: 4502 - DNA, 1369 bp, Heterodera glycines
tgctgatttggaaaaggagtacaattcagtgagttcaattaataaattaattattaattaatgccttaaaaataacatttattaatatattattattttttactttgatgtactaaaggggaatcaaattaaggaatcaattaatcacagttaattaattaactaattaattagttcatttactcagttgtcagttgcttcgttaataattatactctttttctagtgaattataaattaatgtcccaaaattagcattattaatatattttgttttttttaattttgatattctaaataggcatcaattaaagaatcaattaatcgcagttcattaattaactaattaattagttcatttactcatgtgccagttgcttcgtcataattaattatgctctttttcgtgtgaaatataaattaaatgctccaaatagtatttttgaatatattatttttttatttctaaataggaatcaattagggaatcaattaatcgcagttcattaattaatgaattaattagttcatttattaattggtcagttgctgtgttaaatcagctcttttcctattggctaattttattcgtaatattaaaaattaaatccacttttatttatagttaaaacaaaaaatattaatatttattaaatattattaactgattttcttaaattttttataaaaatattatatttaaaataaagttccataattaaaaacattaatattcgcaatgttgtcaatatttagctcaatgaaaccatgaatgctgaattgcccgggactgaatcgagcagcaacgattcggccttctcggaaattgaactcgagaacaaaattgagtccgagattgtgcagaaaaacatacgcacttcgaaaacgccattgaaaatttcgacgcgacctgtaagggttgaagccaatttttggcattttgaaattttttaattcgtaaattaggatggtactgaatttgtctcaatttaggaggaaatttttttttacaatttttggaatttgttatgattaggagggattcggatttctatggacaaaagaaaaagaacaaaatttggaaaatgtggagataaaaaagcatcatagaaatatcaaaataagctaaaaattcgtttaacgtgatttttttgacgaaataagtgtgcaaaaaatggaaatccatataaatccggtccttgtcatggttttttttgaaaaattagaaatatttttaaaacaaatatttttagactcgattgaattaaaacattaaatcaaatgtccttttattaaatttgttttttagatgtttaattgttttttaaacagcttaccccttaaaaatttgtatttaaaataaaaatta

SEQ ID NO: 4503 - DNA, 7236 bp, Heterodera glycines
ccagtgtcagacaaaattgctcataacgccaaatagcgcatttggcgtaaatttttgcgcgctatttcaaaatttacactggaaaatgcctttttgtatttttttattttgatctgccataactcgcttcattcccaactaaactgaacaaatttggtatctaaaaagtttttgaaaaggagaatctttttctaagtgaatgctaagcaatttgattttttagaaaaaagttgtgggagtatctttattacgttataactcaagtcttaaactgctgatttcaaccaaaatgcggaaagtaatcatttttctattgattctaaatgtccaacagattttgtaccgtatcaacaaaaattaatagaatttgcgaatttcatgatttttaatgtgttagagacatgaaaatagtacgccaaaaagagagaaaaaaaatgcaaatcttttattattccataacttttcaattcgacctattttaatattaacttgacctattaaccgatgcagaatttttttctcaatcgatatgcaaaatttggtgtggatttaacaaacagaaaaaaagttaaacaggatgaagtaaatgttgttttttacataattaaaatgaagagatagtacgccaaagagagagaaattacaaagaaaaagagaaacgacgagatagtactaggcttttctctgcacagtggggcgtacccatagtggtgacgttaacccatagttgtgcaaggtacataccatatttatttctaccagcacctccagactccccaagttcccaaaaagtttttaaagaattttgccataataagttcgaccgccgacctctccaaccctcggtcgaccggttaaaggcgaattcaggaccctaaattaatttatttggctcttttttcacagtcaggctttttgattatttttgtgactttattcccatcctaatgccaccaacgagtaaaaaaacaggtattaataaagcaaattgaatttgactgggttctttaatttaaaaatttttaggaaaggctgtcgcaaaggctgtggaggccaagaagaagctggccaaaggccagcacattgtgcgcaagaaaaagatgcgcacgtcggtgcacttttaccggcctcggacgctgaagctggcgcgttcgccgaagtttccgcgcaaagcggtgccgaaacggaacaaactcgactccttctccatcataaaacacccattgaccaccgaatcggcgatgaagaaaattgaggacacaaacacattggtgttcatcgtggacgtgaaggccaacaaacatcagatcaaaagtgcggtcaacaagctctacaacatcgaagcacagaaggtttgtccactctttgttttggtcaagaaaatcgagtatatgcaaattggatgagcgcaaaactgaatttttggggccaaattttaattttaagtttcaacttttcgaacaggcacttttaaaatagcgccgaaataccttttgctcacttcaattttatttattcgtatagatccgcattcgacttaggcgacatcaatgatatcttcaatttcttaggccataacttttttctttcttagtcaatgcctaattctgttgccaaccgaaaactttcccagtattttttaaacataagaaaaggacgacattggtaacaaaaaaaagctatagcataaaaaaactgaggatagtcattgattggacgcctaaaagtcgattgaatttcgcaattgtgaccataaatgggaaaacgtccggtcctctaacaaaaaatcagtatttcgtcatctgtattaattatgttgcttgaataattatttttttttaaatatttaatgactatcaaatatcagtcacaatcacttgtatgactatgtctaattctgtttaggctatcgtgacttgaaaaaaaaataatttgaacctgatttttgacataggctcaaatgtcgggactttaagggaagggttattcggatagttaatacgctttatctcactgtttattcgtctaaggtcaacactttggtcacgcccgatcatacaaagaaggcgtatgttcgtctagccgccgattatgatgctttggacgtggccaacaagattggtattatctgatttgattctgcgctttgtttttttgttttttgcgcataaattgttgctgtttttctgtattgaattgaaggtccatatggaaaaacttccatttttggggtcggaattccgaaatttttgataaaaaacggaaagttttgtttttttttccaaaaaattagcaatttttacaatttgtgttaaaaaattgcattgaatttcaattggttcggttgcacccaatggatggatgcgacatgggtctccctttatgcccacgtgtgcccctatttggcgattccttcggcgccgtttccgtccctcgccctgcccagcccctctccaccattcactcaaaagggtccaacttgagcacgcgggtcgcggcatggagatcagttgcgctttttcaaagggtcgaacttcgacgggcggaccccgcttatccgtccgaattgctttgtcgcaccagggacaattgttgcgacaattcgacatcgatgactgggacgtcctctcctttgtttagtcattcagcacgagtgacgattctcggcaaaaatcccaaaatatgattcatttaaaaatcgttttttcatcctttgtttgtttcagatgcttccatttttaaatgcataaaatgaatttattgaataggtatttagtagaccggacgggcccgacgtgcttttaccgggcggcccggtctcgtttttttttgaaaaaacgggccggtaaaactggctttttggacttacgggagtacacgtaacgcctactaccgtatgcgtttacttttccgtgttattaaatcaaagaaaatttcagtttggaaaaatatttatgttagttatattcgtccacttctagaatattcccctgaatcgtggaatccgcaactaaaatcacatattattaaaattgaaaaatgtcaaaaatattttactcgaattgctttcagaaaatgttgtcttccatatattccctatgaccaacggctccaattttttaaattagctactcttgaaaaacgaagaaaaatttttgacctcctaactacttacaaaattttacatggttttacacatttggacccaaattctctgtttaaaagaactaacctaaatactcgaaataagtcatttttccggttaaatgttaaattacaatctaaaaaatcttccaaatcttttgttaacagatcagtcaaggcctggaatgcccttgataaaacgttaatgtctagctccttaaacgcctttaaaaaattattagaattgactcttgattctgaaagcaccaatgtataaagaattattaacttttgaggcattttattgactttgacctcgattttattttcatataaatttttcgttattgtttatctttaacctgtgatctcacttgatatttattcacttactctgtgactattttactgtgatcagtcatcagagtaagtggttcccgcccttctgatggcaatttttttttttttttttctttatcgaaaaagaatttagacgagtggcaacggtcgaagaggcgacggaaacaatggacggcacttcgacttctccgacgggtgccgcccttttttatcttgttctttccgtcttatttttcattttagctgatcttatttctgtacaatcgtcatcgaaacgtgccaaaattgccgaaacttacgctatttccatagaccggtctgtcgatttttatttatttttattctgttcataattattgaagtggagtgttgcaatttttcccctttttagttacaaaaaattccgttcgtttttgcgcaaagcttttgacgaaacgaatgtgtccgcgaatgaacccgcgcaattgacgcaaattcaaaacgaaattcagcaacaggccgggagtcagcctttctcacgggccgagttgaaggcggcatttgaccaattgtccgcggagaatatcattttcatggatcatgaccaaattcttctcttgtaatttcgttttatttattttattttttacttgtgtttggcgttttgataaatttggcacttttttcttttattccaacaaattgctaccgattcgtcgtctttaatcattttgtttttttccacatagttataaccgttaagcgtattttgtaatggccgctgataattttgacgctcaacgtattttgaacattttggccgagagagacaatttccaaagtaatgaactcgccgatcagttggccattgaccaccagcgactgatcggtgccatcaaaagtctgcaggtcaaagaaggggtgagcttttgtctgtttttatgcgtcatttattatcaaaattcattttatatcgtatctttacagaatgaccatgttttggtttttaaatagttaagtttaacaaccccgaaaacatttttaagagaaactttaaaaaaatttagaaattaatttctcaaaaaatgttcgagttcgggttagggattcggaattggtcgaaatggaggccggatttgttcacagcgccttaaaaaaacccctagaaaagtattagtattagaaaaattttcagaataaaaataaaataaaaattttcgggaccatgatcttcacaattccctttttagttggtttgcacttcggaagtcaaaatcaaacgcatcgaattgaccacggaaggcgaggaaattatccaaaagggctcccacgagttcaatgtgtacaaaatcgtcggagaaaagggcatttccaaatcagaaattgaagtaatcatgcaaaaaatagttataaacatttaatggatgcattctctgtcagaaaacatcctttggtcccatcggattgggcaaggccatgcaatgcgggtgggtgggcatggacaccacgcgacggagtgcctttggtggtgcggaaggtggcaaatgccgaggacggggccaaggagcaattgaaattggtgaagaacggaaagggcgaccaattgacggcccaatgcgtggcccaactgaaaaagcgcaaatggataatggaaaggtgcacaaaatgacattcagcgaaaagaaattgttttgcaaattttagcgcaattaaagccctttccgttgccaaagggccgaacttcacgacgactgtgcagaagcaggaattggatttgacttcggagatgattgcctcgtaaattgccaatgatgaccattttatttactcaatgtccatttcatgggttcgtggcgtggcaagcagttcaaacagtacaatttctccgcgatgggcgtgccgcccccctccggccatctccaccctttgctcaaagtgcgtgccgaatttcgcgacattttcttccaaatgggtttctctgaaatgccaacaaatcgctttgtggagagtccttctggaactttgacggtgagtaatttcgcttttccttacctccccttccctccctttagctttgttgcaaccccaacaacacccggcacgcgactcacatgacacctttttctttcacgtattgccccttttcttttacgttttttgctttttcttttatgttggtattctgaaataacctctttttccatttaggaccggcactttcaacagaattcccggaagattaccttgaaagtgtcagaaaagtgcattctgagggcggtttcggttctattgggtgggttttttcatacattttagtttttttacaattaattttcgctgattgttaagctatcgctacgattggaagttggaagaagcgcagaagaatttgctgaggacgcacaccaccgccgtttctgcccgtcagctttaccttctcgcgcaaaaagtgtcccttttcgatttccatcataatttctccgttgtttttctccgtccctccagcctttccaaccgtccaaaatgttcagaatcgaccgcgtgttccgcaacgaaacattggatgccgctcacttggccgaattccaccaagttgaaggcgttgtggcagaacgaaacctctcactggcgcatgtcatcggacttttcactgaattcttcaggaaatgcggtcaattagaaagattctttgtcttcctcatttgttactaattaaaattggaccatttaggaattgaaaatctccgcttcaaacccacttacaacccgtacaccgaaccatccatggaaatttacgcttttcacaccggactgaacaaatgggtggagattggcaattcgggcatgtttaggcaagaaatcattcattttatctatggctaattttgcatttaggcctgagatgttgcttccgatgggacttccggaagatgttgccgtggctgggttcggtctctctcgaacggtgggggttcggttcggcttaaatcagtctctaagcccccttttcaggccaaccatgatcagatacggcatttccaacataagagagctttttggccataaggcattcaccatttgctcactaacagataaattttttatattttcagattgatctcgaaatgatctacagaaaccctttgtgcaggttggagcagaaaaactagtgacgaaatgggagtgccaataaacattcgatgacttttttatgttgactgagctttttgtttgttttgttgttgactatgagtgatgagtgtaattaaagacattttattatctcacaaaattcttaagcaccacgaccataggggccactttcgtggcgagctcgtcgcccaggcgaaacactgcgcgcgcgcggtgctggctaaaaacggggtttttttccatttcctattcttaatcgtttcgttaccgtgccgaaaagaagatgcgatgcaagcgccaaattgaaatcaattcggtgctgaacatctgggaccccttcatctctttgctgacgcaagacaataacttcttgcagcaaggctcggacttggtcttgcacattttgcattcggacgtgcaattcctaagagagaggaataaaaagtgggaggggaaggaaagaaagaaaaggaaagaaatgggaggaagtgaaggagaaagagagagcagcaaggggggaggaacacaggaaaatgaggaaaaagagtaagctaaaaagagaggaagaaaaggaaaaaaaggtggaggaaaaaggaagtg

SEQ ID NO: 4504 - DNA, 1520 bp, Heterodera glycines
aatttcagcgcgtgttcgaactgtttccgttagtgatttgtgccagtacgcccgacttgctccattggcgaagtccattcagaatgatggagtacagcaaattgcgatattcggccagaatttcacagctcgcggggagaatcagcgagtgaactgcaaagaatggacaatatgattttgagagtttgtcattagaatatctaaacagttcgagacttgttgtcgacgtgcttgacgaagtacagcttctccagaaacagttgatgctccatgtgcggcccgacgcacgtccattcgatttccaacagcgggtgcgacttggacccgttcacacaatgtttcaacacatccgtcgacgacagttcgacgccgcaggcgcggttccggtgtgtggccgagttttccatacaaatgtcctcaaatcagcgccgcttttgcctaccctcccgcctccgtttacctgtgccgattttgaaaatcgatcgtgcagcagagcctgggaccagtagcggtcgttgtcgaatgtcttgtagaaggcactcagcttgttgacggcgacctgctcgaacttcttggcattgtcttgcccctcccccaaggggttattcgtcggaaggttgaaaagttcgtccaacgcattgaccaacgaacacctatttagagatgactcattctttggaaaatcaattcgcgtattcactgactttgagtcatccaaaaatttcctctttcgctcttcgtccgccaccgtcggaatgtcctcctttccctccaacaatttcagcgcgtgttcgaactgttctccgttcgtgatttgtgccagtacgcccgacttgctccattggcgaagtccattcagaatgatggagtacagcaaattgcgatattcggccagaatttcacgctcgcggggagaatcagcgagtgaactgcaaagaatggacaatatgattttgagagtttgtcattagaatatctaaacagttcggacttgttgtcgacgtgcttgacgaagtacagcttctccagaaacagttggccagccgtttggggtcttcgctgcacagtgtgcgccgtcaaatcgcagcattcgacgcccccggcgatgcatccgttggtggcaatgtcattgcgcagctccaccacttgaatgccatcttaaaaggcatttcggaatgggacagcactttgtctgggctgtacctcgctcttccacacattccaaatgccgggtggggtcaatgcgcaaatagcgaacgcgtgttggcagtcggagagtgtctgcacgttcggccagcagcgcggtttggagcagcgagtccaagaaggtcacccaattgccggtccagtaaagggtgccgcgctcaccgctgttgcaagtccggtaaatgccttgagggactttcgtgtcaaatggcgcggaatgcgggcgcccgttcacctttgaatgcctgtccgtattcgtagcctctcaacaaaaactctttgtacgcgtcctccgtgtccaactccgtccgctc

SEQ ID NO: 4505 - DNA, 4771 bp, Heterodera glycines
  unsure (1)..(4771): unsure at all n locations
cttctttttgggtgtaaaaaaacttatacttgtaggcacttttcttaaaaaaactaatgtcttgacagctttcccctaagagaatagaataaaaaatagtttaaataatgacaaaaaaatttcggaccaaaattctggtatgtagaaggggagaatttaaatctcgagctaatatgaaataatcagaaagggcacctaaaataatagtttatggaattgtgccaaaaattgaaatccatgtactatctcaaacataattttggtatctggtttatttataaatttatataaattttttatccaatccacatgaccaatgataggttaaatagtgatagttggcacctcttggctctcaaccttagctttgcttgacgacaaggttcgttttaaagattaaaggttctcactgttcacttgaggataatcgaactgttttaacactttcgactgcaattaaataattttttttaatagctcctgtcccttcattcttgacagagttgcccgagggctttgatcataaaaactcagattggaaatggctcggatgagcggtcaataattcaaatattaaatccttcagcttcccctgtgaggtctccttgttaataagctgctgtgagtcatttgtactgaaagtttcatttcgttttttgctaataaacctatctctatccatgatgatttcttccattaaaaaatcagggatttatcgggtacctaaggagccacattcgcatggtaaacccagtgttttctgaacctttagattattctcacttgtcttttttggtttgccaatacagttacagtaccccttaaaaattcggaaatggtccatctttgaagctaagagatctccaagcttctcagtctgagaatagacttggtataaaattgatcaggtttaagaaagccaaaaggattaaaaaaacaaatccatgttaggagcctatcaaaaatttcaaaattctcctttcctgtgagcttaatgaggaattcgcaaaatccttccgctttttgaatttgcaaagagccctttgtgattagtgaattaaggcttgatttctgttttttgtttgtcatatcattaaggatttgtatcattcaaaatttgagattagggtaaactgaccaaaagaataataattataattcaaattttatttctcttccataacttgacagattgccctagagacaaaattctgaaaaataaatattcaataatttgtgatgactaaactgtctcacaaaaaaaaaagtcaatgccataattataactccggtacagtcggtgagagtaataaaaaaaaaaaattttatgcatgcacgggcaaacttcatcatggcgaaatgggtatccaatgacccaaaaaataaaatgttttcacccaccatattttgacaaaaggcacaaaagccgtgaatatttttttttattcagagagccgagagagcagaatcagaatttttggccttttttcaactaaattttgccttatgcaaaaaatggatcatcacaaaaaaaaattgtacttctgctgatcataacaatgttagggcggtctgaaagttcctcaatgtaaaaaattgaaaaaaaaaattggccgtgagcggttttaattttctgtttaaatttggaagcatataaaatatttttttttaataatttgagtggcctaataacttccggagcagtctgttttagtgcgtgcacgcagggtaaagctcagcaaaatgtctccaatattatgtccaaacaaaaaacatcaaaagcggattttttttctcttataaggctttttttttggcgattaaatttcaaaattttaaatcgcccgtttaacaaaacattttctgccttagtttggattcttaaggctctttggcacataaattttcaatttcgccattcaacatgaaagaattcccgaaggagcgacgttccttaaatgtctaggcttttgctgatatgaattaaattgcctcacaaaaaagaactaaaaaataattattattgcctgtaaaaaaataacattcaattgcattaagcctcattcactcaaagccattgaactaccaaattaaacgcttgaaatggtccatttttgggtagctaaaagagattcaagtttctcagcttgaattttgtttgtccttaatatatttggtagcctttcagcaaaaaagtttggttttaaatttcaaattcttcacaaattatatcgattaatgaattgagctgcttgtaaaataacctatttatgttaatttaatttccatgcaattaaggctctgactggaatagtttcggataaaaaataatggcatccacaattcattttctagtccaatttaagatagtcccaaaattgaagaattagactaaaatcggaatcaaaataattctctgataagaaatattgaattttttttaccatttcttgacaaataaccctagggccgcaatttagttaaataaatatttaaaaagatacaggactgaatatgtaagagagacttagaatgttagcctttttgctaaaataaataaaattcctcaaaaatctcaaaaataacaataaaattatattgacaaatttttgtaattaattgcttttgcattttaatttgaaaggctgagaaaatttcagaaaattgctttaagtggcttgccttcacattccattcttcggcgttttcaggggtgtaatgcatttccggtacagtcggtgagaataatgaaaagaaaaaaaaattttatgcacgcaagggcaaagttcacaatagccactgggtattcattacctcagttggcaaaataaataattgagtactttttcatcatccaaaacttgacaaatggcccaaaggccgcaaaaatattctttattctgatgagagccaaaagcgagcagaaacatgctgcttgaatttgtttggcctttttcctcatagacttggcctggcctataaaagaattttgacttagcataacattaggcggctctgaatgccttttcctcaatataaatttaaaaaataatagcccggagcgctttgagtttgctattaaattatggggagcagcacagaaaataaatcatcctttcgcttaattatttccggagcagtcggccttttacgcgcagggcaaagttcatcaaaaaattccaaatactagggcaaagatttttatgtaagagaaaaaaacgctaattacaattattaaataaattatacattaaaattgccaaagtaccagttttaaaaaaagtatattaacatataaatctttgccctcttaatatgcccaaacaaaaattaaccaatcggcgcaatcatcaaatctgtggcttcaactgataaataaattggggctgtcctcaaaatttataaatttatttggccattgagcgcgcggcaattcataaaagttatttaggcttaaaataggtcttttcacggcacttcacaaaatcttggccattaaaaaattggaccggtccttgacagaactcccgaaggagcggcgcgcctcattccgttctcgttcccctacacacgcaaattcccgctcgtcctcctggggatggattgccagcggcgtgccagcaaccatccggtgctaccagtgaaggtgctgatgtccagcccagaatatgaggaagggacgagggaaattggggattggatttgggggaaaaaaggaataagccaaaatccgggccctggataaatgacctccccaaatttgtaatcccatgggcgcctattagatctaatacgcgtgcggggatgggcgagaaggagtaaaataataatataaatattggccaattacattaataataattccgccgcgttctgctctcggctctcgctcgccgattaactgcccgctcaactgaccccttatcgagagaatgctcccgattaaatagttggacttatggaacggaataaagatggggaaaagcggggataaatggtgtgagaaagagattgaacggatgtgataaattgcgccttacaatttgaatttatattttaaatttagtgaactatttttgaactcaatgaatttcgacatttgtttaattatataatagtttatcgctaaataatttaattttttgttatatttttattagggttttcactaatcatttaatttttctttaattcaatcgtggaaagcgacaaaaaaatattttggcataaaattccagagtcaaaattgcttaagcaattttaattatctacgctttattttatttatttattattcataaattatctttttcattcttggaaagaattatttacccgtggcaagaggaaaatctaattttagcaaaatatttttgaatcattttaccattgttctcaatcggatgaaaatataaccctatatatttaattttgccttctttgccttttatcattcaaattatcataaaataatttttaatatttcattaatcataatattcattataatttttttaaatttttgtttaatttttgaaattaacaaaacttgatttaaaaatgcagaagttcgtcgataatgtatggcacgtgtagatcaaataacccaataataaatatcatctgttattcgatattttaaaagttaattttttcttttcattattccacttanatttcgaanaagcattctcaataatgttntattttttatttttttanatttatttgttaatttttaaatgaagacgaaatttataataaattaata

SEQ ID NO: 4506 - DNA, 4552 bp, Heterodera glycines
tgtaatggatttccggtactcggataatgcactgtgagagaaaaaaaactttggccgattaagcaatttaaagtgtaaagattaaagtttgtcagcataaaataaaacaacaaaataaatttaattaaaaatcaacaaaatgatactcagcaattaggtaattaaagcatatcgaagatttttatttgatctgacggattatcatggattgatttacaaattttaattttggcctcttacttgacggtactcccaaaggagttcaataaatattaaacttttttttgctgacaaaaaaaaggaatacagaaaattcttatttcttagcaattattcgaagagagcgagcagaataaataaatttcttataaaatggtcacggcgaatggggcagagcaaatagaaacgaattttggcgcaaataaaaaaaaggctcctgcttttgggcgcaacattagacttgccgtttggcgcaaaatatgtaaattggcctattatttttttagcgcaaaatgaatttggcgattttttaaatttattttttttttaataaaacaaaaagccttcccattataggggcaaaaaaaaaaacctgaaataatagacttactgtttggggcgaaatattaaatggtcatttctcttttagcgcaaaatgaaatttgcgatcttttttaaaaataaaatgaagacttcccattttggggcaaaaaaatagaattgccattttgtcgcttgacttgcctttctggcgtaattacttttagcgcaaaaataaaattgtttttttagtaattataaattgacttcccattttcggggcaataaaagtatccaaaatataagttttcccattctggggcaacaataatagacttcccatttttggggcaaaaaattttaaaatattttcaaattagttcgaacttggccatttaatttttttgatccgaacatgactgatctcccgaaggagcggtgcacctcattccattctcgttccccaacacgcgcaaatcccactcgtcctcctggggatggattgccggcggcgtgccagcaaccatccggtgctaccagtgaaggtgctgatgtccagcccagaatatgaggaagggaacgagtgagaacgaggattggatttggggggaaaacggaataagccaaaatccgggccctggataaatggcctccccaaattggtaatcccttgggcgcccactagatcgaatacgcgtgcggggatgggcgagaaggagtaaaataataatataaatattggccaattacattaataataattccgccgcgttctgctctcggctctcgctcgccgattaactgcccgctcaactgaccccttatcgagagaatgctcccgattaaatagttggacttatggaacggaataaagatggggaaaagcggggataaatggtgtgagaaagagattgaacggatgtgataaattgcgccttacaatacccaatttaaagaattaaataatttgccacaaaatattcaaaatggcgaatgctttggcattttaattgagccagaggatgaggaggccgaaatagagcattactcactccattttgaaattcatgtgaaaccaatgggaaatgagtgccaaccgtcacaggcggatgaaaatgatcaaaatccaccggcggatcaaaatgatcaaaatccaccggcggatcaaaatgatcaaaatccaccggcggatcaaaatgatcaaaatccaccggcggatgaaaatgatcaaaatccaccggcggatcaaaatgatcaaaatccaccggcggatcaaaatgatcaaaatccaccggcggatcaaaatgatcaaaatccaccggcggatcaaaatgatcaaaatccaccggcggatgccgaagacaatcggacaatattccgaaaaatctcattaaaattgtacaggccaaacatggcacaggtgtacacggttaatttgggcaaaattgacccgcccgaattgtattttaaccgcacaatttttgtggccaaagaaaatgatttgaccaattatcatgccttattgtatgccctaatgcacaaaaatcaagaagattctgatcaatattatgatctgttgggctatgtgcaactgattaaaatcaaggacgaagaagaacaagaagcacacgccagctcacaatcagaaaagaaagtaaacgcaaaaagcgaacatttttaaatttgaatttggcattatgtcccaaaatcggattcgctcagttggacgctcaaggttgagcgccagcaagcttttccactacatatcacttttttatttgtcatccaaatccaacaatctttgtatcattcgaaagctcttcccatgctctattagcgttacaaaaagcgaaaagattttcatgcctgggaaaaaaaaattcaaaaatttcgacttttcgcaattttcatgtataaccttttttggtaattgtctaatcgcgactcaatagtttagaaattgcttgcttgtaaacatgttaagagctttcgataattatattattattattatgcaattttcagttcaataaataccaattgaaaattccaattaatcaaagtgcgcttttcaaacattgcattcataccttgacgttgcaaatttgttcttttgaaaaggtacatttattaatattgcaaattatttactaataaatgaaaattaaattttaaaaaataattgaaataattttaattttttgtatcttaaatttcgaaatatttcaatttactaccgaaaaataaattatcaaaaaacaataataatgtgtgctaatcacttaagatgctgtttttgcaaaaatgcgttaaaaacgaaaaatatacccttaagaatcgatcctaaaatttccaaaaataagcacccctaataaatgtaaattttcttaaaaattcatctccaaaatttattaaatttttgttgacaataatttttgattttaaaaattatttattcaatattaatttggcttaatttcgttacctttttgaataaatttgttcattttacacccataaatttgaggctttttagtgcctattttggctgtttttaaagcctaaaaatattagctctagtaatcacatccaaattatagaatgaaaatcacaatgaaaaaatggagaacgaagaagaaactgagccgaaagaatgcccaatttgttatgaatcatttgatgatgatgacaaattagcaatgaaattgcatgaggattatcaggctaataatctcaattaattaattaataattaattaaattaaatgctttagcatgtgtttcacaaggaatgcatcactcaatggtaacaaaaatgaattgaatgattcaaataataaaaccatttttaggattttatccaacggacaattattacgatgtccaatttgtaatagaaacgcatttcaagtcattttggtacaattttaatcgccataaaatattattattagctggtcgcaattcagggatttccgtaataaataagccgtaaaattaccatgactatgggagggcctgaaatgcgcgaaaaacatattttagcttggtttgaagcttctaggatggatttgtatatccatattgtggcattatgttttcatttgcagatttatgtaattaaaaaatctggcacacaaaaaaaaaactgaaaaattttgactcaacaattttgtcacaaatttttttaaaaattaataaaaattctaaatctcatacaaaaatgcaaggtcgtttaaatgaattcttagaggtgtattttggatttttttttctcgtttctttggggtgtgttttcattttttaattatatatttttgttaaggatttttcctaaaagcatgaaataggcgccaaaagtggcaaaatatgcataaaaactccgccgaaatttgcctaaaattgacagccgccctaattattatcattgatagttttttcggttcggctctcaacacgttttaacttatttaggtatatcttcaaccaatctttgatggacctgctgctgtccatctgccatcaacttcatttttgtatttggaccctttggcatttttattcaatttagcggcgaatggaggacaaaatgaaaattatgacgaatttaaaagaaatcaagcaaaatttgcaattaaaatgtgtgaagaatttgtgcaaacatatgaagcccaattaaagcaaattgctatggaagtagcagaatttgtgaatgtgaaaaataatctgtcggcggagcaaaaattgttcgaaattgggccgaacggagtgaaaaacaatgacccaattgttgaggagattaagcagctaattgccgaaacgctttcaaatgggcaaaattattcggcagaaataaaagcaaaaacccaccaaatgaattctttgatctataaaattcataatttggactcttatctttatttggcttcattcattgaaactatgcaattgatcagtgaaaattgagaaaagagacaatggaaagaatgacgaaagaaaattgttgctgatt

SEQ ID NO: 4507 - DNA, 1210 bp, Heterodera glycines
aaaattcggcaggttaccgccaccaaatttacgattcaggaaaaagaaaagacggtcattggcattggtaaaggcggttaccctccccctccttcctcccgaccattcgcccttttggcggcgaaacgtttcttttctcaaaaagggctgtgccgtgtttgcacgtcgttctaatgccaaatacttccacttcgatgcactttcgtccctcccctcagatcactccccaagttcgcactgctctgttcggtcccaatcagaaccgccgcttcttcgactgatcggtcccttcgcttcgaccattccattttattctgttcacttagccaatagtcacaaaggtagcgacttgggactgatgctgcaaattcggcccttcttttggctcttgttttctatggatttcgccggacattcgcttttccacccattgatcataatttgtcacttgcaaataatgcattaccaagtaataaactgtcatttcccatgccaattgggcactgttttctctttccatccttcgctgttgtcgttttgtcatttcctccccccttttccccttttcttatcgctctcctcccccaatcgtttgcctttccttttgcttccccccaatcacttctttcactttccgtttttggttgcttcgttggcttaccttttttgccttcccatttttcccctttttggtggtgaattattttctcaatttttcgccttctctttgagcaattgccaattgtcccttccttttcgaccgttttttctatttccgtcgcttttcctcccctcccaaaatgggcgaagttcgctttcactccgattacgtttcctccaaccgcggaatcaccaaaatcatccaaattgtgctcggttttgtcgtctgttcggtgctttgttcgaattggtgtcaaattgcaaattaacgtggtaaaaacacacaaaacattttgaggtatggcgggtacagctgtttcggggagggccgcctcggttatgtgagcggattgaactttgtctgtttgatgattaacatgtgagttgagggaaggcggcactgacaaagagcaaacgcaaatcatcgcctgaggaattgtttgttttcataataataattgatataaattgtcggattcccccccccccccaatcggttgtcttttggtaggctaattgatcaacaattcactgatcagcagctgataat

SEQ ID NO: 4508 - DNA, 3601 bp, Heterodera glycines
gacttttctcgagtcgagaccgagatttttttaaaatcttcttgttaaattaaaagtgtattaaaactttttacaaaatttaatcgatttttgaggcttttctaataaacttttcttttttgaattttgatgattcaattacatttttatcaattcaacgttaaactaattaaaaataatgaactttttttcgataaactaaatgaaatcaaatatatatttttgtataagtacaattgcaaaattgaaagtttgatggattttttcattaaatatataattaaattaacaatacttgatatttatttattataattgaatatttactaaaactttaattcaatcggcattgcttatttggtaaaattgaaatttctccattgcaacctcgttggccatctttcgtcgctccctccactcagtcttctgtcctttgtccatccattgcttgctgtgaattttaaggccttttgtatccaccaatcgctgctgccgtgccgttcttttgttcaaattcctagagtggagggggaaggggaaccagagggggggggggggggttggtgctgtggtgtaatgggccaacactgtgtttttgaacggctgtcaccattccgaatccccaaaaataaaaccgaaaatggaagaactccaaaatttcacaatgaacagttttttaacttttggtcccaaattagcgttgtatatccttgtgaaagaatccaataatttcttgttttttactcacacatttcgtggcattttaattgattttttgcagtaaatgtgaattttgttgaaaatttggaatttcaaatttttgttcgaattcgggtccggggttcggaattggtcgaaacggatgccggattcgtgatcagcgaccccgaaaacctattaattggcattttaatcatgaaatacgaaaaaaaatttatgggggttaaactgcataagagccttggcaatgtcttaataagctgataagattttgttttccttttgtcagtgtccgattgttttgtttggttttgtttttgggttccattttcatttttattgccttttgttgatcttttgagcatccttttcctgctcaatctgttcaacattcgtccactgaaacttgaacaattgtacaatgtcgccgccgcccttcttctgctcgtcggcatcgtccttctgttatggtacatgatacagtactcttactggaacatttggatgataatcgcagcggtaccttttgctaattgcctttcgccttggatttgatcacttttgtttgctttttgggtctgtgtgctgatcatctttttgctctttcaatgggacttcaaagggaaccgcacaatgtccgaagggcacttgccaatctgacgagggacggaaaacaaacggaagacataacgccaaactcaccgcattttcaaataatgccaaatgcttttctttttgaaatgctttttgaacatgaaaatgcctttccatttctttatttttcccgttcgaatgcttttcctctgccgtcctttggtctgtccccgcccattttcgcctccgatgagataaaatcagccgaacgacgcgggaagagagcaaatgcccgttttgctcattcattcatccgtattccctctcaacccccactcgaataaatcagtcgttttgttgggatttgctttgattagcccaactttgctcctcctagccttgttccgttttccttcttctgatgtcagagtattccaaggctttgctttctgaggaagcggagtatccgtgccaaaatgtcaaagccaatgaacgcgtcgtggtaagtgcccaattcggcactcccaagacggaatgacttaggctttggctgttttgtccgcgttcgtcgacgcggtcatttccgctgttctgctgtccctttggctgcccttctctctgcccctttggcccctcttcggtgccattttcctctccactttttacgcctttcgtcgctccaacccaattgctcttcgtcctttgctcattttgctggtttttgagtgccacattttccattgaccgtttgtttcttcgtccctttcaaatgttcgctttggcgttgtgtcccactctgttcgttgcgatcgtccttttctctgtccacgaccctttccgtgccgtctgtttcctcaatggtcccatttccctgctttttccccaactttccctccgttaagtttttctgccatttgtcccttcccattcgtcgcctttcgccgtccttctgcccttttgttttgtcctcttctgttcgattttgtacttttactggcaattgcacagcttttggcattgccaaaagcattttgaggagacaaagcgatgggacaattcaaaaatgaagggatacgccgaattatgtgagaagagaagcgattggcgcatagtcaactgatgatttgagaacacattcagatgtggccgacccctttctcagttgtgtttctgctgagaaacagcgattggagcaaaaacagtgagtgccatggacaaatccatggagagggcacgggaaagggttcgggaagaaatgtgggaaaggattcggggagcgtaaggggtaggacatggaatgtgccgcccctgtgcataattcagaaaatttaagcagcagccccccacaattttttgcgccaaaggtactcgctcggccgcttcgcggcctcgtactggtgccttcggccccccacaattttctgcgccaatccaccatcatttaatcactgggactcaacccaccaacattccaatcaacgggactcacccaccaacattccaatcaacgggactcaactctccagcattcaatcactgggactcaactctccagcattcaatcactgggactcaacccaccaacattccaatcaacgggactcaactctccagcatttcaatcactgggactcaacccaccaacattccaatcaaagggactcaacccaccaacattccaatcaacgggactcaaccctccagcatttcaatcactgggactcaactctccagcattcaatcactgggactcaactctccagcattcaatcactgggactcaacccaccaacattccaatcaacgggactcaactctccagcatttcaatcactgggactcaacccaccaacattccaatcaaagggactcaacccaccaacattccaatcaacgggactcaactctccagcattcaatcactgggactcagctctccagcattcaatcactgggactcaacccaccaacattccaatcaaagggactcaacccaccagcatttcaatcagtgggactcaacccaccaacattccaatcaacaggactcaaccctccagcattcaatcactgggactcaacccaccagcattccaatcactgggactcaacccaccagcattccaatcactggcactcaattctcctgcatttcaatcactggggctcaaccctctagcattcaatcactgagactcaacccaccagcattcaatcactgggactcaacccaccagcattccatcactgggactcaacccaccacattccatcactgggactcaac

SEQ ID NO: 4509 - DNA, 3421 bp, Heterodera glycines
agtgatgccatcaaccaacaaacacaatatggagggtggaaataatttcaaagcctaattaacggcacatttctattcgaagccgtccaaaatctcttcgaacagatttcgaaattaactttgttaatagtgccgatggtacggcaaccctaaagaaggggttttccggtggtgaacacaaatctgactaaaacttttctcttcaaaagctaaactcagctcaatcatttgaataaaggttttctctcttgatgaagaagagccaaaagcgaagcgacgagccgaggaagagggccaacagcaaaagcaaaaagagacgaacagtcaaatcagaggcagcggatgaggagaaaaggaggaagataactaatgaagaaagtgttgatttatcgaatatgaaatgcaaaccaaaaacgacaaatgcaaacaatattaaagaaaaggactttgggttgtgctgagggagtgccgctgaaaagcgtttacggcacgctcatttggtcgagaatgggctcattacatttacaaaattagtaatgatatttaaacgaggaatatcaaacacagaaaatgcatattcattcatccatacaacaaaaaaatctggtagagaaagaagcgagcaaaaaagagattcggagggaaattggcaaagaaagaacaaaaaataaaaacattaaatcccgccactgttataattagcagtgttaacggagaaaagagagagagtaaaaccattccaatttctaatttcaagttttcttttttaatacaaaaagctcacttcctcttttcctgtttctgctggccacatttccacagcagagggattttccgactgacaaaaaaacattttttaaatattgtacaaataaaatgccaaatatagaggagtgattaattggaagctcaaagaaagctttaatttgttgagaggcagcacggaagacggtggaggaatgagtgaggagaacaaatattacagacaaatgttataaaggggagaaggaatccgactcttttgaaataaaaaagttcaccttacaaatgccaccttacagctgctattgtcgtcggattcccagtccttttgagagagaaatgaatgattagaaaaaagaaacaacaaagaaacgaggagtgacgcactgaaaggagaaatgatgatgatgaatgattgtaatggtgcaaattagtggaaaatataaaatcattaatggggggggggaagaagagtgcctttttggtgatataggacaatgaatgataaaataacaaacaaaacaccatcaaaaacggccgacaaaagctggagacgacggtcggacggaggaggtggagggtcctcagctcagccaatcactttaaaatgctggaggagagcagaagggcactgtccgctgtgtccgtgccaccgccgacggggagccgaggcaaacgacgtctgaagcgagaagggtgacagggaaagggcgcacagcacacctaagccaagggtgtttgagcgcctgtccgggcgtcatcctcgcctcggggtcccagtcgagacaccgcttcagaaagtccagaaagaggtcgtccccctgaaaaggcacactttcaatatgaaagagactagcaactgcaggacaacgaaaaagtcacgtcgcggggggggggggggggtcagagaactttacccacctgatttttcagtgcgctctgcattgttcgtgacccgggcggtcccctcagtttgcccctttttgatcgtcccccagtcagaacggtggtgccgtccataagctgcaaggatgccgaatttagacggagatttgcccgtcccacctgagtgacttggcaatagcgcgggtgtcccttggatgaaaagaagttccgagatcgctttgcgccctccaatagtttcggatttggcattcccaaaagttcgatgaccaatgctaactgaaaatggaccaaacgtaaaccttaaaaaatttgctgatttaaacatcgaaatgtcattgtgcatttcctttcaccaatcgacctgatcattttcatcttcgccaggtaacaatgggtagcctgtgagcaattccgccagaatgcaacccagcgaccacatgtcaattggcattccgtattttgcgccaagtatcactaaaagaatttttaattcactgcctaatgggcgtgtaaatgccttctggcgccctataaaagcgcgattggatgtatgtgtaaatacgctggtcgtcaaaacaagaggagccgaagtcgatcactttgatcgaagatcggtttggcattttgagtaggacattctccggtttcaaatcacaatgaatgaggtggttcctgtgcaacaattccagacattgaagcatggaatgcgcaaattttctgacaagctaaaaaagagacaaaattcagaggtgtcaccaattggcgatgaacactcacggtgagattgaacccttggaacttgtttttcttgatcagttcgtacagattgatgctcatcagctcgaaagtgatgcatttgtgatttcgaaaagtgaagtggtcgagcatatggatgacattgtgcgacccgtccccgtcttgtttcttcagatggtccaaaatccgaatttcctcctccgcttgtctatggaagcgtttctcgttccggacaagcttcagcgcgacgtattgctggtgcttgtgatcgtacgcttttatcacctgacgaacagaaaattgttgaatggcaaattgtgtaatttccatttttacctgtccaaaactgccctttccgatcactttgagaatttcgtaccgatatgcgatgtgatcgtgggaaaccaacgcataagagccattctcgtcgtcaaaatttgagttgttggctccacccgcaacgcaaagtcgtttcttggcttgtgaaccaacgaaatatacctaaaagtgatgccaaagtatttaaggccaatgacaaaggcgcgctttgcccggctcacccgttggtagttgaacagctccgtgtgttcataaggagtgagcttggagccgaagatcctgagtgcttcgtctggtcggtaccctttgttggcggttggtcccttaaatgatgcgttcgttagtttctcaatgattgcattttggttggtctgttagcagcgcactgttaacctctagaagccctgtggttaacccgtggttgtcttattgtatttattcaatttagctcaaacgctcatcgtgggggaaagaggcactgaaacacaagggaacccaaggcattaaaaatttagaaaaaattacaatatgcaaaaaatttttggaccggaagagcaagcaaataaaaagaaagctccgggtgcccttcccgaattttttttggctacgagcgacttcagcaatatttgttttgtgtgtaaatcatatggactctaga

SEQ ID NO: 4510 - DNA, 1924 bp, Heterodera glycines
  unsure (1)..(1924): unsure at all n locations
ttgcccagttcagtccccgnttgaataactcatcagtctttgacctgagcgcagggtggccagcggacttattgtatagctcggtgagctcgatttttccaaatttaaaaatttcgaaaattttcaaaatttttcgagctaggcctaaaaaacggtttttgggtttttgaattttagtattttttaacgaattttcccagaaaaacgaagaccacttccaaaacatagtttttcgagctctatcgactggtatttttttcggaaaaatttcgattttttcccggaaatagaaaaaaattttggcctcagcgggacatttgagtcctgggaccataactggtcaggggttggttttagccaaaaagtgccttagaccaaaattgtagagctttttaagctctatcgaatggtgtactacatgatgtaaaattttcaaaaattttcgagctaggccccctagaaattttcaaaaattttttttgggttgaaaaagatggtgaaaaatatttttctggggttttttggggtgctgagtacgaatatgatgtctattttaagtttcataatttttggaattttttaaaaattctttattttttggcaattttttggccctcgggattttggcctaatatttgaaaattcataacaaatcgaagggttgatcaattttacaggaataaagccttaaaaatagagaaaaataaggagaattttatgagatttatttggttttataatgttcgaaagaaaaaaagttattccagaatttctggaaattttcgatttttcagaaaaaaattcataactcggttctgaaaagtcatactgtaaaagtaatatacaaaaaaaatccgcaattttttgctctattatataaattttatttggcatttttatcacttttttgagagatgttacaaaaacaaaagtgattttggggttcgggaccaaaggggggtgacaggatttttgactggaaaattttttttcacaaaaatcttccaaaaacatgtcattaggggttaatttattttataatttttaaaaaattattaacacattcaatttttaattatattttttataaaaccatttccttatttatttaattttgaaaccatgattttacccttttaaactattatgtaccattcctacaatttttgtacctactaataactgttgtactcttctaatcactgttttgcctcttctgatcactgttgtacctcttctatttcctgttgtacctcttctaatcactcttgtacctcttctaatcaccgttgtacctcttctgatcactgttgttgttggacgcgtgcgggcgcttcgcgcccattaaaatccaaaaataatgtaaaattacttaaaatattttgatctttttaaaaaatatagaaataaactaaaaacagtttgaaattaccttttacatggttaaaaatttaaaaatttagcctattaaatatatttttttaaatttattatatttttttttgaaaaattccgacttccgacatttttggggtcggaattccgacttccgaaaatttttggggcatcggaattccgacttccgaaaatttttggggcatcggaattccgacttccgaaaatttttggggcatcggattccgacttcccacttccgaaaatttttggggcatcggaattccgacttccgaaaatttttggggcatcggaattccgacttccgacttccgaaaatttttagtgcctcggaactccatccctggtgcttagcgcccgtttttaaatattttaattttttttaggcctaagaggaagttttgcaacaatttcaaatttaaagaaaaatttaattaccagactttaaaaattaattgaaaaaagtaccggaaaaaaaaaatttaaaaaaaaaaaaaaaattaaattt

SEQ ID NO: 4511 - DNA, 4812 bp, Heterodera glycines
  unsure (1)..(4812): unsure at all n locations
tttttctggggtattttggggtgctgaatacgaatatgatgtctatnntaagtttcatantnttnnggattttttaaaaattctttatttttggcaaattttttggccctcgggattttggcctaatatttgaaaattcataacaaatcgaagggttgatcaattttacaggaataaagccttaaaaatagagaaaaataaggagaattttatgagatttatttggttttataatgttcgaaagaaaaaaagttattccagaatttctggaaattttcgatttttcagaaaaaaattcataactcggttctgaaaagtcatactgtaaaagtaatatacaaaaaaaatccgcaattttttgctctattatataaattttatttggcatttttatcacttttttgagagatgttacaaaaacaaaagtgattttggggttcgggaccaaaggggggtgaccagtatttttgagtggaaaaattttttcacccaaaatcttccaaaaacatgtcattaggggttaatttattttataatttttaaaaaattattaacacattcaatttttaattatattttttataaaaccatttccttatttatttaattttgaaaccatgattttacccttttaaactattatgtaccattcctacaatttttgtacctactaataactgttgtactcttctaatcactgttttgcctcttctgatcactgttgtacctcttctatttcctgttgtacctcttctaatcactcttgtacctcttctaatcaccgttgtacctcttctgatcactgttgttgttggacgcgtgcgggcgcttcgcgcccattaaaatccaaaaataatgtaaaattacttaaaatattttgatctttttaaaaaatatagaaataaactaaaaacagtttgaaattaccttttacatggttaaaaatttaaaaatttagcctattaaatatttttttttaaatttattatatttttttttgaaaaattccgacttccgacatttttggggtcggaattccgacttccgaaaatttttggggcatcggaattccgacttccgaaaatttttggggcatcggattccgacttcccacttccgaaaatttttggggcatcggaattccgacttccgaaaatttttggggcatcggattccgacttcccacttccgaaaatttttggggcatcggaattccgacttccgaaaatttttggggcatcggaattccgacttccgacttccgaaaatttttagtgcctcggaactccatccctggtgcttagcgcccgtttttaaatattttaattttttcttaggcctaagaggaagttttgcaacaatttcaaatttaaatgaaaatttaattaccagactttaaaaattaatttgacaaaaagtaaccgtaatagaaaatttaaaaaaaataaaaaattaaatttacttaattatcgatttattggtatgaaaaattttcaaagacctgttgtttacttgagtaaacaaatcgtgggtcaatattattgtttgttgaataaagaacgtaatcaaaaacttacgtacttttaaaatttgctcatgttaatggtcatttggtttagctgttctcatatttttttaataattaaattattttactataattttttattttacatttttaaatcattaatttataattaatatgacccgttttgggccagtgaaccaaagggccagtatttcgccgccccgtttggttgcgccggagttcgtcgtgctacaaattgggcaagctgctgtaagcagccaacaatcgcaacaaattccagaaaatgtccatttgattaacaaagaagagggggaactttcggattctgggggtgaatcatcagatgaaattcaatttgttgcaaatgtccccgctcgcggacaaaatccatccgcagcttctgagcaacgccgggcccaatcttcagtgccgagaatggcttggaaccgacgcccaccactttctgtcagctattatgtttttaatggggtgcaatagaatttattatttatgaaatatttttttacttaaatttattaaaaattgtgctcatttaaagcgacgttccttcggcattggacaccaaaggcagcaatatcgtcacattttgccagtatgtaaaatttaatttaatctattaaaagaattttaatatgtcaaatttaatttaaataactgatggaaaattttgaaaaaggtccgcatttataatggaaaaaataaaaaatttgtagaaatgtactctaaaatcgattaaagaaatcctctttttttaaatactgatttatgtaatatttttgattatttacattctctctttcgttaaatttttgttattacaataaataattcatgcccttcttattaaataagtgcctttttcttttagccggtccgtatcacgcccggaggtcctcctcagccactttttccgccaattgttcaacctgttcagccatctgttccgctaaacgttccgtcgccattatcagtatgaatagaattttctgtccaaacttaatttctttgctgattagctatggaaaaagaaacacaaaaaagcattttctccgtacaattttgctttaactgactaaattaatacaaaattcatatttggatgttttggtatataatgcatattgcacatatgtatttttgcagtttatacagcattttaaaatttcttaattacttcgagtgccaaaagaatccaattataatttattaactggtcattggactcccgtttgaactttcttattaaaaaaactatttttttttaataattaaaccctaaatccatttaaatgtatttgattttaacacatatttaagcaattttttatattttttcgcttttaaccactaatgggttttttaacacatgtcttcttcaatttttgagactaagcatataatattcccttccccagtcatcagttccaccaaacattccgccaccagttcaaccaaatcttgcgcggccatcagttcagcaaaatcaaccggcacctgttccgtcttctgcttctgtgcccccttttcttgtaccgaattatccccctccggcgcttcttcgtccttccttttccgcttctccgaacaattgtcttcctttttgccaattttttatcaccgacgtgaaaacatttaaaaacaccaacaatttcaaataatttaaaggtttttatattaaaaaagtttataatttaatgccgttttcgcgcaattcatgtttccttattatcaattgttttttccattttattgttgatatttatcctaattttattatcaattgtttatttattcatcttatcattttgcaatattcttttgcttccaattgtcaaatattatcatttttgattttaaactataaaattcaatttacgaacagacatttctaattctcgaaatgaaattacatttttgaaaaatttttatatttattgcctttttcgggcaattccttttccttattttcaattgttttttcattttattgttgatattcaacttcttttatttgttatactatttatttcattttttggacattcaagccactcaaaccttggccgcactccaccagcacgtcgttttttcccttcttcggccctttcttttccccaaaattcttcctcaacttttccccaatcggccttttctgttccccctcctccaatttcatcggctattcctccaaatctcgctgaaaatattcattcaaaatccaattctacttttgttatcccaaaaccgccatctccaccttcttcaccacaccattgtgtcaaacagtacaatttcttttagttttgtttgttaaatttctgctcaatttttgcaaaaatcggtcaattttttttttgcatttttgaacaaatttaggggttttaaggttcattgggcttttatttaatctttaataattgcatttttacgcgcatatggctttaaaaaatgcctcggttcgaaattagcaatttactatttagaaaaaaatctaccaaaaatggccacattttttttcaattttttgaagaaaatccgggtctcgagggttcattggattcttttactaaaaaacattaaatattgcttttaatttaataaatttgtatggttttctaaagtatcaatgtactgtttattaaaaaaacttgctaaaaaccgaccaaatttttttaaaattttacttttcattgttttcctttatactgggtcacaaaatctcaatgtaagctttagttaaaactacgctattcagaaaaattttagaagaaaattcgtaaataaaattttgcaaaaaatcgtatttttactgataatttttttggcagaatttcataataaaaaatggaagttttttgaatttaaagttaaatttggtcgtaatttttacaaaattttctttttctctttttctttttttaaaatttattttcaataggcactacggagggcgacgcgttggatcagttgggctgcgccactactgctgccgtcgaatgctgttgtcgcacgtgggcctgatcgaaaaactgttgattttttggtaagctgggttgtgtttttgtggttacttatttgcattttttcacgcatttgacttttctgggatttaacatcccgtttaacggctacgaaaaaaactatagaaatgtatttcgtgttctatagctttcaaactacaaacaatcaagcgaattttatctttttgacatcacaattgcccanaatttattccttttata

SEQ ID NO: 4512 - DNA, 5183 bp, Heterodera glycines
  unsure (1)..(5183): unsure at all n locations
aaattataccaccccccttatttgttccccctagtgtgtttgtccatccgaaatcgtctcctcgatcgaatggtgtatacatgagcgcagctccgcagcggggtcagcacatttgtcaatttcctcgatgacgaatttggattttgagcgcaccagttgatattttttactttttgaagtgaggttatcaattttacgaatacatttattggtttgagattttttgggggagggagatgaagattgggttttggaggcacgcttcatatttatagttttttttttttttttattgattgggtaaaatatggatatatgaataaaggaaagttttttttttaattttatgaagtaaagtttttataaaaattttatgatttaattaagtttattggagttttttatatttttaaaattgagagatttatattaaaattaagtggtgaaattggtttaaatagtgagcaaagaggaaaagcaaaagcaaaaaagggtaagtaggtaaaagatgtaaggatacgtagaaaattaaagggatgagcacgaacttttatttttgtaattaattatttaattgtaatattatttaaattatattgttataggtttattggaagattatggaattatatttttatttggtgaattcggtttaaatagtgaagaaagagggaatgcaaaaatttaaagggatggtaggaaacaaaaggttatggttaaattggtttaaatagtgcgcaaagagcgaggaagcaaaagggaaagagcgctttagtcgtttgcagaaaaatttcaaaatttccaaatgaatggaaaaaatgcacttttgctggaaatgacaggctatttatactccaccgagtaggcggggcttatttttcggctgggttaaatttggcaccttgccaaaagaggcagctgtctcaagcacagaatatctgatgttgggttttgcatagttacaactgtcacaattaatcattgactcacagcttgacctcaattccaagtgggatattattgacacttccgtgggcattatacagtcaaaatgcgtccaaggggttattaatgaccattccattggctttggctcggtcagaaatgcaccaaaagaattcccaaggggataattaatgaccactagcttcggttggacatatatgttcacaaaagaatggttaatggcgctcagttggcttttggtacaacagactccacatttcctaatgggatatttatgacactttcggaggcatcagttagaaatgcactcaaaggaaagattaatgaccctccgtaggcttaggtttcggcagaaatgcactcaaaagaatgattaatgaccctccgtcggccctgtgttggtcaaaatgcatttaaaaggaatgttaatgacactccgtcggccctgcgttggtcaaaatgcacttaaaaggaatgttaatgacccttcgtagactttggctactcaataggctttgggtctcagaactgaaatatcccgtgggcactgggagtgaaatggctaaacttaaaaaataactctggtgctcaaatggcaaaaagaaaaataactctggggctcaaatggcaaactgaaaaaataactctgggctcaaatggcaaaaagaaaaattggcggtgaaatggcccacaaaaaatctggactgaaaaaataactctggggctcaaatgactgcgctgtaaaaaataactcaggggctcaaatggcaaaaagaaaaataatcttggcgctgaaatggcccacacgcgggcgctcaggtggcatgcgtccctttccttccctataaggtatgacagctgacgtcctccctctacctccctttccttctctaataggatttagccttgggttttatccttcagatgttttttcaattatttaactcttctgggattggatatatttattataggtgttttttaaggtttaaatttggtactgaaatgtccctttccactgggactgaaatggcgggactgaattgtcacccccaaaatcttggtgagtaactactactggccaccggaaattttgatctgcgacgtgcgcgagtgtttcgactcggaaaacaacacgcggttgaccattgccgaagcagtgcgccgaggaattttgaatctggcgaccaacacattcgttgacacaaagaatggcacacagctgacccttccacaggcacatcatcacggattcattcataaaccgtttactctgacggaagcggtgcggatccaccttttggatgagaacggacagtttcgagatggcgccaacagtcacacactgctacaggcaagggcgtatctagggggagggaattccccaccccccgaaatgaaaattttttaaaattttccagcaaatggaaaattttttcaaatttcccccccccccaacgaaattttctaagcaatttttgtaacaaattggactcaaacttgcaacattttgcccggcggcgcctatcagcaccgccggacctccatttccactattttttacgttttttgccttaaaacggccaaaactgggtcattttgtcgggtcccccccccccgaaaattttttctagatacgcccctgccttcaggcaattgcttccgggcttcttgacccagacctgcggcacatttcagataagagaggcattggagaaggaactgttgctgccgaatggaattatcgtcgttaaaagtacgtgtggcgagggcataccttaaataggggggtgtcgccccccccccctgacttcgttcgtatgaggggccgaaagaggggggacttcgtatttgttgggacaaaagtgtgaaatattgtggggaaaggtcggagaaaaagggaaaagaaagaggcgacttcgtaatggccaagcgaatttaaataatgtaacaaaatcctcttaaattagccaattttgtacaaaaatttacgaaattgagtaatatttcgttatttatttatcaaataggacttcgttttttaataaattgcaccccatttttgaccaatttttttctggtgaccttcttttttttttgctattcagccacactttttttgcggcgtgttttccaaaaaacttttggggaaggggtgatacgggcctgaagaggacttggtaaattttcgtctccgagcccccgtcgatcacccctggacttcgtttgtattgagtctggtcgaccccccccccccccccctactatttaaggcatgggcgatggtgtgcagcacctcagttttcgtgaagcatacgagaagaaccttttgctgtatcgcgttcgcaacactgtatttgacatgaagggtttcagatgttgtgaagtgggagctcagtggttaagcttcaacgaggccattaaagctaacattctcaaaatgtgcaaggtgggtaaattcggacagtggagagacaattaccgttcaaaaattgtcattaaaaaaatttaaattaaagaattatataggtagctacaaaatttttgtacaattttttttcgagatttggaaacttttagcttcgatttttttcgcggtgtctttttacgtgcgccgctctgagacgcatatttcagaatttttttatcattgttcagctgaatgaattagcctgattgaggaaaatgtttttaaaaattaaagcatccgtattcaaacctagacggaaaatgatggcaatgttgtgcagttcgttcgagggcggcaaaggatgtccatcgaagaggcggcaaatcgagggcttgtagttccggcactttcgattattcttacgactcccggcttaatcatccaagaaaaacatttctctttgatcactgcggttgctaatgtgcgtttatttgtacaatcaattccttttaaaaatagtggcattggacacgcatcccgaaataaggcggagtggggatataatcagtgatgactagggctaagctaaaaacttgaaggctcgaattcaaaatagcttaatcgaattcaaaatagcttaaaggacctattttcataaagctaaaaaactcaattttcttatactttttttaaatttttgaaagtcgataactgacgatgattttcatttttattagttaaattcattttttcattaaatcgattaaaacgggttagtaaattaaattgagccctgaatttaaggcagaaaatcgcaataaaaagtcaaaaaaaattctttcctcctttaagtcggttttgaacgcgtcaaaaggagttcttttgaacaatggccgtgaggtttctgtccgcgaggcatttgaccatggatggttcaaagatctgggcgctgcgcttcaccttgccgcgctgctcgacgtccattcggcatttttgacgccggcaattaacccgtaaagaatgcgcaaaaatggcgtctaatggatggactttccgtggtcgatttcaatcgggatgaaatcaatttgttgtcttcttgttcaattcacatttacaattcgcataatttgttttgttttatttcactcaaaatattacgttattttttgctaaatatcacatgcccgtcaagggcgtagccagacccttggctttggtgggggggctgaagtcaaaaattcgatttttaggggtgtatttttggttttttaaatcccgggtccggcggtgccgataggcgccgccgggaacatttttgattattttaatgcaattttgccctttggttagctcaactttggctggtctgtcagcaagttccctcctcattttcaaatatcgcctaagttgttggttgtaattgacattttttgtagagggattagttcgctcacccctggctcggttcagatcgtgttgaacagcatccagattaaggtcacccgtgtcagacattgaagtgggacccctataaatttcttgaggaacaagtaaaaatttattcaccatattgtcaaatgaatgaatgattaagaatggaaacaaaattgttgagggtatttatgtgtttttagtcataacagactttgccaattcaattagaacaggggaagcacgcgccgggcgccccgctcactcctcgctctgctcattcggcgtacagtataaacatggggcatcagtcgctttttctgncgagttgacactaaagagcgtgaagcgacaaggttcagacaaattccaccag

SEQ ID NO: 4513 - DNA, 4090 bp, Heterodera glycines
  unsure (1)..(4090): unsure at all n locations
tatggtacgggcctctttgttggtgcatgtttntggttctattttggttgtcgggggagggaagtacccggcttgcctagacgtggatggccgcgggtccagcttaagttctggctctcttttcgcccgaggcgctggagtagggtgttggtttttcttccaatccagctttgcctgttgtttttctctcttggcggtaggacgcggtggaggtggtcttggttcaatttttgttttcaaacgaggcggggatgtgagccgtggaggtgaacggtgataaaccaaaaatcttttgcgtcgtaaatcatcatcatcattatcatttgcctcatccttttgtaattttcttctggtggcaatcctgtgctgagcagtgtccatctcctcaatttcgttcgcgttgtcgggcagcacaggcaaatcgccataatattgtgacggcgctggcaacgcgaatccactctccagcatatagtcatcttcatcgtcactttcgggcaatggggcagcagctgcttccgctagaaggtcccgcaccaccggctgccgttgctgtatattgtatcgacttttccgccatttctccagacgaccacctctccgagaagctctacttggtctttgggggcgttcaggacggggcggaggacttccgggtggggagggacgaggaggagttggtccagagggagagcgtctcccagtcggtggaggagggggtccacgcggagtgcgtctccctggcgatggaggtggtggtggtggagcagggggtcggggtgtagtgtccacaacctcaccatcttcatcttcaccacctctcctcatcagtacactgattcctttggtgagctcaactttggctggtctgtccgcaagatccctcctcattttcaaatatcgcctaagttgttggttgtaattgacattttttgttgagggatttgttcgctcacccctggctcgattcaaatcgtgtctaacagcatccagattaagatcacccgtgtcagacacggaggtgagaccacgataaatttcttgaggaacgagtaaaaatttattcgccatattttgtcaaatgaatgaatgatggaagcatacaaaataacaatgtcgatgggtatttatgcatttttgttcatgatagactttgccaattcaattagaacgggggttaatacggcagcaaacaatcctccaaatcctgcgcctttctggacaagcacacgccgggcgccccgctcacttctcgctctgctcatacggcgtacagtatccacatggggcatcagtcgctttttctgacgagttgagagtcggaagcgtgaagcgacaaggttcagacaaatttccaccagtgcgagcagctgttcggagtttgctttccctatcagtttcttacattttttagcggatttcgtcctggccaaggcacagagccaatcgcaattgtcttttatcagctctccaatatttacttgttgttgttgttgttgttgtttatgttgctccatttttggggatgaacacaattgttccttcatcttcctcctgttcatctttaaatatgtttgttcgaagccgtaacgatgggtccgatgaagcatgcatatcgatcaacaaatagccatagggacgggtagtcgctttgcggtaagcatcaaggaaaaaagatttgttgtatggttgctagatgcctaaggcatttttcatagctttcttatacattttttaaccatttttgatgtagccgacgcagcagtgtttgttaaaaaactttttctcattaaatttttttaaatattaagcacacacagacagcacaaaattttatgcaaaaatatgaaataaccgtaaatgtgaaaccaatagttagttagctaaatggacagttgtaataaaagataactagccattgaaagaaagatagccaaaagggggaacatatgttggttttttggaaacatctaatctaataaataatcagcgattggatttttaggcacaaaaaattgaaaaaggcgcttaaattggcacaaatgggccttttcgtattttttaatgtacagaaactttagttgcctaaaaattccatcccttctaaggataatgttttcgttagcaaaaggagcgatgaaagatgaactttggtgagtgccattccgcatcataacttcatttccttcactttaaaggtgtgtccttcttcgatgccacattgtttcactgttttcacattctcatcacccccggaggcagtaaggcattcgtggccactgatgaattcgtagtgaaatacgtcaatccatgacatcatggcatcaattttatgcttcaaaattgccacagtgtcctcgctgttcacccaaacattgcgcgtgttctcctttttcaattctttaagtttcagaccttttttgtgtgtttgctccaacaaataattcacatgaatgacaaattcatccaaggccaagaaaacgattgtacctttttcaatgacataaaattccattgtttttttattgtcctcaagcactttggcagttggaaggttacgtctcagtgtttgacgctcgggcggaatgccaattatgcctttgattttctgcttcagtgtctgcacagtgtttcccttgttcaccacaatggtgtacggtttgccaccataccaaacacaaatttcaaattcaaaagtagaagcgtaaacggttccaagtcttccaatgccacaatctttcattgttttgttgtcctcaagcgcaatgtcataatggctgccaagtctcactgtcagttcatatgccgaaatagcacgactagggtgaaaattgttaacctgattcgtgatcgtgcgcttcaaacttgccacagtgtcggtggagttcacccgataaatgtagtaggggttcgatttcaatttcacaacaccgtttttgccaattttctcctcttcatattgcaccaagatttcaaatccatccactgatacataaatatttgccttttcctcaatgccatattcgctcattgttttatgactggccacttcatcaatcaaagcaccatttacatttctcattgctcgttcaatttttctcggttcttgtttctcgtccgttgcatcaaccagtactcgttcattaattttctctccaatggcactttccagctcagcaagatcgaattggtacaaggtttgtcttgcggggtcaatgctgatcacaacttggatcttcttcttcaaaactctcacagcgtccgcgctgttcacccaaacagtgtgctttttgtgtggattccacactgaaatttcaaattcgtccaacgacaagaaaacgggttcattatgcgaaatttcaccagaacacggaatgccatatggttttttgcatctcaaggtttgtctttcgggtggaataccaattttttgttcgattttatactttaaatctgccacaagaatagagattgagcccttttccaactcaatggtgataaaaactatatgctttttaagcagttgttcattcattgtcatcacagaaagcttataatcatcagcggatgaaggctttatcatctgcatgaaaagcattgacattagcacagcagcaatgccaacggagaacaatgaaaagccaaaatggatcttcattgagggaaatttattggtaaatggagaatgagagggtaattacgaatgaatgcatgcggggagattgttgcttcaccattgtcaagggatgccttttatgggcagagttatagtgaattattgcattggctattgcgtaatcactttcatctgactaaatcagatgcaaaaaaacgataaatacactcctaagaagtgaaaaaaaaattcagaaaagtgatcaccatgtttactattattttcatgataaagagtgtgtgactagaaaatcgtacttattcgagaaaacttaaaatcattgaaatataagcaaattttcacttacggagacagggaatttttgccaaacctggtaccggggattgaccgggacctaaaaagcggggacgggaacctccaattttttttctgggaccgggaacgcaaaaaaaa

SEQ ID NO: 4514 - DNA, 486 bp, Heterodera glycines
gagagggtaattacgaatgaatgcatgcggggagattcttcattcaccgatgtcaagggatcccttttaggggaagagttatagtgaattattgaattggcaattgcgtaatcactattcatctggcaaaattagatgcaaaaaaacgaaaaatacactcgtaagaattgaaaaaaaaaattcaaaaaattgatcaccaagtttactatttttttcatgataaaagtttttgactaaaaaattgtccttattcgagaaactttaaaacaattgaaatataagcaaattttaatttacgggaccgggaatttttgccaaaaccggggccgggacttgccgggacctgagaagccgggaccgggacctcgattttttttcgggaccgggaccgcaagaaaaaccgggaaccgggaccaaccgggaaattttaaaaattcaaaaaaattttaaaaattaaaaaaaaaaatcaaattttaatttatatca

SEQ ID NO: 4515 - DNA, 2126 bp, Heterodera glycines
tttaattaaaaaaaatattccaactttttttctttcattttaagcatcctaaaaacccaaaaattaatcaattggtctttttttacaaattctgttaacaaatcgccttaaaaaatacaaaatttttcccggcggcgcctatcggcaccgccggccctccttgttccccaaaagtcttgagaaaaacgtgccgcgaaaaaagcggtgttgaaagcaaaaaaggtcattgatttacattaatttacatgtccggagaccccttcgcaaaattggaaaattggccgctgatcccttgttttgcaataatctgaattttgaggtctacatctgaattttagtgttctttatcctgaatttgaaaaaaaacttggtcaccctcaatatacatatacttctgaacaattctaatgctaaaaaacaggcactcgcgcgaaaactgaataaaaattttgtatttgaaaaattttgtccaaaaattttacgttggaaaattaccggtttttaccggtaccggtaccggtaccggtggaaaaagttggtaccggtaccggtaccggtttttgcattaccggtcagtaccggtaccggttttttaacaattaccgattaccgagcaactctaaatagtatgacaaaaaaatttgatcggctgccaaacagcaaaaaggtggtggctcgagtgaagtagtaccacgattttttatatcataggatgtaattggaaaaaaagagatttaatttttatgttttttgtttttttcttcaatattttgaatgcatttaaaaaaatttaaaaataattttttatttttttaataggaaatggatattcatttaacaatcacctgcactaaatttttgaagtggttgatcagattgcctcctgcgatcaactctccgctgtccctgctcgctcttcgtgacgatgcttttcctcctcctcccgtggtcgtgccattgttgttcatcgcgaatgccgtcgttgtcgatgtcgccattcccgtcatataatcgtcgaccctttgctgctgttgttgctggtatggacttgactcggcactcgcatatttgttgagccgatcccgagaagcttaaatttaaaaataagaagaatgaaaaattatgttcattttttaataataaaaattaaaaatgttatccattatttaaattaaaattttctaaatcttttgtccatttttaatcccaaaatcatttcgatcttttaaatttaaaaagagacagaatttaaaattttcgaagcatatcactggtcaaaatggtcaaaaaaggctttgggaaacaaaaatataagcatatttttaaagcgcaattaaaaagccttaatttgcatattaatgaaaaaataagcgttaaaaagattttttatcaattttttaatgagcgtacttaccatttagagctttctggtgaaaaaatttaaagatttagtattgaataggccattcttgaagcttttaatgtaattagtacattaaatattttaaaaaatttaaaaaaataaaatttgaagactgaagctaacagcaagaataatatcagtaaaaagaaagaggtttccttttcttgtcaacattatgctatcatgacaaaaaccagtatatcatggaaccgaccttcttggcgatattgctgttggcgatgtgatagcagcggtgtggagggcgatttggactgactgaactcgccgccatcatttggcattcccgtcaccatgttgtcactacttttcaattttcgcaccgcttaattaacgatagatttttatggagtcattattgagggctccaattttaattgttttttgttgtaaagatattaaaaataatctttaaattattcctaatttctgtgtaagttttacaaaacaagacatataatgccttgaattgtaaaattttaatttaattttcaccatttggaaatggcactttgccgttgccagcatttgtcattgtttttgtggagctgaattgaggtgaccatccgccgttttcattggcactgttgctgttgttgttttgctgctgcttggtggaggcggtggtcgccaaatgcggcatggatccgcagaaattgtttttttgttgatcataaaaatctat

SEQ ID NO: 4516 - DNA, 7271 bp, Heterodera glycines
ccccccccccccccccccccccccccccccctttttttttttttttttttattttttacccacacaaaaaaaaaaaaaaaaaaaaaaaaacacctttttttttttttgttttttaaaaaaaaaaaaattttttttttttttttttttttttttaaaaaaaaaaggaaaaaaaaaaaaaaaaaaaaaaaaatggtcttttttttttggggggggtttttttttttttcccccaaacccccccaaaggtcgtttttttgggggagattttataaaaaaaaaaaaacaaattcccccgggccggtttttttttaaaaaccccaaaaattttttctcaaaaaaatttaaaaatttccccccccccccgtccccccccaacccaaaaatttttgaaaaaattccttgggacccttggcattttcccttccccccccccccccccgcttttgggaaaaggcccctttgcccctttccgttgggcccaagaaggggattgcatgggccgcttttgctgcttgtccccggggagattgaagcgggcggagcccagcttgcttccatgggaataccgcgacctccccactggtctggcggactggctgggcaccttttggaccgttcattgaccgcactgatcgctgcggcactgctttgcacgttcgggtgatcgatctttgccctacaacaattcaaatcacttttgtaatcacacgatgtcgaagttgcggtaattggtgatgcttgacagtactagattttgtaatcattgaagaccagaaattgaaaatttttaagacttttataacttgtttcagtttttctgaaatgtttgaaattttgcagtcaaaatattttagcctattagctaccgcggttaatttcccgaatgtttaatgccaaggctgtagtgattctcttcacttctctatggtggtaaattaatttcgtaatttaataatattcaaaaaattaattgcttataatgatacctcattaaaactgtttatctatccgtctgatatttaaatatgaacaattttgttctctactcacctcataaactcttgccgtttgtacttcggctttgcttcgtcccgcccatgtgatgagtcattgtgcggcgcagctgccacattttgggcataaaaattgcccgtttgctcgtcacagtcctcgcgcgtcatctgttcatcggttaccggtgcctaaaatgcaaattgcatttgtttttatcttttattattgaattttgacagttagacaaaggagcatactgtgttttgtttaaagcctatggattagaaaaaaacggaattccaaccgcaaaaaaaacttttaatttaatatttcaggctctagtagtgatgctcgtgagtctcgtcccaagtttcgactcgagaaaggtctcggggttcttttttgtcggtctcgagattgcggtatcagtttttggaacattttttacaagttaaaaaaagatattcatttaaatgtcgtggacaagtcttggtctcggaaaactttcggtctttaacatcactaggctttggtaataattttctgaaaattttcgcatttggcattttgtcaatgcttttccttctttttttattggacctgtgtgtccaggcctcggttggccttctccccggctggcccatgctcgcgtactgccgtggtgtgtgagcgtccgcccattttgctggtcattttaccatccccaatcgcctgttgtaagccaacggtttggcgattgttgtcatggatattcacgtagttgttctcccaatctttaaataaaaaataaatgttcaaatatgttggctatttgacaagaattaaatttgaacgttttggaaataggcatattaaaataattaattaattataaatgttttgataatggtcaattgaaatatttaacataactgttttgataatgggtaattaaaaagttagggattatttaatgttttaattaattctggtatttttcatttatgcccccctccttaaaaaaacgtcatgatcccgaaaaatgaaagcatttttctataaatatttttcaggattttttcgaatatatacaaaatcaaagggtgaaataatagataaactatgtagtattttacagtttggacaatatcttcttaatttgcgcctaaaaattaccatagaaggtgttttgatttgtcagggatatgacatttttgaggggggataactcaaaaagcaaatttttaatctaatgaatttcaaaattttatccgttagaaaagatatttttaaacgattaattatataattgctaaccgaaaggatcattaatgccgatgccaagccttttcatggcgacttgcaaacagttctccaacagttcatagtccggctcgtctgagtagcccaagccctttagatgatcagcaaaatgatgcaattctggtgggctgtaaacataattaaatattattttattagaaaaaacaatgtttttttttattttcttaaaataaaaaagtcgaaaaaggtaaaagaaatttttccaaatgcagaaaaataggctctattccaggttataggctcaatcaaaaaataccctcagtttcttaggctttaactctaatttgtaaaaaataaattaattattcagcttatttaagaataatttttgttgtagcctatgaaactaaggatggccattgtttgggcacggaaaataaaaatcgctatataagacattcgttgttccattccatgactcgggccggggatgaaaaccttttttaacattgtttttttttaaatttcaaagttctataataaaattgagaaaattttttactttccactgagcaattcacgaatgtcagcttcttccttcatccggccaacttcgtctttgtcctttatcctccgccacggtaacgaaccgttgagaaattcgaccaacatgtagaacaaagaccacagatcatcatgacgacccatttcctggattaataataatagttttattggggctgggatttatgcgctaaaaaaccgaaatgaatactgctaaaattatgtttcaaaaaaatcacaacccagggggtcgggccatattctgatttatactcaattggaaatctttgaaaatgagtatgaacattcttgagatctttgggtaaatttgaggattttttttcaaaaatccaaatatttccaaaatctgataaaatccagtaaatttaaaaagttttcggcactgcctaacctcaaatcctagaatttttttatagaattgactcaagatcctgaataattgatcatttagtcgatttatcctactcaaagcccacccccataatgcttataaaatgacaagaagtggatcaatttagtgttttttcaaatgaaaaaattactttaacctagttttgcttgaaatttttaatgttttaaaaattaggattttcatgcgaatagtcatttttttaatgctctaatgaaaatttaaaaaatttgatgcgagcatgtgaactgtgctaccgtactttgtttttgtgcgcagaaagtgcagcataacgtacagtaccacgaaagcccgctgctgatcctaaattcaaattatcaaaaaaaaaaaatgcaatttggcgtttcgtcttgtgcctacttggacttcgcacttcaccctttgcattcaaaaacagtcgggctaagccaaaatcgagcatgtaaatacaatgctgtgttggcagagtgcgcccgatggcaaaattggacggcttaatgtcgccttaaggatcaaatttttttaaatttcaataaatcctttacaaattaaataaaaaaattaaatttttaaaaaagaatgatttaagcattttctgatgtgccctttatagttacaaaattgtattacggtgcaaaaatccgatggagtgaatgtcccggatggattggagtatctgaaaagccactcttaatgctgttgacgtagaaaaacgttgactgggcgattccctgtaaaagaatttatttgatttgaaaaatttaaattaatctgaaaaaaaatttaatttttaccgaaggattctttcccacatttttgggtaatccttaaaaaagtacacataatctcatttttgtcggtaaaataattgacacaaaaacaaaaaattgttaagcttcctactttcttaaaagttttcataaaaaaatcaaacgcaattgtttaaaacgtgtaaagctttctaatgattatcaaaaatatgtttactaacaataagaatttggtttaaaacacgaggccaaaaatttgacgtccaatttttgtcaccaccgaatcccctataaatctctaatcatttaatattattctgatcactgattaagccatgcttttttgttcccactaccttctcagatcagccaggtttttggcttgcagccccatcaccaggtaattgaatttgtcattccggccacaaccgaagaatttgcacgcgtgctttttgccttggagtctgcgcaacactgccacctccatcttcagcacttgtttgttggcctaaaatttcaataaaaattaattttaaaatttaataaaaaaaattttctttttttttggcaaaaaaataattaccttgctcgactcaacctttattgccacgcgttcattgtgattttgggtgtcaacagcttcgtaaatttcaccgaatccaccgccaccaattttttgtttctaaaatagggaaaaataaaaaacggaatttattttttatttttcatttattaatttttttttctatttacttacaattttccatcgttccctgatgacttgagaaggctgcaaaatttcacattcacttgagcttgtcatttcaacaaatttaattaattaatctaaataaaaataataatttttttaaaattattacagcaaattaaacgaaataatttttaaaattcaggaaattttactttcttttttcgaaaatttggaaataaaatgtcggttcattgaaatcaaaatttgacggctgctgggagatttcaatttattattttaaaaatttttattaaaaaataattatttttccataataaaatgcaacaaggaagtcccattcaagaatggccaaaacaaaagaatgttgatgagcccaaaaacattcattattttccgccattttgtccaaaactttcaatttaggcggagcaattaattttgatcactttgtccgagtgaaaggcaaaagcatcagttcagaaagcattcccatttaaaagccccaacaaatgaacccccgtctcggcgctgccacacattttataatggggggggggcaaagaaagttaaggatcaacgcggcgacagaagagcagcggagaagaaattggagggggggggggagcaaatgtttgagacggggaaagagcacaggtcggtgtcgggtcaaagtgacaagccgcttcttcttctcccgccgtgggatcggcgggggagaggcaaaagttgaaagttgaagcggcggcaaatgaatgatttcgagggcggcgagaggataaaggcattgatcaaagggaggggagagacggacgcttcagaccagccactgaagtgatcagtctcagtcagtcagatcggatcgatcagaaagagtgatcgaagcgaggttcccgtgaacaaaattttgggggcagaaatggcatgatagggacgaagattttgcacgtttcttctgactgaatgaataatgcccgtcgtccgcataccaagcactcttcttcactcattaagcggctggcacgaagaaattgggcagcggtgatcggatgtttgaagccgaatcaaccgacaaattagtgggaaatcagtctcgagaaagtttttattgagaaaataagccgcaaatgcaatgaaaaatagagttttaatgaagaatttggataaaagataaattgggaatatacaattaaaatagaaagatatcaataagaatttaaaaataccaaaaataattttcgagatctaatttattattgaaaatcggaaaaaataataaaaagttaaatatttaaaacattttttgaactaactgtaaaaacaaaatttaataggccaaattaacaaatggaacgctcggttcaagaaaataaaaaattgctgcttttttaaactctctagcttatgatcttcgacccttgtctcgtaccgaaatgtcccggtcacagcggggcggtcccaaaatatgtgtaaaagtgcgtttaaagggaaagcataccaaaaaatgataacaaaaagcaccaaatgaacatatgaacattttgtgttgtgtgccttggcttttcaggggggagggggtgggaaaagcagtcgcctcccctccctaaattctcgagactcattcgcccctcactttcactctcgacaaaacgacgaccaccaccacgtaactgaagaggggtggggggaggggacaggatgggaagaagccgcttttccttcccttcctcctcttccacaaaatgatgaagccgctcccctagcagtgcccccccccctcggatgcatccaacaaagagtcaactttcttcattttctcctccccactcactttcttcccactctcccccgccccacccatcctttcggccccccggctgaggggtgagaaactgagaaaccgcggagggatgtgtgagaagaagccgatgttggtggcggtattgatttagaaaaatttttttgacacggcagaaaacccctcgggggccggtgcaaaagtgcggtggaaaggaagaagaggatatgatgttggttatttgttatttgtgccttcggcggcggagcaaggcaaagtacaagtgcacaactcacacccataaatgattgcctcaggcgtcagcaaaactgaaaacggcacatttatgggatgaggtggcggggggggggattaaagcaagcacatgagatgttttatgagcgaaaatgacgatttttaatttatttacgaatatttaaaaaaatttaaattgaaaccgaaaatttcattaaaaaagacatataaatgggagtagagaaaaaggcattttagagagagttgtgaaagcacatttggtaatattaccgatagtatcacacctttttgaaaaacaatttttttagatttttctaagtcataagaatatgtttccaagggtttgcagggtcgcagatcaagaattcggcatccatttcgaccaattccgaacccctgacccgaattcaaacaaaaagtcaaaaa

SEQ ID NO: 4517 - DNA, 1553 bp, Heterodera glycines
ttgattataaattttgtacatgcaaattatatattaatatattaattcatgtgtgcaataattacgtaaaaaattaatttaaagtactgtcgaaatcaatcactgtcgaaaacacctggtacgatccatgttgtgtgtgtgtgcaggttgaactcagcccaataattagtgataccaccacaacaaaaggtcatctgctcaatccgctaaaaaataacgaattttgctcctatttctggactggaatgaaatcccggggatcccctccccattccggacccgagaaaaaaaacatgaattttttgttttctgcgtttttattgataaataatggtaccggaagaactaaaattaaaataaaaaaacaaaaatttgctaagaaaaactcaaaaaagttaaaacaatttttaagcgaataaaaaaattttttgaaaaaagttttgggtctcgggggttttttttgtgttttttgcttcctctatacatacaaagcaaaaattctcgaaaccttcgtttttcttcatattttttgatgggttttccctatcactttttccaaatttttttatcaattttctcgatttatcgtccttttcccaatgttttgccccatctaaaagacagaatttgttggtgctgctctttctttcctcctcttatcattatcagcaattcagctgctaaacccccctgcccattttatagacattttggccctcttccgttgctggaccctccccctccccgctctccaatttattgcaaaaatttggtaaaatttcggaaagcccaaaaactggtcgaaagcgaccaaatttcccagccaaaatggacatcatgcacaaagcaatgattttggcctgctttggtaagtgtaattttcgttcgacaaaaataccgtattcaatgggaaattgagaccaaaaaaaacttatagtattctcgttgctgttgccattcgtcagtactgcaacaaaagttaattcttggtacagtaaccagtggtggtcaccagcagaagaaagcggaagcattgaggatgaaaaagtgagaaaatggtgaatgggtgtacaggagagacgggtgccacgcttcgaatcccgaatgtttttttcgtccggaaaaagtgccgctttctttttggccaaccgaccttttcctcaacccttgccaaaaccctgtttttcacaatgccataaaaatttttacaaaaatttacaaaagtaagaaataaaaattaatcgttaggcctttcggagaggcgcgcatcaacaaatcggcagcagtcgaatgttatagggaaacaaaattggaccctttttttttttgctgttgaaaccgctttttttgcggcacacttttttcaaaaagaattttttttgtacgaaattgactcaagttttaaaggaatctgatgaaaaattatgtacttaatatttattaatttgaaaaaataaattgcgaaattcatgttaaattatttaaatcctttttgcctttatgaagtccccccccccctttcttacgcttatacaatggttcttggggggggg

SEQ ID NO: 4518 - DNA, 3952 bp, Heterodera glycines
  unsure (1)..(3952): unsure at all n locations
atccatcctgtatgaatcgggtgtcgtcgaattggcatcaacgtttgtatgcagttcttcggtaaagttagggaggtatcccattgaaaatgatcccttttccttggtgatacgatacgatatcacgcgattttgaacatttttctgtttcgaaattttaaatcccttccccttgtatgatttttcgcagagctcacgggcggggcgggtcatcctgccgtgccccccccccctttattaatgatgtaaataaaatttagcttgtcaaacaacaattaggatgggactccgattacacgtacaaaagtgtgtgtttggtggacggaaagccgacagtggtggacggatttgattgccgctatcaaggtgaaaaaatctaattgcatttttgatttcggaatcaacttaaaaatcattaattatattacctaattaaattaatcattaattttttgagcataattatgacaaatttaaacgatgctttaaacaacacttttaagttgctgttggacgttacaaaaacgcgataaatatgacgggatggtcttacttggaggtacagcttaaaatgaaaagcctattaagcgctgaaaacattattgaatttgttgtcaggttgaaacaaagcccgacgctgacccggacatgcaagcatacgccgctggagttttggaaggcatgttcaattaagccatcgaaaatgccattttgtgctttttaaggagtttgaggactattccttttttaaaacaatttattaattttttgaaatctgctgttattaattcagctcgatttctattttttcagggtagtgccaataacttttctcattaaaattaatttaaaaactcgaaaattaattgttcattatttttccaaatctttgttttttggcatttttttgttgttatccttcatgggttttcgaaaatttggtaagattagaatctctgctagtttcagttggtcaaatcactttattatttattaataatgagattcttcgaatgtcttatctcaattagcacttttcatttgtcaggcattttgacccaacctgtgttgaaattgcatctgatgaatgtgatggacgattactgcaccggctatcagacatactgtagcaaactgaagccgtacctgaagcagaacctggactttgtgcagcagagattggccaactcagcggccgatgacccctattggcaaggggttagtgaaaaaatcggaaagaatggcaaaatttttattttattcaccattcaggtaaagcgggcctatctgcaaatgaccggcgtttggcatggctttagcgatgcgcagtttaacgtgtccattgacttttcactgaacccaattttgatggtaattaattaagtaattaacacagagcagcattaattattaatgaaactaataagaatttaacgcgatcaatagcataaggttgatggataatttaaggagtcagtgttttaatcagtaggacaaatgtttgtttgtatgctttttcttatttttatgcgcatatgcaattaagaaaggagctcactaatagcatttctgggctaatatctgcaattaaccgaaccgagatgctcaattagtccaaaatgattcacattttgattatgtgttcagcttaatgcgcatggcgatttctacgagttggagaccaaattcaacagaagcaaagacccgcgagacgaagccactggcggaagatgctcgggactggtcaaagtgagtttgtttcaaaaaaaattatgcccaaaagagtttgacattttctaacaccattttacatgccgatccgcaaccacggcaattttaatttccgtatttttcaaaatagacgcagttcaaaattctaaggaagtcaaatgtcctacatgaattggttaaagttttaattacctttatagaaattttaaaaatttagtatgtttttttaaatttcatttcccattttggggtgggaaattccctccatgctccgccccgcccctttcttcattatggacctgattcagtaccaatttaatcgagaattgactaaaagaccgagagacaaaacatttctcgacacgacactatcaagcgttctctattgagacgaatacgttgaattattttacagtaggaaagaacagtttccccattttgaagattgcgcctaacaatgccgacattctgttctcccaagtcacaatgtgcggctttgaaagccttcttcgtgtgctaaaactgtacaaatttggttacggtaggctttttaaatagaatttagtccgatccgggtcaattagcgaatatctggcacaaaagcttgaatcaaaagcttttaacacacaaagaaccacctattattaagaccgcgcactgtaccctggccacacgactaccatatccagctacccaggcctattgtattcagccgacgattttgcactgatgagctccggattggtaaaccaaaaatttggaaatcttttaaaaaatttgctttttaggctatccttgagacgacaatgaaaattttcaacaacacacttttgaacgaaataaaaccagacggagtggtgggttaattaagcgctggggctaattcaaatgtaaaaaatttcaactgtccaaatttttaaaaaataaacctctaaaattgactttttgacaattacaataaactcaaaaaaaaattctgtccgcgtcgacactgtaagaatttttccggtggcgtttcagcactttccatgctttgccaataaaatttttcttagggagtctattggttcggcatttaagaaatttttaattttgattttttggaaaaataaacatgacgcccggtatcagaattcaggctaaacggcttttaaaaatccaataactgggcttagaatctcgctaaaaccggatttggcccggtaatccaagcccggaatgttttcacagctcgaggaaatggtagggtcggaacgcaatatctcaggaaaattgccaaaattggcgagggctgccatactttgattaattcaatctgctttatcagcttcattgttgggtacgagcaattgttgccaatcaaatggcacggacagcgcgcgagtggtgccacattttcaagcggttcaattcgggcacgtacaacaaccagtggctgatcgttgactacaacaagttcaaaccgtacaccgaattgcctgaccatggcctattttatgtgctcgagcaaatgccgtaagttacggcaccgtctagccacaagcattggattgaattcggggggacacactccgtaaaacattcgaattgatcaaataatttcgagactgtttgacaaataaccccaagcacaatagcatacatttaattctgaatttccccaattcaagcacaattgttctataccaggacatgacccagtggctaaaacagaatgggtattttgccagctacaacatcccattcttcaagaagaccagcctaattagtggctttgagcaaaaagtttaaaaaataaattttttaaattaaaaattcttaattaccctcagggcaacgaattttattggttcagctggaaaanttntccacncncaaaaatttttnccannnaccaacacaaantnntnnacntnnacattctnaccaaactnatncnntnantatcatnnaaaactntnacaaaaaaaanctttttnccatttttttnannnntttcnttttcatccnatnccattttnctttttatttnnccnaaaaaaaataaattacacaaaatattncaaaacatccacaattataaaaaataaaatttaaatttnaaatattctcctcctccntcanttataacnattacacccnccacccttaaaagcntctcaattncncncctcctacnctncagcctttaaggaggcaaaaacaaatgggaaaattagtt

SEQ ID NO: 4519 - DNA, 4514 bp, Heterodera glycines
  unsure (1)..(4514): unsure at all n locations
caaaaagtttaaaaaataaattttttaaattaaaatttcttaaatanccctcaggggcaacgaattttatnggttcagctggaaaagttgtccacgcgcaaaaaattttgccagggaccaacacaaagntggtggacgtggacagtctgaccaaactgatgcggtgagtatcatggaaaactgtgacaaaaaaaagctttttggcatttttttgaggggtttcgttttcatccgatggcattttgctttttatttggccgaaaaaaaagaaattacacaaaatattgcaaaacatccacaattttaaaaaataaaatttaaatttgaaatattctcctcctccgtcagttataacgattacacccgcgacccgtacagccgttgcaattgcacgcctccgtacactgcagaggcgggtcagtgcaaaaacaaatgggaaaatttgtttaattgaaaattgacaaaatttttttttgaatttagcaatttctgcccgaggcgatttgaacccggcaaatggcaccttcgaaatacccggcatgggacacgtcaaccacgcggcacttgattataaagtcggcatggattagcatataacgcttaatggttttaaatttttttcgaaattctgaggttttccattcttttatatatatatatatattttttttttttgcaaaatttgatattcgcttttttaaatgaattctaagaaccgggataagaatcgcaaactcgggatttgagtcggtaacccaatcccggattttttcgatcccgactttattctcataaaatttaattagtctttgatttaccaaaatagtccaatgttgagcatctgaaagtttttaaaatttttgcacctttttcataacattttccccacttttagtagccaatttctgttaaatctatgccattttagtcaacccaatgattattttgtaattttcattaaatttttccccgcagggcaccggctacaaaatgttcaaaaaattgcaattccgcgcatggagcggaccaacttatgacgatgtgcccgtgtttgattggcttgaatgcgatttggcaaatttaaaagaatgaaatgccaaatttcgacgatagcgaataatttatgtttgaacatagttcgactcacaatattaatactatttttatgcaaatttggctgattttaatttctaaaattttaataatttaccttttttaataaatttttttgtttttggcgtgcggtcgatgccccggtcgggttaagctggtaatgtttttcccccacaaaagtcaaatcgtacgccggcactcatccggtccaatccaaagtcattttgacaaaagatatgacgatttttttgtcgaacatagtacgaattgaggcagtacaagttggcctagtatgaattggcttttccgaaaatgatttaccattcaaaacagcaaaaaatcattagaaagttaaagtgccatttcttaaaattcgcgacctcaatacctaacgctcggaattgtttttctttgttttttaaaatttttatcgaaaaaaccaatgggatcactccaatgatggcgaaattaaagatggtgctggacattaataataataaaataattaaaaattaggcactcacaatgaaagtatttaaaatttcatatttttttcatttttaacatatattttattgactcaaaaacacacacaatgagcacaagcacaccgaacacatcactcacaacattcgacgacaaattacagcagaccaaagtgacgacaaaatggcatcgcaattaatgattgtaaaattggaattgggaatgaaagtctcgactggacttgagttcaggcctggggttttccaggtccaagtttaggccatttttcgacaacctgggtttttctgaaccttccagaaatccagctcctgatcaatctggaaatccttgtggttcagttccaacatggaacccaagtttttgttacttttttgaagaacattttgtcatttacacccgtaaattagagggtttttagtgcctattttggttttaggatctaaaccctacctgttttggcagtttttagcaccatcatccctactaatcaattaataaaataaatgctgtgtaaattaattaacatttgtaaatgcatataaataattaatcaatttaataacttaaatgcagtgcaattaattaatattataaatgcaattgaactaattaatgaacggatcacttttaagcattgtttggcaattcactcagttcaaaagtggaagagttgagcagaaagtgtgcgcaattggagaaaggacagaatattgtaaacggtcagggtcgttttcgtaccgccgttttcgtacgagttcatgtacaagcgtcagattcaattagaaaaacttaagaactaatagaaccaaaatctatcattttttgtttcccattcataaaattttgtagaaaattcataactttaaaaaaataacaaaatccgggactaaataggtcgcatctcatagtttaggaaaataccagcgagaaaattgttaaggttttcgggactgacattggcattggcataattgtgatcagtttttaaaatttttgcaccttttttcataacattttccccacttttagtgccaatttctgttaaatccatgccattttagtcaacccaatgattattttgtaattttcattaatttttccccgcagggcaccggctacaaaatgttcaaaaaattgcaattccgcgcatggagcggaccaacttatgacgatgtgcccgtgtttgattggcttgaattcgatttggcaaatttaaaataatgaaatgccaaattgcgactatagctaataataaaatgccaaactggacgcaggcgcccgtccgatccaatccaatgcttttatcatagataataaattaagctaaaaacaatctctttttacatcatcacttcaatttggattttccaaccaaaataaagataattattgcaaaatccgtcatcataatccatttggggttcaaatggccgcgctgagatggccgttactcgcaaattcgcgcttttttgttattgtttttctttgctttaggaaaaagttcatagtaacgggcataaatttatcttgtgcttcttcgccaagtctgttcatttcattatgaatttctatgaaatttttgccataacaaaaatcttcgcgtcccatcgaattcaaaattaaaatctaatttaaagattaattatttaaatgaaaatattttgcctttgtaattggcaagttgtgattgaaagcgaagtgaaagcttcgcactttggcattttgccgttcaccaaaaaatgagaacatttgccaatgacttcgtcaaccataaatctgtcggccaatcggaggacattttcaacattttgatcaaaaataatattttataaaaaatatttataaagaaaataacccaagaaaccatttaaaataatatcgccaatgatcaaaactgcaatcatttgttgaaaatgttccaatgttgaagggggatcgagctgaacaatatccggcttatgggtgacggaagtgccggaggaagaagtcgcctgatccgtgccgaacaacaatttgtcaaagaacggcgaatggagtgccaaaagaagaagcagccattaaatgatttgaaattacataaaaagaatgtagaaatctagaaagtcgaacgattgttgagagccaataggaaacattgatttgtttattttcgagtcggctgtgccatcaaatttaaaccggttaatttttaatatttttatttttaaaaaactggccaaacgagaatacttacaaaatacgagatttttatttattgttttttttttattagtcacgcatttgttggttagaataaaatatttccttcattttattcagtttgatcaaagacagaatttgatttaagtatttttgttgagagatttcacgactttttcccttacaaaattagaattttcaccaactgattaaaatacgtactattaatgcttctgttttcacgaagaaatattggcaggataacggaatagaaaaataattcgacacttttcaatcccttgcctttttcatggccgaaaacaattgagcaacttaatttggtcattttaacaatttcattcccttttgcccaaataaattgtttaaaaaagtcaacattttcatggaaaaaacaataaatgaaatgaataaagcattgagtaattccgatcataatgcgattttgaatatcaaaatcagatgcatcaatcattcatcatcaatcgcgagcatcagccgcaatggcacacatttgttgggcacaatgtctaaaatgaaggccggacaaatgaacgacaccttttaagggtggtcttaatgtccgagtatttttcgaaatgaggcaacaaaattaaattaaggagagcttgggttgctttgaaggaccgaaccgccattagcagaggtcattagcc

SEQ ID NO: 4520 - DNA, 1846 bp, Heterodera glycines
gatgttacttgaaacataaaattctaagatattattcaagagaattgtttttcgtgcacaacctggacttggattatatttgacctggatctaggcccaggccgatcccttttatataaaaatatcaatcccagctttccaatgtttcaaagttcggctttattttcaggtatgtggtcaaggatttggtgccggatatgactctgttttacgagcagtacgcttcggtgcagccgtggctgcaaaagaacaaaccgaccaaattaggcgaagccgaaaacttccaaagtcaggcggaacggaccaaattggtgggcattttcaaccaatgggagaagggctggtccatcaaattggtaatgttcgttcgctttgcttttgaggacggtctctacgagtgcattttgtgcgcctgctgcagcacttcgtgtccttcttattggtggaactccgacaaatatatggggccagccgcgcttctccaatcgtacaggtccaattggcaaatgcgtccaaacatatggaaaaaggggagggggtccagcggtgccgatagacgcctccgggagaaattttaagaatttcaacgaaatttgttaattgtaagaattagccaaatttctcttctggaatgctaattttttaatttaaagcgttttctttctttttgtcagatggattatcgactcgcgcgacgacaaagccaacgaaaggttggaacggctgaccgaccctttcagcgtgttcaaatgccacaccattctgaactgcaccaaaacgtgtcctaaggtgacggacggtccttttggtgtcgaataatttgtttttagcaccttaacccggcgaaggcaattggcgaaattaagaaattgttaaccgggatggagtaagaggaaaggcattaaaacaattgaaaattgaatcttttcagaacaaagccggcaccaaaacaggcgacaaacgcataatgatacttttgattagaatatgtattttatgcattagttggtaataaacacatacattgtgattgccacttccatttaatttgtgctaatttttgtaactaaaaaataaaaatggacaccttctggggccgtctctggtgatttaaaattgttttttttcttgggatttgaactttgtgtctttttgatccaattggaacctgttgacctgtttttgaagaatgtcttgaaaagggttcgctttttctattctttgcttcgactggttctcccttctctttggttggtccatccattttctttcgtttcgtttcgtatcattttcattgggtggttttttcgcgcggactgacaaatgagtaccgtttaacaattacaatttaaaatgtgtgcattattaatgaataggacaaaaggagaaagtgttaagtatttcctttgggacgaaagaacgaacaaagtcattacagcggaagatgatgagttactttctgttcttctcgtcagcactgatcggctgattacataattataggatagcatttgcttaatcggcccaatacccctgggggggggggccggtggcccggtccaaatttgataaatgacaaacatttcccgcagttgaaaaaaacactccatcgatgggagtgggcaaattaaaattgaaatgggcggggcgtggcctttggccgcggtgtttccgcccttttaaagtgttcccttggcgccaattggccatttgattttcgctgtctttcgaatttaaaaattccttcgcttttcccaatgtccccacttttccttctgctcagtgcttttgctttgactgcgtttagcctttttcctccttcgttcgctgccaaagatgcgcaaca

SEQ ID NO: 4521 - DNA, 2362 bp, Heterodera glycines
agcaacaaatgttcagtttcgaatgccaatccaagggggtcgatgcggctgaaatggtcgcggttggctgtgtgacgaacggcggagagcatcgacgaattggccaccaatggcaggtgggcccagcaaaacaatgacattttatggggaattaaagcgaaatgagtaaaaaaggaaatttaaatcaaaaaattaggaagttaaatgacaatttcattcaaataaaatccaattaatgtgatctatcgcttttcatgtttatttaatctttgaattagaaaaggaaaattcgtcgctgtaaatccaaaaattgaattggacacgaaagaatggggggggggaaagaaggaaatgaaaaaaacaacaattaccctcgagcaaactcatcgcgggggagcggggcaaaaggggggcaatgagtgtaacggaggagcgaaaaaaacagtggaaatgagaaagggaacgataattaattattagtgattagattttgaaactcttttaaaaggacgattatgatacaaaattcaatgagaaaaacattggcagagaatgcccaacggacaaatggggaaggcattttcaaatgttttaaattgccgaaaaatgctttaatagggaaactcattttggcatcattcaattggtgcgcactttgcctttcttttttaggacggcgattttctcttttactgcaaaaggaaagccgcgggactttgcgagaagagctgtttggggtccgtccgtccttttccatttgttttcaaaatgattttccttttagctgtttgctgcagggccgccgtttgtacgacggcgaccgtttccgccacgggcgcaccgttttccaatgcgaaattcggccaaagcggcacgcacttaaccccgtcgcgtgcgtttctacgaatggcgtcgagcgattggtcaactgtaaatggtggacaaatgccgagggatcgttccactgatcactttgcttttaaggagtgatcggtccaaggacgacacttttcgagtgaagcggcactgcgtactgcgcgaagggcgtgcggagattgacactttgggctgtgtgttcgagaagaacggaatcgcgcggtacatttcccccgtaaattgggcgcttttgccaaaaatcaccgcattttgatcggtcaacagcaaaatattctctgaacaatgccttacttcctccaaattgatcacatttccgtgcattttcaccactttttcagtttgtccctcaaggccggcactttctcaatttggcgtgaagcattggtctgtgccacgccgttgttcggcacaacacctttcattttgccaatttcagaatgcttcccctctggccgtttcctgtcgacgtgcgctgattgacggggacgaatggcctttgctggagacattccccgtcacggaaatggccgaacggaccaacggactgagggaggacaaagacccgcgcatttgatcaaattcaacgctttaaaagaataatgcgaatgttttccttttcatcagtcatttaaattaattacttcgatttttttttttttgtccaaatttccattgttgggccataataataataataattaatttcattttaattttgtttttggtctatggcatttttttcctttttttcaaaagacctttttcagcacctccaaactgatcagacaaatgattccccagtgttttcaatcattaattttctctgtttttgccatcccattctcttttttccccttttcctttctcaagttcataaatttttctttgtttttccgtttgatccgtccggttttctcccattcattcatttgcattatccttaaatccaaagtgtcgttggatttgctgtgcatattcgccgtccgttttcacttcgtcccttcccctccctttttgcattttggctttttcttctgaagcgaactcgctttttactcgccactcactttcgcttgttttaaaagcgagatttgcatttggtaatggtaaacggcggattttgcacagatcgccgggaggggaaatgggcgagttccccggggattcggggaacctgattggtccgcagcagaagggagcagtgaaatgccgaattgaaattcgaaacaatctttcaaagaatgtttagacggatatgaaggaggggttttgccaataaattttccattttcaataattatccaaacggagtgattcccccagcctaattaattgctttacttaattacatagctgcttcgcttctttgccaaatgatggcaattctcactaattttttatatctctgctcgtccatctcttttcttatgccaaatgcttctttttcctccgttgggatttgctt

SEQ ID NO: 4522 - DNA, 1252 bp, Heterodera glycines
caaaagcaccccttccagcagcctccgttcgtacgtgcggatcgatcagagatttgtctattttttgtcctccgttcgttcggggggggggggggggaattgcgctgctcaagcagcacatccatggcgaggcgcgttcttttgcccagcaattgcaaggctttaagtcccccccccccccttcccattcattcgttgggcggaaatggaaaattatttttataaaataatcaaaaagaaacattttaaagtccggtaaataattaatgtcaaagatggtggacagaaggaaactttgtgtcggcgtaaaaaaagtttatgcgttttctcccatttttcgttttgttgtgtccaaccgcacaatttcattacaataaaataatcgaagtggcaaccaaaaaccaattagagaagaacttttttaaagatgcccaaattaagttaatttttgcaggaaaattcgtacagtaaaaacgaaatataaatttattatttaaaaatcaattttgttgttttcattttgattttaagaatgggcttaatttttctcatatttttggcctttctcccgcgcactttggccacaaatttgacccattacccggagagtcgcgtttggtctttcatacgatcggtgccgcgccaatcggtggacaaacagtgcgccaaaagtttggacagagtcagccaattttaaaatatgcaaatataaaaaagcattgcattttcaggtggaaacgtatttgcaagaccaaaggtgggacagaataaattaattaaataaattttaaaaagttaatgaattcaaaaggacgctcgagcagcagcgacagtttttctccgaagcattcagcacgggggtgagcagcaaatgcacaataataattaattgaataattaaataattaattaatcaatgcttttgctgttttgggatgaattgtcaagtatttttgccttaggacgcctcccaattcatcagccgagaccaggacagatggctgtacaacgcatttatgtgcatcaaagcggccggggaacagacgtacagtgcgtcggaatacccactgcattactgtaaggagagggaggttacggtagctgggaaaacgaacgaaacaaccgacttaaaaacatcgaaaattaaagcttaaataattaaggttatggtgaaacgacggaagggaatgaaagcgatgggcaacagcaaattgcctacggaatgtcattccgagcacatgcagcggagaga

SEQ ID NO: 4523 - DNA, 2162 bp, Heterodera glycines
atcagcatgggccacagtgttccactgggcgacggggcggccgaagcaagtcagtgaaccaattccattctatttgtcatcgacccttggcaaaatgccaccattcactgaacagccaaaaaagtgccaaatttaaatttgagttcacagatcactacgcgtccaattgcttctgtgcttttccgccgcgcgaaacatgaagaaacttgttcagatgcccaaggatttgcaggtcccccccccccctcgggggttcattcgattcgattctgtttcagagtaccatcacttgcatgttcggccttcgttttctgtccatggtttggaccctcgtaggtcattccttcatcttcatccaagcctttctttccaatgtcgacgagttcaaagatgatttggtggaccatttttggtgaaattctaaaaatcatcgctttttaaaatacttaaaaccacaggaaccaatggatcaccaacttcactctctccgtcgtaaattttctgaaattcgaaattgtgactaattattatttatcagtgcctctggaggagcaattaatgccttaatgaaatcaatttgccacttcttccaattccatcccttcggctcctcccccctttaggacgttttcctcgtgctgtccggcacactcaccgcttattcgtggttccgccgggcccagcagtcgcattcggacgagtcgcgcgtgggttgggcctcgtggccgtattggctgcgcttctaccggcatcggctcgtccgactttggcccgcttacatttacactcttttcgccgtcaccacccgcgtcagcgtatgaagcactaattattcataatgaaatcattgaggagattgggaaatggttgcacaatttggccctactcaccaccccttccccttttttctctcccttttttctccctttaggtcactcattaccatccgatgtggccacccactgacccggccgttcaatgccccaagcactggttggaaaatgtgctgttcatcaacagtttgacagacaacaggtgccttccgtggacatggtaagtaaaactaatcccgattaattgggcttaattagtgatttgattgattgatttgtccaataatgatcaaattcgtgcaaattatccccctctgaaggtatatcggcactgaattcatcttctacttgctctcccccgtgtttctactcgcccttcgccattctgctctttacggcctttctctggtgggcctcgtctccgccgcgtcggcgcttgccaatttggtggagaatttcgaacataaaaaagaaaattgttcaatttgaatattcttatccgatgaacttttcagatcataatgctccaatataatttccctcccactcaaatgttgtggaaacagccgtcaaatttttctcccgactttatcaaagtgaataatttggggaccctttccaatggcttttccttcgatgttcaaattgtcaatccctctgttcgtttagcaccatttggtcatttacatcaagccatggtaccgcattggtccttacttggtcggcctcgtgcttggctatgttttggcatgcccaaattcccatgatttcattaattccattttttctgctcaggcggtgcattccgtgtccccacagcgaaagcgttcggacggaacgcactccgcccgttttgtttgggtcggatgggcaactgcgggctgtgccggcttttggtcggtgttcgggctatacccggcacttcagggatgggattggtaagtccgtctttgaattggcattttggtcttcgcttacgctttctctttaggcctctctaccacctcttttacggcagctgcgcccgcacaattttcgcgcttgcccttggttggcttatttatgcgtgtcacacgggcatcggaggcccaataaattgggtgggtttgtgccgtgccgagtttattccgatgggtttgccttttcaggtgctcagtttgtcgcctttgctgcctctgtccgttctttcctattccgtttatttggtgatttatttttcaccgttttttccctctaattgtttctaatttccccacagtttcatatgatccccgtcgttttcacttatatgatcagaacattccaattcattacaactcataaattatt

SEQ ID NO: 4524 - DNA, 2822 bp, Heterodera glycines
ccggccccccaaaaaaaccttttttttcttaaaaaattagcccaaaatccctaaatcttgtcattttttagacaaactctgtgcaatttatgctaaaaagaattgaatcgaggtgatacagcgactaaaggaatgtggagccaaatacatcattcatttaatttttttgtgagattttttgaagctaattcaaataaaacccccgcccccatccccggggcaacggcagatttgctcatccccgccgccgcgactctgacccccgccaacccccgcccacgggactggagagatcggaccggtcggtttttttcggtatttttcggtttttaaccgaaaaaaaccgaccgagaaatttttgagtttttcggtttttttcggtttcggtttttttcggtttttataccgaaaccgacgaccgaaataatcaaaaaaccgaaaaaaccgaccgacttttttcaaaaaccgaaaaaaaaccgaatcaaattggagcgatataacctgttaataataataaatttattgcttttttgtgctctttttcattttgaagaattttttgtaaaatatttctgctattttgaaaaaaattattaacaaaaatgcaataaaaacgaaaaatacaccccctgagaaatggaaaattttatcaaaaattcatattcaaaatttatttatttatttacttgactacatttttgatttttaaaatatttatctcatttccattttgattaaagtgaaaaaaggaagatttcgagcatttaaagagaaaatttggtctttttttgttaaaaaagtttgttgatcactactcaatcggggtccccgaccaccgacatttgcgctccccccgagatttattcgagagctattaaattattgcggtgcggcgggtagggggagagcggtgttaattagctattaattagctaatttaaataatgattcaatcgccgccgcttcttctgcagctaaccgttggctgatggttgttgtcgcccatcgacggctgtcttttcgggtccacataaaagaacagtgctttgcacgcgccgcgaaggccatgatgaagcggttccttttttgaatttaatttggcactaataaggggattaattgccaagagtgcagaaaaaaacgcaaaaattcgggacccgggggtcgagattttgccaaaaaatgactggtcgggactaatgtattaaatgttcgcactaaatcccgttcccgggctatcttagatttttgttaaaggaagaaaaaatcctgtccaaaaatgcttggggagtcggtaaaacaattacggtaacaattaaatggaccaactcattaggttaattaattaggtaattacgcacacatttgtgccattcacaaacaggaataattatttatgtgtgtatgttaccttcacattgacaaatgtgccgcaaattaacgactcggacagaagtcgccatagggcaaatgccgtgatcgccgtttggaccaatttgtgcacatagaaaaagcgaatgcgcatcatcatatttcaatttcaaaagaatgttttttgattgatttttggcaaaaaaaaatgcctaaattggcccattaaaatattcgtaaagctgtggcacaaacaaaccgcggaaattttgtgccaaaaattcggaatgccacaccaaactgtagcccagaaaatactaattaaactggaattaagggggaaattgaaagcgaaagagcacgcaaatgagagacaaacaagcaagagagggggctaagcggattagctatggatgcttcttgatcagtttttgatgggaaaaaaattgaaattaatcctcctactcgctccccaaagaggaaggtattttttcatagggatggatggcaactaagccctggcaatcgaacaaaaagtgaaatggaataattattttggactgctcgaatttctcggcctgttggggcttctcgagttgaagagcattttactctttgcaaaatttgaatgtcttgatcagctctgctactaataaattgtggatttcatacccaaaaattggctctgatttctcgtaattttatatattttttttacccatttttagcattcaaattatttcttcatcggtgaattttgcacccaaaatttgcatcgaatttgccaaaaacaaaaattttaattttttttttaaatggctaacaaaaacaacaacaacaacaacaaaagtgcgtgttcaattggcacacataaaatctcgttttccatccttccatttttgttcaattcgcctccaaaatttgtgggttttcactttgcttttggtccaacaaaatttgggtggcctccgtgccgaaaatgttttccagacgaagacagtcaaatttgctgaacaacagccagcagggcaaacgttgatgatcggaggccgacttttctggaaaaaattgttttttttttcaaaatttacgatttttttatccccctatataaaattttacccaaatttctcgcccccatttgcatcaattcgttgtagaaatgcgcattttgtggtgcctggtagaacatgatcgcgttgacccctttgattgggtagcgaaaatagtagtggaacctgcaaattttttttttgtaatttaggttttttttgggaggggggtttgggggaaaggtacggccgagaaaaaaacccattcattgaacccatttttggtttttcttattgcattttttgaaaatttcggtcaattttcttaaatttagctaaaatctgcaaaaaaattattggtggcggcacaggtctcttctcactgtctcagcctcgact

SEQ ID NO: 4525 - DNA, 5296 bp, Heterodera glycines
cccccctcccaccccgtctctctcaccgttccgtcattagcattatccgtcggtcgccccgggcaaacaaattgcgcgccttggccactttgccggtctgcgcgtactcatgcaactgcacaaagtgctcacactgacgcttcagccaattgcgcacgcgcacaaagtcaaaataggagggcacaaacaacaaagtgccggactgacctggcaaaaaaattaattaaaatgaatggacaagcgaattttttaagaaaaatttaaaaaattttcaagaatgggcaaatttttttttttgataaaatttccaattttttcctagacaccgccaaaacaattccattttttttttacgtttttcccgtacattttgggaaaatttgtcgcacaaaatattggaagcgctgctccgcctgctcggccggcgaagcggcgtcaaaccgatggaattcctgcacatacggcatggaaagctggcaaaaaatagtaaattaaataaaaatagccaaaaaaaaattttttatttttattttttttttttttacttgcgtaacaaatggcgggtccatgggtttctgcacgacagtggctaaaccggcaaaattggcacagtgttgggcaaaactgtgggaaaatgggtataattattgagttggttattgtcaatcggtaaagcactggcagttgggtacagcttcaacccctcctctgaaatgttttttttatttcaaagttaaaatttaaaaaaaaactcacgaaaaaattctttgaaaaaagttcagcgatttttttgaataatttctttaaaaaatttatttcatcataaaatttagcaaagaaaatatttttaaaagttttttcttttagggtcggggagaagaacaatccccagaaaaaattaagattttttttaattaaaaaaaagatttaaaaaatttcataaaggttacttcaggcgtcgttttttttttgaaaaacatccgcccttggcgagtgttttttggttttttagagacagcccaccctgggtccaaaattcgaaaattttttttaaaaattgtaatacagtgcgtgcatttccaccgcgtgcgtgcgcgtgaacagcagcgtctggcggtagtggcgcgcgtgcgtgccgtccccgctgagcgcccaccgtcgcacgcgcgtgatgtcggtgcgcacgcggcacggcacgctgttcagcagtgcaaacaccgactgcacatgctcccagttctgcatcaacagaatgtccgccttgaacatgtgggagttatagtgtgtccgagcggtctatgcgtttgtttaacacagagttttgcatcccgggttcgggtccctttgccatcaaataattttttaaattgttttaaaaattaattaaattttttttcatgggttaattaatggttcaggttttatgaatgaaaattaatttttaaattaaattactctttccacaattagcaattcgatggatgccaaaaagtcatttggtcctccgtcgtcgtcgttagttgcctcgtcggttttccgccgcttttcggtgccgagacgcaaaaatggcgcggatgctttttggcgtttttgcttttttggcgtcgtttcgtcgccctccggcgccgtttcgtccagcaacattttgaggccgagcggtgagcaaaggataaaatcggactgaaaaaatgaatgaaaaaccgaaatttaaaaaaatatataaatcaacaccccatttttaaacaaagttgggttttcaaatgaaatttacagaattttcattagagatcagaaaggggttaatggcagttcgtatttcgtataaaaaattttttaaaagaaattttcaataaaaactataattttttatcaaaaaaaataaaaagaatgtgttgttataaaatgtataaacccctaaaaaaaacttctaagcttttccagttttccgagttcgctcacctcgttgaacggtgtgtacagcttcaagcatttcttggccaatccgatgcccaaacggaaacagtcgtccacattcccatccatcaactccttaaaaaaattttaatgcgagacgttgaaaacacaaaaatcaaattgtttggcacacaaattatgcaccaaataaaaaaaaatttttgaaaagtgccaaaaaaaaatttttaaaaatgaataaattcgatcgttttctccagaaaatatccgttcgggaaaaactcagtccgacaaaaaattcaaatttatttgcataaattatgcaatcaaaaattattttttaaatttaaaatgggaaaaaaccaaaatttcaaaaaaatattttttggttaattttttccataaaatttttgtccgtgaaaatcccatccgtccataaaataaacaaacaaaccctgtagtcctgggccaccgcccgtttctcgtggatttgattgccttccgtgtcgccaaattcggactcaaaccgtgacaaccgttgcacaaatggacgatcctaaataaaaaaaaaatatataaatctaaaaaccgaaaattgtgccaaacctccccgaacatcagtgccaccattgtctttacaattgcgtacgcaaatttgcgcatcggtgccaaaatgagcactttcggccgtgccaacccttggtcccggcactgttccatcagcgcttccgagacggaaccataaaatttttgaacatatatcaaatagaaaaacaaaatggaaattttggcagtacccaaaattaatgggttttaaaaaatttacaaaaaataatttaaaaaaaaaaattagagacggtagggtaaacggggcggcactatcccactacccggtaaaacaaaagtaaacattttatgggggggggggggggggtcggacgggatcgcaaattttattaattttcttaataaattcattaaaattccagaaaaattttcccgagggatggcgccttggggaattttgttaaatttcattttcgggcaccgccgccagaattaattccattttaaattgttgccccacaaatttgcaaccactacctgttcccgggccttctccagcctctgtttgttgctgatcaccaaattccgtgtgcgcatcacatggctcaacgcgtgcaaacagaacaggggctagaggaaaaaaaatggaaattttccaaaaaaattttttttttttttttgcaaaataccttatagtcagtgtccccagtgctcgcacagcacaaatccatgtaacgaccaatgtattggtaaagtgcttggtcaatgctgccaacaacgccatttgatggtgtttgtgctggaaaggatttatgattttttttttttagtaatttttataaatatttcattggaattttttgtggtttcaacaaccccaacaatgcccgggtaagatttccctgatttttatgaaaaaaaaatttacaaaccaaaaaggatgtgtttcctggaaggaaaattttacaaataccgaaaaggtacatttgccccttggttttaatttgcaaataaccccccccccaaaaaaaaaatcgtctaagaaaaagatgaaaacactcggcaaaaattagagagtcatttgacctgctcgaagtcgatgaaaatggtgcaaaatgcgcttgaagggaatgcaatcgtccggtgaaatctgatggtccaaatccaacttaaattgcaaaaaaaaaacatgaaataaagggtaagagattgtatagcgagaaaaatcaaaaattcgagtacagagacaccaaaatgcgtcttttttttttgacaattttgtacaaaaaatcagggcatagatagcaaaacagttcatttgtttgcactgactcttggcaaaatgttgttcaacgagcatgtgtactgcttgctgagctcggtgtcctcgaattccactcgctcaacagcagtggctggtggtcttgaccgaccatgtcctggaaattgtgtgccattttggcaaaaattttgtggcattttttacgggtgtgttctcccggatgcttaggcccccgaaaacccaaccccaaatagggaccttttaggctcgaaattttttccgcttttcataaaaattcaatatttgtcaggggagggcccatccgtaaaaagtgccaaaatttttcgagcccccccccaccctcgatttttttttaaaattaccatcatttccatttctaatggaaatttgttgcaattcatgctcagatatgccaacacaaaaatgggcattgaaaaagtcaaatttgacggaggacgatgaaggagcagcaacagcagcagcggtagtattgtcaacagcagcatcggacgggcctacatatttttaagaaaatttcatgaaatttttttattgtttcttgccttcaatgggctccgtaattggaatttgagttaatttccgtcgtttttccataattttaattgacttaaataaattaaataaatacaaaatgtaaatatttttttgtgaaacagttcctttaattgagagagcaaggcaagctgggagaagaatagaaagaactcagaaatagcatagcgaactaagagaaaaagaaaaagagtaattttctgtataaaataggaagaaaagagaaagaaaatagaaaaaatagtgtgagaaagtttttggttcctctgtcaaagaaagagaggagagaagagaggaaaatgaaaagcaaagatagagaaattttagaaatagtgtagaaaaaagagagaaaaagaaataaagtatattcttttgaatggctgcgctgcgtttcctttcgcttacgaccataccacgttgaaagcacgccatcccgtccgatctggcaagttaagcaacgttgggctttcttagtacttggaacggagacgtcctgggaatcgaaggtgttgtaagccttttttttttttggttttttaaattttttgtatgtaggtatttttttatttaaatataacccaaaaatttgcgaaaaaaagagaaaaataataattaaagcttttgaaaggttttttgaatatttgcttaattttttaaaatcaaaattttttttgcttaattaaatttttcatttcattaaagcgcaattaattgacaattaattaaataattgattgcctacaaattcagcacacaaaacattctttctttcaatcactatgcattttccattttctgttctgctgttatcaggggggatggatgggccccgggggcgggggattcatcggcgtttaccgatcgacgacgaaaacggctgcgacgaagcactggccattccctcgtcctccgtccccccag

SEQ ID NO: 4526 - DNA, 3497 bp, Heterodera glycines
  unsure (1)..(3497): unsure at all n locations
ccaaggaaatcggttttagccttcggtccccaatcctccattaaagcaccaggctgctcatngcaanaaggagcagcccctttaccaacancncagangganggccnggagngnnggagaggancaaccagggancatcccgncccnaaggcgagcgaggnanaaanagagacaanaaaaanccggagaannganncnaaaaagaaaanagcngagagaaaannanacaanncannngcgangaccaaanncnagaacnnggaangaannannaanaanaccnnnggngaaaanaggcgggnacggnnnngngaaggaangagggnacacnnncccnnnganaagaangggacgganaaaaggggganaagnaacaagganaggancagcggggncnncggnaccanagcgnaaaannngancnnncacacaancanaaggnancnnnngnacngncngnncgncnagagnaaacccacgaannnncaaancananncaannncnccgnngnccnnncggcgaagcnncagcccgnagnnnnngcagccagcacggangaannccaaaanancggggncaggnnnnncgnccgnaagctcnccaaggggnccnnnnccagggggaagggggncgnngnccncgggangaacanaaanaacactggcggnatcgtagtaaagaatttcacagccaggagcgtcagcgacctttttcagagcttcgtagaggtatagtcgcgccattgaagtagtgaagagggaaatgacgacatttgagtacttgttttcgtcgacaaattcttccttaggtttataggtgagcatatacacgtcgttgtcttcgtccattagctcgacatcaattagttcaatctttttatcgtcagagtattggcggatcaggcattcgtcgttgtcaattattgcttttgagaggagatttcgcatggagaagcggccccagagtgagttgaggcaaagcttggcaatgtatcgttttccggggtcagccttcattttgttatcctctattttaattctaaattttctccagcactcatcaatgaattttctcttctcctcttcattattacaccatgatggatagccagtagcgtgtatcttcaaggccatcatttcgctcacgtaggacttgaagacattgtcactccattggtcgtattgtaggacatgaaaaagttttctgacggtatagccagcctccaatgatgcatttaattcaagatgagtacaagttgatacgaaggcgcggtcgttggtgttgacgtgggggcaggagtagttgtcgtctttgagaccttttgggtatttgttgctaataactttggcgcatttttcacagagagggaatagcaggcgctcatcaaactttattggcattacagtaactttgacgttgttgtctggtggttggagaagaattttaagtaatcctttgtaggggttgtcagttggagaacgccaattgaccgtttgctcattggtcgtgaaagaaataatttttggatgccctaggggatattttgtagagaagttggtaaacgggtagaggctggtgaagtccttgtagctgattttctgccccggttttgctgtgtggattagtttcattggtcctgtccgtcctccgtgaaatgcttctcttattttgataggtgaacaatccttccagttttcgaaatactccctcatctctttgtctctcttcatttgtttattgatctcgtgctcccataccacctccaagtcgacgtaccgcctaagtatttcatgtttcctctgttcccttagcctaatctcccccagtgtcttcccgtttggcatcctcgtctcttcatccatatcatcaaaacactcctcacacccatgccataaacaaccattcacttcaattattttgtcccgctgcccatttgtgcctttaatgtagccgtccacttggtatatctgcccttcacgtttaaacatatattctccgtagcgggaactggccgtttgtacatgaacgttgtttatgtgagagtaccagtcaagaaatttgttggccagtgcactttggttttgttgtggggtgtagcctttctccgggactatagctagagagttggatctcaaatgattaagggcaaagtttttgacgcaggcgctggctatggtcattgcttgccaaagaatgtcaattcctctatgatttccttctctttgtgttaattgtttgaattcccggcgcaactcgacgagggcgtgggtgagaattttgacgtcgttgcagcagtattcgggcaatttttcttttaaatcaaagtgttggtcataattggtgttgtaccattcgttgaacttttgcagatcagtttttttcttttgattgggacagtattcttcgcgcggcggtaaattagtaagaacattttcataattagatgatttgttaaacatgtgtggaaagtgttgtttatcctaaaacaaaaaaaattgataatttttatgaaaattaatcacttgaattttgagtccaaatgatttgatgagacccgataatttgataggcatcaaattgtagctgtcatggaaaattgttagtggggcatgctcattatccttaattttgagttcataaagacgatttccttgtttgataatttgtggatcgtgaacaccttaaaaaatatataatctatgaatattaaaaattgtaccttgtgcaataacttccttgatgatcattgtcatgtcgtagcgacccccaaagtgtgcaaaggctacagttgggtattttttattttgttcaaatagtagccattggacaaattcccgtagagtttgctgggtgacaattttttgatctactgttgtctctttgtaatcaaatggtgagaatgtaattgtacggttggggccacatatagcacattgttttccctctagtgagtttttccattctccattattaatacaattggtgcagatgacggtagccgctgcaaagttgacttcgtgttcgaaactatttccaacttttttgtcctgtgttgcctcgaaatcgtaagctatgatccggtacggtttgattttttgttgtttaagaggttggataaaacagctactgcagggattctcgtcgtcttcctcttttacgtgaaattgtttacataggcgacaaaacttttctccacattgatgactcatagttgaatgatatttaatgttatatattacaccacagtcattgcatcgttggaattttgtgcagatatcatttttaagatgtcgttcatagcagttgatgttgtaaaatttattgttacagtgctcacattttttgaagtacatttgctgaggctcacacggatagtcgacgcccacctcccggcagccgtgacagagtgaagtacagttcatagaatgtgttgttttgcggtggtagatacattcacaagagagacaatagtaacgcttcttgaagaatttagaaa

SEQ ID NO: 4527 - DNA, 2633 bp, Heterodera glycines
ttcttcaactgaatggtgtatacaagaacggagttccgccgtaggggtcagcacatgtctcaatttcctcgacgacaaatttagatttggagcggaaaagttggtgttttcggctctttgatgtaaaattgtcaatttttctaatgcatttatttgattgggtctttttaggggatgaaggaacttggtcgtcagaagttcgtttcatttttatttatatttatttatttttaatgatagaattgtaaaagtaatggaattattttgtatttaaatactcaaatttatttttgttttcagagaataatgtaaagtggagtgggattgaaaatttttttttttgaatgaatgggagaaatggacttttggttgggaatgctcgtctatttatactctcaatagagggcagcaataattattttgatgacggtaaccagagcaaaataggtcactgtaaaaaatggaatttgagagcaattgtaacataaataattactatgaaatcaccgaagcataacattttgaataattttcataaaattggtcatgcataatgtacgagagataattactacaaatacacatgtgtaaatttaataataggcaggagctaattgttatgaaatcagtcaagcgtaacattttgatgtactactagctcagtcatgcaaaacagaaaaaaaactctaataggcatgggtcggacttaattggtctggtactgacttgcctgggactaaaactacgggactgaattgcctgggactgaaacgacgggactgaattgtcacccccaaaatctgggggggtaactactcccactcactcgcaaatttggtcggcattgttcctttgaaaaataaaaagtgttatttccagggctcccagattaaattttcaaaagcctcatttggcagttaaaaaagcctcatttttacaaaatttattcaaaacacgcttcttaaaatattcaaatgctttgtttttaattgtccatgatcaatttgagaaatttttttcgaaataagcattttgcgatttttggcccactttaattcctttgaattcataataagaatcatgaaattttcgttccggcgaggggggcggggacgagctgctccccggcgatagacgccgaaggttaaaattcaataagtttattgatgataagatgaaatgctgctttgggagacaagtctcgacaggagaaaggtgggattctcggtctcgagcagcataaaaaaatgaaaaaattccgtattccaattcgattttatgcataaatggcacaaaagcataatgccagaaaatggtcagtttaaaaattaatttttccatcatagcaatcattcgcgctacacttcctctttctcttgatccctcctcattcatctgcgtatttttgattcgcctaaaattaaaaaaaaaaaaattatgaaatttataaacttttagcacaaagggcagaggcctaggcattttttggaactaggttttttgggtctggatttatttttacagaaaaataggcactttatcaatgcttttaaaaaaacgaattctaataagtattgcaagaagtggccaaaatcatttttttggcatttcgatgtaaatttattaaaaaaaaattttccattaatctcttttctccaattttcatcaaaaatttaaaaatatgattaatttatttttatttttagaaaaatttttttacattaatttgttatttctgcgagtttttacgtgctgatctgttgggctagaaatttggccgatatgtattgaccaactcctgatctgatatggcttgtgtcgctcagatccaattcggtttcgggttgcagattgtccaagttcacatggatattgcgaatctatggaaagagatataaaattattgaaagagagccaaaaattaaaaaaatacctttgaaaatttaaaaaaaaatccgttaagaataggaaacaacttgagaattcattaaaatattaaaaattggtttaagatttatgattgaattatatccatgaaaatgagaaattccatattaatcccctcacctcaatcctaaaaagtttggaaaattagaaatatcaaatttatcccttccctcatcctaaaaattcacatatttttttgaaaaatatgacagaaataaattgagaaagcggaattttacggaaaatggaaaagaaatttaattaatattttaaaaatttatatgcaaattagctttattttcggcaaatcttttaataaaacagaagaccaattaggtccggtggggtcccttccataattattttaaattaaaaacaaataaatatatttttaaataaattaattatataaaaccataactaattaaagtaccaccaaatttacctgcatgacgtggtcattgatcatcatatttttctcgaatttgtcgatggtcggaatatggatgctgatctgaaacgggaggaacataaattttttaaattttttggggggggcgaaggcccaccacgaggccgcgaagaggccgagtgagtaccttcggtgcaggaaaagtattaaattttaaaaattttttaattgctttttaaatatggacaaataattcagttggtggactttattt

SEQ ID NO: 4528 - DNA, 2032 bp, Heterodera glycines
atttgagccacacaaattgagccatttttttggaaatcttttctgtaaaaaatcaactcgttttaccaaaattgatcaattccaagccggaaatttttttaaaacattcaaaaatatattttttaccccactcgaaggggggggggctttatttcaggggatcgaatttagggggagtattccgcaataagttagggaaatgcaaaaattttataaaatctgcttcaaatttgttttttttttcttcatttttttgttaaattgaaatcacgttgtgagtgccgcggccgtcagcccggccaaactgccgcaggcggcggatgccaacggcgaacaatggcccatccgatgggccacacgacgcttcagccactcccaaagtgggaattcgatgaaggagaatggaatttctcgggccacggtgctcacataaccttaaaaaatgtgtaccagagcgatgtgtcggcaatgcagattttcaacatttttggactaagaattacgaatgccgaaattttttgagccgttgaaaaaatttcgattgccaaaatttttgagggcgtcgcacacattataccaccttatcaagggtaatgtccagcagaattgaaaatttcccgaaaaacccttggaggggacctgccatgggcgtgccagacccttggcttcggggggggagggctgaattcaaaaaatatttttaggggtgtagttttctttcttttttagaaatcccgaataggaggtgggttttgcaggaatttgtaaccgttttcgcaaaaaaatgactattttttgccattctggtcgtttttttttcaaatttgctaaaatatccatctccaagtcaaccaacgctgctctcacctttgtaaaagcctctgatgcctccccgtgttcggtacaattcggtgacaatttgtaacagtccgctggcccggctcgtctgactgcgctgcttcacaatttcggtcggcacacggaccaaacacgcgaccaattcgccaaatgttgcgctcagtgcgtccaccaatggcactgtcaaacaaagataataccaaattgggcggatgaaatatttttaacggtcggcaaaatgggtacatttcatttattcccgcgtcatttcccctcagagaaatttttaaaaaattatttctaccaaaaaaaaaaaaaattaattttacatggaattgatgtgccaattcgttgcgcaagcatttccttgccattgcaatatgtgatgaaaaacagtgccgagccgggagccgagcccacagccacctgacaatgagagacagtgacaaattaaattttcaaaaaaaaattttttttttttttagaaaattaccgccggtgcccctcggtaaatgttgcggaaaccgcccgatgccctgaacccggctttgctttgcatcctggtctgaaagaaattggattgatcatatacgaggtatttggcattacgttgtccaagtatagccggagggaatttcggcaattgtttgaaaaaatttttatggagatttttaaaaagccgaaagaatagcaaattgaaagccaacaaagagaacgtaagggggaagggggggggaggctaagaaaattggaacaaaaaaaaaccaaaaataaaaaaaggcgtaatactttgattgtgtccaatgggtaaaggctcaaatcgaccgcaaggccagccgaagcgccggccaaaagccaacgcatttggcgcgtcgtttcttttccaccaccgacggcatcgctgctttgttgtgccgccatttccaaacgctgttttgtttttttttttgttgctgacaatgaatcaatataatgaaaattttattccggttttaaaaaaaaaattttgaaaaaaaattaaaatggctgtcaaacaaattaaaagacgagaatgttgtgcatttttaatggcatagtgtaccataattgttttaactaaagtgaactctgtcaaatgctaattcacaatcaaaaagattgatgtccgttatgagccaacgggccgcgtctttct

SEQ ID NO: 4529 - DNA, 4395 bp, Heterodera glycines
aaataatcgttttgttatttttagtgaatggccactattatgtgctgtccgttttcacttggtactttaaaacaccaaaatttcattttaattacaaaatttcaatttataaattttattgtacctcggggggctttgggccccaaaataaggtcccccgaaaatttttgattttttttcgtttttttaaatacggcgcctccgccccgcttttttccccactatttgaatatacgacatttgtacgtccaattaagaaatgctacacaaaaaaatgtaaagaaacaaacaaacaaaaacgtacgtcatgttgcaggcgagaaaatcttggggcctggccaacacggttgacagccggggcgaatggatgaaagtggcgatgcgttgcgcttcctccgcctccaccaaatcggcgggcagtgcccaccgcttctgctgcgttcggtcaatgaaaaacacaaatgtgctgaagaaaatgcgctcctcatttgatgcacggagtcctgaagggcaaatgcaatagccaaaaaaatttattttaaaaaaaattcatggaaattttgcttaatttttattgactcataattacggctgattgtgagtcaactgggccccaatccgatttttgtggtataactctgtttactgttgttccaattgaaccaacaatctttgtcattcgataggacctaagtgaatctatattagcctataaaatttcgataaatttgattcggaaaaagtaactcacaatcagactaacctgcgttcaatttatgggtttaaaaaatcaaagttgttgtagatttttgtgtaaaatggggtttctaagggtccaaaattggtccatttccaaaaactgtgatttcactcttttatttttttaatataaaatttaaaaaaaacaaattttttttctagcgttttccaaatttttatgatgaattactgtttttttcaaaatttttaaatcattccggaggagggaggaagctgttccagagcagacaagtgccggattttggcccctaattttgcgcacttttccaattggtaaccctcaaacaaattttaaaaaaggactgactaacaataaacgcactttcatggacagcccggtgagcataggctgacgtgtggatgaacccgttgaccacatggtgtcgtttgaactgcagtcgttggtccaacaaatccgcgggcattttcggaatccgttggcgcatgtaaaccgttaattgttcggtcgcaatttcgcgaaatttgtcaaaccgccgttcgcgcagattgagcgccgcgagcagtgccgcctaatttttttttatttgaaaataaattaaataataaactatttggctctaattgtggtttcgctatctccggaaaatccaaaaatgctaaatcagaattttgaaatcgccagaattttttaatgaaatgatctggggctacaagaaatgagtgaaatttggggtgtatttaaaattttggcttttttaggtttaaaattccatgtaggtaatttgatcagtgtcatagcagttcgtacaatggaaattcccgcacaaaattattattttttaaatttttccggtaagattttttttttctctaaaaaaacgaaactttctatagaaaaacctaataagattttaaaaagaaaaaaattgtattcactttttgaacaatttttcgttttttttctacctgaactgcaccgtccataaatttgttcatgtcgtaggccgagtcgtaccaactgtaccataaacggttgaacgggttgataagccttcgcatcaaatcaaacgatcgcatcacaaccattggtgatttaaaaatgtagaaaggcggaggtgacattttaaaacaaaaaaatctaagatttttatgaatcctaaaaattttcgagtaatttttccgctaattaggagaaatatcgaattatgactggccaaaatcactttaaaatcaaaaaaatggtcgatttgctagtgtaaatttttcgtttttttccggcacctgcgccaaagtgattagaaaaaagcgatcaagacccgaaaaatagacgaatagacaattaaaaatgaaaaaaaaaaaaaattaaaattaagaatgagcaatgaaattttaaattatcaatatataatatttattattattaataaaaccaaagaaaaattgaaaaaaaatgttttattacagtgacaacacatttttaaaaaatgagcagacaaaatttctagtgtcaatctaatcagttagttatcactcactaaatgctaatgatttacttatcacatccgcgctatttattagtatatatcactttattattttcggaaatggaatccatcatttcttcgcgtttcattttgtcgatttgacaggcaatgctgtcacgctgaatttggcaatttttggcccataatttccggcccaaaattggctgtcatggcccaaacattcgaccaccaaataacgcacgcccttcggataatcggtgaacacgtgctcaattttgtgccatccttcctctaaaaagcagtcaaataacgaatggaatgtcccaaatctcagacaatttaaaaaaatatatattacaaattggatgataatccaaaatggttataagccaaaaacttaatttgaatccaatcaaaacccgagaaatttttttttttgtatctgattgttaaactatttttaacaaaatggtcattaagaaaattagttccagaattctgttgaatttattagaatcatatacatgcataaggggtgttccggcgcaccaccctcggcaaagttttcaaaatttgaccaagatcattggactttcgtatggaaattctgtcatggcgaacccctttaaagaatgccatcaatagcagccttaccttcccactgatcaaatcgtttttcagtctctgcccgcagcaatttggcatcggtaatgatcatttgctgtaatccctttaaaaaatgtaagaaacaccaaatgcactgacaaaaatgagaggttataaattccgaatccaaatgaatgaatgaaccatgaaaatggtctctcaaaagggaacaggacaaaatcccgccgccgaaatcacgccgctagaaatttttgaaaatattttcaaaaatttctagcggcgtgattttggggtgctcccctctcaaaattctaaaatttcaaaattactttgtggatatttgttcgaattcggtacatcgatgcacagtctttacggtttgcaacaagttcagagacaacaattggaggcgtaaaattgtccagaatttcgtcctaaaaatgtagaaaatattgcttttaataacaaacaaaactaggacacaatttttgtaggaattttcaaaaaaatctcattatataaaagaaaaccaagacttaaatcgaatcacaaatgcccccgtcccatgcccataaatgtgccccaccgtaagtccttcgtccgccaattttatctcaattcgctttcggaatggcctgtaactgagtgccacacattcgttcaccgcctcctcagtgccgtcctccgttcgccatggtttttgctggccatataggcatgggggaatttcaatgcgaggtttatgtctaaaacaaagatatattttaggcatggatcaaaaatactagttaaatcactgttaaattagtcacaaaaatccatttggtgcacatttagtgtattccaacaaacaagcattgttcattttatatgttattttgttcaaactttttggtaaaaaaattatgtttttttttggataagaatcggagggtctgaaaaatatggcaccaaaacatcggcgccgaaacgatcccggtgggataaaacaaccatgtttgttaacaaattctttttgtcatacaatttttcactctcgcaatatagcaaacagctactccacccctgttttcatggtaaaatatataattttgcgttttcgaagtttaaaaatgcattgaccccaaacagccgtgttaataaccccgagttgtcgtccgtccacacaatgtccgagttgatctcccagcgtgggtctgcaacaaagcactgtgccgtaccaagtttgctcatgtcccatgcgtcgtgcacaaaatttcgtccaaatgggcgtcgaacagccacttgtcgaattgaatgaatgctgagtgtggagaagaattgacgccatgggggatgatagttgcgcagctcggcccaatccttccaaaacgatttggcagacaaaatgtgatgccattgatgggaaacctgaaaaacgaaaactggtaaaagggcggcacttttgacgttgggaacccccgaaaaaaattccttaatagaggacacttttgtgggaattggaattggttgaaataggtgt

SEQ ID NO: 4530 - DNA, 3375 bp, Heterodera glycines
tcgaagtttaaaaatgcattgaccccaaacagccgcgttttttacccctgagttgtcgtccgtccacacaatgtccgagttgatctcccaacgtgggtctgcaacaaaacactgtgccgtaccaagtttgctcatgtcccatgcgtcgtgcacaaaatttcgtccaaatgggcgtcgaacagccacttgtcaaattgaatgaatgctgagtgtggagaagaattgacgccatgggggatgataattgcgcagctcggcccaatccttccaaaacgatttggcagacaaaatgtgatgccattgatgggaaacctgaaaaacgaaaactggtaaaagggcggcacttttgacgttgggaacccccgaaaaaaattccttaatagaggacacttttgtgggaattggaattggatgaaataggtgtcaaattcgagattaacaaccccgaaaaccacgtgtaaacaagttttcactaactatgacagaaaaatttataaaacaaaagggacctctgccccctttgaaattttttcatggacccccatcaaaatgccggtaaaagcaacgcattgatgaaagataacacacaccaatgcgcaagaaatgaagaggtctttggccgacactcggagcaaaatggcttcaatgtcagtgtcggaagcacaggacaaatccataataatattattgcttttgttgtcgctggtatttgcaaatgccaaattgcccattcctttatttggtgtggaacaggtcaacacgttcaattcggccaaggaccgaagcaacaattgatcgtcccacaccaattaaaacagtgagtgttcccagtttaaaaaaccgtccctgttttcagggtcaggaaccagaagctttttaggtcataggtttcaaacaattccctatatactgaaagtcaaactggtaaatttttgtaaaaaggggccttggaatggaaaaaatttggttgaaaaatcggttttttttttaattttttcaacttttttttattctttttaaagacattttgccaaataaaaagttttttgattctttccttctgtaaccgtgggacggagcggcgaattacatattttctttcatctttccctaccaccgtcacgtcacgttgtccattgacaatttttcagctttttattgagttttcgttaaattttcatcttcgacatgcaccggcgttcccgatctcggtcgagatcaagagcccccgaaggtaaaacattttcctttaaaaatatacgtcttaactcactaaatttcaaagaaaattactcttccgttacatattttttgttcaatttacagaccattctctgattgaagcatttgagccggctccaccaatgcattcccgacagagtttacaggttaaattgtcgtcatacaaatatttttgtagggtcaaatggaaacatgcaaatttttgtgtccaattttccttatctctgttttgtgatctattgattttggagttgactctctgcatttttcttatctgttttttgcactccgattacaatatttaccatcacattgggtggtccattttgcatattaattatccccccccccctaatcattggtttttttgtggttggggccctagcgctgcgcctcccccacaattacaccattaactggtggagttcgacatttgaaaaaaaagcttttgcctgtatccaaggaaaaacctttggtctgaatccaggtacaatcgaactcaagtatgaatttcgcaaatatttggatctgcgcatgtaactaaaaccacaaaaaaaaaaattattttcttgcctcttgaaaatgttttgggttttgcaaattgatttttttgaaatttaaacatcgtattaaatacaatactgttaccatatatttttgttcagcaaaccagacaacgattgttggcaactcggttcaacccgcccttgaaccaacaaaatactccgatgcaggtttttaaaaaaaaattttttttttttttttttgcaaatttgcaattcgtgccaataatttcagcgccataatgggcctgctaatgtgatgcgaaattcattgggtcaatcggcacctgcccacaggagcgttcaacggcctaccgatccgagaactcaggcgtgggcaccccgtccaaatttgtcggccaaccgggcatctgaccaagcaatggccaaccaacggtgccctgacgactcggtaaatgcacgaactcaacaaattcaggtcggtgcggttagaaaattcgaactttgtcatatttttcaacatcggtttaggcaaataatccaatgatgccaaccaaccgaagcaatttgtcattgaatcagccaaatgttacgccggtacaggtttgcaataggaatgagcaattcctgaaattgcatggttgtaaatttttagcgtcagaatgggccatcaaatgtcgcacaaatgttggcggcccgtcgagctggagctgttacgccgaatcaggcacttttttttaatacaaaattcggttaattgtaagctaaaaatcatttccatttttttgaggttaatgttttagggcttttcggtgtcaaatgatacgatttgacatccattttgacccgaccctttcgaaccccgaaccttgacttgaacaaatttaaattttcaacaaaatcaaaaaacttgttgaaatggatgtcggaattgaattttccaaccttgaaatttttttgttttgttttgaatgggtggcccaccatcgacactattaccaatcctccgaaaccatttttttgatttgtctatataaattatagcgactggcaacaaattccaccagcagaatcgggggacaatcgtctcaattggggcccttccagcaaatgaaaatgcgaatgaactggagcatgcgaccgccctccgggcttgcagttagcacgccggtccaaccacgtccaattgggcaggcaaacaacagcagtacgtcgatgctgcgtcaattcccaatccgaggtggacgcggacaaccgcagcaacagcaaatgcgtcgcgcgccaccgccagggaattgtgatgtgccatcgccaccgcaggtggatattgttgaacaataaacaatcctaaattggacatcagggactatctcagggagggggaggggttcgcggtgtacataccccaagactactcctccatgaaaaaaataatatatttacgcgaaattttccaaaatgtcaattttttggatgaaaatttgttataaatcgagggaatagggaaaagcacaaaaaagcgggagaaagtcaaaagcaacagaaaaattcgtttattttggggcggaagcactgctttggcgaagcaccaatcggggcgggggggggg

SEQ ID NO: 4531 - DNA, 2367 bp, Heterodera glycines
gcccagattatagaagatgtttatgattagcaaaaaaaaaatgacaaaagaacaccaaattaatctccgaaaaacattttgccaaaaaattatttcataaattaaccctcccccccccccaaaaaaaaatttaatgcagtggaagcaatttttaatacaatttgagacgaaattaaaaaaaaaaaaaattttttttccatttaagatgcctttggcggatgaagaggacaatgtgttgccacatgttcgtttcaattatgacttttttatgctcaatttttgccatccaaaaattaatatttccagagtttgttgcccgattatgagaatagcagtgagaacaacaaccccgaaaacaacaacagcggcggcggaggaggtgcaacaacgacgccaaatgcaccgcagcgacggcacgtcattcattcggatgacagcgacgacgatgacgaggatgatgaagatgaggcagacgattatcggggcggcaattctggcacacatgcacaggtgtgttgtgaaatgagctggctctattctatacagggatcgaagtgggataagcagatcccgcgcgagattttgcgggatataccagtccgtaatcctgcatttttttggcaatgcataattaatctcacgggatcaccataccattccacaaaaattttgaatccttatctcgcaataaaagcaataaatctgaaatttgcgatctctaattcaatatttttaagaaaaaaaactataaatgcggaagggtggcatttttttttttttttgaaaaaacgtgtttccaatttttttttatttgtttttcagccgacagcaaaacggggacgcattgagacgacgtataacttcaacaccacaaccatcgtcaacaacagcaacaatgacatgcatttgttcgatatgccaagcacttcggcggccgccgccgctgctgttgctgctgacaatgaacaacaacaaatgctggcgatgatgcccagcagcagcagcagtagcagcaattgggtggacacacaaaatgcactggcaaatgacatgtaatataaatattaattagacaaataattaattaaatacctatttgatatttgatccgggtgtactacgtcccctcccaaaaaaaaaaaaattttttttcccccacacattttgcagccgtacaaattttgacgacgagatcaaacgcaaggatgagctgtgcagcaagtttatgagtacttttgctctcgtgattgggaccattgacgatgcattacaacagaagaagtccaaatgaccggtccgttttcgtgttttgtttgtgtcacactttttttttggttcacctggattatatatatacacacataataccgtattctctaatatacagtcgccttttaggaaatacggtattatcgtaattttcaaatcttcgccatcacttttttctttctttttttctacattatttgttgtttgtttgtcctcaattttaattaccgacctattcttgctgcaatatgtccctttttgatgtacttaaaatgttgcttatccctgaaattcatgcgcttagctttttctacattttaaatccccaacattttgcattccctgacaattattccatattttatttttataaaaatacttaacaaaaatgactgtccatacattatgttactctatgagaatatggcatccgttttctgtttcctactgtactacacacacttgttacggtacagcactttgccggccaccacagtgcatgcaatttcggcatttccagcaccgaacacaatggcatccgccaactgttgctgctgatcactttcactgacgacaacaaactgttccaactgatcggaacggcagtcgatcgccagacagtccttcgaaagtgccaatttttgccggtttttccctcgaaaaccgaaccatcgatttgccgacacgaaattcgccgaccgattcggccaggcccaatgcacttgcaccattttttgttgcaatttcgaccatttttgtcgcgtcaattgcggcccaattgcgacaattgtggaccatctcaaaaacaaacggctcttcatattataatggatggagtgtttcagtacaaacatattttttcattaattgaaattagagtgccacgggaccgggacctggtagcggactagtcccggttttcccagccaaaaattcccgggttttcaacccgaaaaggtcccggtccccggtttgcccaaaattcacggtccgtggcactctaattgaaatctttttagcaaattttgtttacattctgacaaaagacgagccatcttatttccctcaaaattgctgaaaattgaaaaacattttaaa

SEQ ID NO: 4532 - DNA, 550 bp, Heterodera glycines
ccatcccaaaagcaattcggtagagaattttgtgctctttctgatgggcctactcattttttccagaaaaatttttccaaccccctaggaatttttttgaaaattttcccgattttaagccattttggggtgtctagatcacaatgaaggagtgatctgatcaccttggtctaattaccttttttgatcagcatcaaaagttatgctaacagggattttttcagatttttaagtaaactttaaaatagtttttcaattttgagtaaagacttttttccgccctttttggtgtgcatacatttcgtcaacttgacatctcgccaactgacatctcccaactgacatctcgccaaatgacatttcgccaactaagccaaaaacattcatttcgccaactcagccaaaaacgcctcccctcgattcggcaactcaacgattcgtcaactcgacgattcgtcaacccagccaaaatgtgacgattcgtcaactcagtcaatattacttaaaaaatggaattaacaataattattgaatatttcatcggaagggt

SEQ ID NO: 4533 - DNA, 2740 bp, Heterodera glycines
  unsure (1)..(2740): unsure at all n locations
aactcagccaaaaacattcatttcgccaactgacattctcttaactgatcaaaaaagaatgattaaggaatagtaaataagaggaaaacgaatctgttctgatatcaaatacattattctttctattttttatgctaaatttttagaatttgtttttttttctattcagattatattaagaaatgccaactgttcgcgaaattcttgagtgtttgcaaaagccaattaaacggcccacggcccagaaatccaacaaatgaagacagcgtactgaatgctgagataaagcgttaaagtattacgcggaagtccttcaacaactgaagcgtgccattaatcccatccggccaattaaaggcaagaaaaactacataatgactttaataattattagttaagggatgtgcgacttcgagacaggaatgctgaaggcaatgcggcatgtcttcccatcatgcgagcgctccggctgcaacttccacatggcgcaggcattgttcagaaaagcgaggagcttgggcatttttcatttatttgccgaaaacaatgccgaagcactgggtcaaagaaaatcggttcacaaaacattcaggtaggtattttcattagcaagtctttttttcaaaatcagatcagtcctctctttggcactcattcctccactttacattcgccaagcatttacaaccattatcaatgaagcccgcttggagttcaaggatggctggcgtattttggcaaaaactacattggtgccactcaattcgagattgaccatggagcggaggcatttgaaccaaatgcagatgtaggacgcttatttcttcgacgcactcgaagcacaactcgtaaattcaaatattttgtcatgaaatttatgaaaatttttatcaattttagcgttcagtgtgtcccgggcgtccataatgacaggcagtggaccaatacaattcggactgcattcgccataaccatcaactccgacgatcccattttccgaagagagcatcttgcagcttattcgacgttgggaacacgccattgtccgtcctccccgcttccccatatcgttttggaatgtgcacaccagggctcaaatggcacttgaacgaacaaataacggcatggaagccgcacacgtccaattcgcagtataaaaaatattttcagaaaacatttttattttttggtattttcagctagagctcaaccaccatccatcattgagtgacttcattgctgcgttcacaaaggacatcgacaaacaactggacatcggacgcgcagaacagctccagaaaagtagaaaacgaaacggtacaagtagtataaggccacaaatgtggtggtaaattttacccccacattctgcccttcgcagcgcgccggcggtcgccccctccctccccattgtgggagagtgttgtgcccttcgcagcgcgcgccggcggtcgccccctccctccccattgtgggagagtgttgtgcccttcgcagcgcgcgccggcggtcgccccctccctccccattgtgggagagtgttgtgcccttcgcagcgcgcaccggcggtcgccccctccctccccattgtgggagagtgttgtgcccttcgcagcgcgcaccggcggtcgccccctccctcaccattgtgggagagtgttgtgcccttcgcagcgcgcttaaccccttttttttgcacgagttgcgctcaaatattacacaaaactatgcgagctataatttaattagtcgcaattatttaattttgtaagattgaatttttattaaatatatttagatatagaataaaatatttctctatttctttctattctaaaaggactaaaaaatatttctttttcgggtttaaacaaatgctttactgctgttattctaattttattgtataacattctcatgttaaagcgataattttgcacttgtttttcgaattcatttatctttnaaaaacaaaggtccgatatattctctgcttcttgacatntaaatatatctgtttctttgatgccaatttttagtttctgcatagctaaggcctgttttctatattcactcataataagacctggtaatttttgaattttttcgagcattcctaagaatgaaaagtataaattttcgattccaggtgcactaaatgctgctatgtagaaagttttcacacctttaaaaagtttatttgcaaagatttcaagattatttgatcgtttaagtatattcccggctattttccaattttttgttacattattcttaataaaatcaatttcttgaattattgtagacatctgggattatagttacttctaacgttataacaccatccaaaggataaaaaagcgaatattgttcttcttttaataagacgtgttggaacaaagcctcggccgtgttttcgttagggtatcgaagagggcaataaaatgattcaaaaccaaaagaaagcttcaaaatgcttctgaatttcccttgctcatttttataattttcttcaattaacgatgtgaggatatctttaaaattttcctcagcattaattatgaaaggatttttaaaataaaatttagttttatattttgtaaaaccaaattttaagtcttcataacgaaatgactcaattaaagaacacccttccattttgagagttgcccttttagtttttatgttcttatatacccatatggggagaaacaattgtttggagcctattttcataatt

SEQ ID NO: 4534 - DNA, 3646 bp, Heterodera glycines
taaaaaattttttttttggggtttaaaaaaaagcttttcttctgtttttttatttttattttaaactttctcatgttaacccgataattttcatttttttttgaattcattttttttgaaaaacaaaactccgttatttttttggtttctgacatttaatatattggttttttgatacaatttcaagtttccgcatagttaagcctggtttttatattcacccatataaggccgggtaattttgaattttttcgagcatttctaagaatgaaaaatataagttttcgattccaggtgcactaaatgctgttatgtagaaagttttcacacctttaaaaagtttatttgcaaagatttcaagattatttgatcgtttaagtatattcccggctattttccaattttttgttaaattattcttaataaaatcaatttcttgaattactgtagacatctgggattatagttacttctagtgttataacaccatccaaaggataaaaaagtgaatattgttcttcttttaataatacgtgttggaacaaagcctcggccgtgttttcgctagggtatcgaagagggcaataaaatgattcaaaaccaaaagaaagcttcaaaatgcttctgaatttgccttgctcatttttatatttttcttcaattaacgatgtgaggatatctttaaaattttcctcagcattaattatgaaaggatttttaaaataaaatttagttttatattttgtaaagccaaattttaagtcttcatgacgaaatgactcaattaaagaacacccttccattttgagtgttgcccttttagtttttatgttcttatatacccatatgctcccaaacaattgtttggagcctattttcataatttaacatttggctttgcacccttcgggactcaaaatgtaatcttcgggcttctgttaaagaattttgagattgttcctcaagctttgttgcctggtcaaaagttttgcatctttcgaactcacgccacgcagattcagctttttctgactccaaattgatttgttccaggaatttgaaaatttcccaaattgaatcggacattttaagatacaattcccgaacaccattagcgtaaggagctttttctcttgattttattgcacgattaagagtttctcgagaagacttggcaaaatcgcttacatcatccgatagcacaacgacatctcgccatgctctctctgtctctcttttagcagcttccaacaaaatggaattagcttttctattttttattttttatttttctgtttttcttttatatatttttattatattttatatgcaatgaattcgtctctaaattctgctgagggtcttggcttttcaaattttatttgattttctcgcattatttcttttattttattggccatatctccaattcctaaatctggctgtgaataagagttacgataagtctgtccaatttcatgcctatattttttagctatttctattgattgtttggcatcttcggctaattcttggcacatcactgggtcctttctgtctagacatttttccatgccttttttaatatttttatattcttttcctcattttttattttatcaaattgtgaatgtatttttctaactccgtttaatagtttttcatgccaaaatatgatttcagattttcccgaattcctatccttaataatttgagcttcaaccatggtattatgagcagaaaatgaaaagtctttggcctcattagttaacctaattatatctttaattacttcttcaacaacccttcgggaggcatccacatttcatttatagacaaaacaaatcaaatttcataaatatcaatcaaagtataataaattcccttcttaccaccatattctttcacactcacattaaccttcaaagtacaaatggtcccaaccaagtttttaaccttttcctaaaaaaataaatttttgtgtttaaacatttttcataccattccgtcactcttttctacatttttcacaccgaaaaaagcaacacccccaaaaaacgtctgtatcatccaagagcgacaatctcaaaaatgaagactttaccttctccataccacagttacacttccccttacgacaagagatgcaagcctaaaaatcaagatatgttttctatttggttttatttacattgtattccgtagacccaacacttgcaattttagcacgaaccacaaaaattcgactaccacaaaccaattcaatattcttaatgtcgcggattgtgttcatttttcgagactaaaataaattttagaaaattaaaaaattaaaaataaatttcgactataactaaggcaaaaaaaaaataaattacacaattaatatttattataaaaagcaattcgaaagtgtgatggcagttttaaaaattcttccatcattttttctgcaacacttcgacgagaaatatcaaagagacttggagggacccgatagagcaatgaccaagagccaagccattctctgtaataataatgacatatagatttttaatcattaaagacctgtccatacgattaaagaaaacatttagtagtacttcaattggggaagtcaacagttcttttccccaagctaatgccaggacctttagcatttggacctttgccagaaaaagacgactcctaaaaaaaccgttgcggtttgtctggctccttccctcccagtaaaaccagaagaaaaaaatagggagtcccaatcccgaatcatttcccaaatagttcccctgtacgatgccgtgtagtaccaacgtgtatctacccataggagtacccgcccctgagtcataaaaaattcgcatatctcgctcaaccatggtaaaacaaaacgcagacgtgtgttcgtgcatttctatgtagccggaaaacgggctttcataatcccggtgtatggccactttatattgggatgattcaatcaacatcgcttcaacctcagctctgttcttaggccagaaaaagtcttccttctcaagagcagtttcaaaatattttttgaacgagtacatttaaaactaaaaataattagcgaaataatttttaaaatacaagcgtataaaacattaaataaaaacatcttttttcatcaaaaaaatttaattttggctgagtggcgaaatgaatgtttttggctgagttggcgaatgccaagttggcgaaatgtagtcgtgccccctttttcattgtgcataccagcatgactgacaaaaatttcgtggtaaataattagtgcataagccaatttgtagtgattctcgacaatggagggatttatcggacggatttgagaccataacgggggctgatcagttcgaaaaactgaaaatttccattagacagtaaattaaaaaaaatttatccttccataataggcagaagcaaggaatggttctcatcgcttataacattctatcaatctttcactgtatttaggcaaaccctttccaatataagcactaatggcatttttatttatcaaaaataatagtaaaaaaatatacaaaaatatttctttgaattaaagctgacaacattggcaaaatggggcggaaactgtattatgccaccagtgcaaaaacagaaa

SEQ ID NO: 4535 - DNA, 2777 bp, Heterodera glycines
ttgttaacagattttcacaaaaaaggttggtttttgcgattattaagctcaattggtaggattttcatttaaaaaatgataaaatatgtatcaatttaaaaaaaaaactatgaggaatcatattttctttataggaaacgcacgagtatacaaaaaaaaaattgaaaataatctaatttctgtagagggattgaaccaggggaaagaagaagggaaagtcaaggagactagccattaggccatttgcacacttgggcagtgttaatttttatttttccctttgactccaattttcttcactaatttttcactcatgctggtatgcacaatgctaaggatatttatctgtagctagcgatatgtggatagggtagctgcagataaaaaaatctgcagataaaatccctatgcacaatgctagcgctaactatctgcagctgaagatttttttatctgcagatacccatccgcagcaactctctcgtcacacatctttttatcttttctatccctcaagagaaattttctaactgggggttttcgaggtcgctgatcatgaatctgacatttatttcaaccaattcctaacccgaactcgaaaggtccaattttcggtttttgttcaatcatcatgaaatgtaaatcaaaaaattttagaggtattaaaagtcatttagtacaatttttcaatttttaaacttatttttgggattttaatcgacatttctatcgaaattatcctcatatcgatgaggatagtgattttaatctgcagataggtggtagctgctaccctatctttagcattgtgcatatgtagcctagctgcagctgacgctaaggattatttgtaaaagaaactgtcattgtgcatgcggattttaatccttagcattgtgcatacggatttatctgcggataacgatttatctgcagatagttagcattgtgcataccagcatgactgacaaaaatttcgtggtaaataattagtgcataagccaatttgtagtgattctcgacaatggagggatttatcggacggatttgagaccataacgggggctgatcagttcgaaaaactgaaaatttccattagacagtaaattaaaaaaaatttatccttccataataggcagaagcaaggaatggttctcatcgcttataacattctatcaatctttcactgtatttaggcaaaccctttccaatataagcactaatggcatttttatttatcaaaaataatagtaaaaaaatatgcaaaaatatttctttgaattaaagctgacaacattggcaaattggggcggaaactgtattatgccacagtgcaaaaacagaaagtttgtgttcgagaacatcaaagtgaccggtgtgacggcattttgtgtgggatcaatcaaaattatggcgacacggcgataattaaaaatgtgaagatcggtggcggctcaacaaatgtgtgcagcttgttcaaaggaaatgatcaacagaaacagccttcggtgattcacaactacaaagtcggagaagcgggcgacgggaagaattgtgtcgtttcgggcagctcaagcggctaatggaaaaagtgatcggagagagagagagagattggatttacaataaattgatattcgtgagtgatcatcataaacctaataataagcgcttgaagtatttgaaatattaagcttacaataaatttgctgaataaatttatgaagcaaatccatttttctcggataaggatggtcagctgatggaaccacgaatttaaaaagaaaaacttttttttttcaaaagaagacttggcatttcgtatgaatgcctgtttagcatttaaattgggtggatgtgcgtcgaatggaaaaaatatacaaatgtctacgtcaaatttataaatttgaaaaaaacaaaaggctgcttagcatagtttatggaaatcccagcgagaaaattgaaatgttttcgtgactcacattggcattggcataattatcatcattttggagttcgaagctcaaaaaacccaaagttttcgaagccgaagtttcgccagccttggtagcgatacttcttgagggcggattctttcatcacacattgatttgtttttggttaccaagatataacgtggcaaattgtaccgaccatcagcaaaccaattttcttttaatttgtttccctgacttttttatggtctagtaaattggtatcattcgatttcgcgtgagattttgtacataatttttgggtttgactgaatgaaacggggaaaattttcattattttcacatccattgccttccctttctttttcgtccctcgtctaaatggtgtgggactttgtccgtaaattgtgaataaaatctgtgctgaatgttcagtacacaagaaaatggattcaaaatggactacaaatgtgccaaaatggaaataaaaagtgccaattgcttacgtaaatcccccaataaaaaatccgtttgtctggcaatttcgtataaattcagtgtccccatcccaaagaaatcactctttaaaactttccaaatttcgaaatgcttttcctctcttttccgtccctcgtcctccgccaaattcgcccttctttctgtcgctgcttttcctttctgctgatgttagccatgctttttgatctgatcagcagcggtcgatcacttccactgggcccaaccaacgaaagggttttcttctccaacgcattacggtaggtattttacttgggttcggcatactgtaatagaatccttaca

SEQ ID NO: 4536 - DNA, 3101 bp, Heterodera glycines
  unsure (1)..(3101): unsure at all n locations
cccaaatttatatgatcaatttgttggcaaattatggcaaaaccattcctcccaaacagagatcaatcctggcgagtctggctgtacacaggttggttttacaataatttgttattgaacttcacaatttaacaatttattttggacataaaggaaattatatattaccaaagagaacgaaaaactttatttttttttcatatcgaaatttttgaattttccaggctacaagagaaagtctagctccttcaaaagatatcaattttctaaaattgatggacaattaaaattttttttattgcatttggagccgaaataactcccgacccgccaaaacgttacctaaaatgatcaaaaaattagcattttattatctgaaacaactcaacttcctcttttgtttagaaccgtcagtgcgaagctgtaagcatatttgggaatcaattttgaatggataatttttcaaaatttcttactgtaaggtatggcctggttcatactgtcggtcgggcgaatgccgttgtgccaacaaccagccgccatttcgaacccgggatggccttgtctgtcttaactacggcttttgtcccctgaatggtaacaacccaaagtttcgaattgaaaatcaggtaaaatttgaacaattcttatgctaaaggaatttatgctttgaaattttcaggtccaacaatgttatggtaaatacaattaaattaaattttaatttaaaaaaaaatattttaagatttaattaacgcgtaggtaaaatatttaggtggcgcagatgctacttgtgaggccattggtgccttggcatatgactgcatatgcgacagtgaagattgcactgtaaaaatggaataaaaataaaaatcaaaatttttaaaaatactttaaaaaataatttatacaaaataatattaaatttaattgttgaataaatttcttcaggttaataacccaatcagtttctgttgtccgtcaaggggtaatgctaatattttttgctacttaagggttatgccacccctcaaaattggtcaaaaattttcaaaatttctttgggtttcaaggatgctgatcaagattttgagaattcagggctttggataatttaacccggatgaatccttttgccgttttcattgtttaaattttcagcttttgcttgtattcaaccacctaatgagggctttacacccccgggcggtggatcaagtttgaatcactggtaccatgatccgatcacaggtaagcttaaaaagcattgtgccgaaatcccaaagcccaaattttattttaaaataaaatagaattctacatcgattattttaattattttccatttatttatgtcaaatgacccctccaattattatattttaaatctaattcaatctatcaaaatagaatttaaggcgagtgccgcgaacttaagtaccagggatacggaggaaatgcgaacaattttgccaccaaagaccattgcgaagtagcttttatctcatttacggtatttacccaattttaaaattttttagagttattgtaaacaaagtgagtgctttttttgttgaagtaagaaaaattaaattttcagcttgcagccgaggccttcctctgtatagggaccgtaccatgggtgttaaacaagagccagtatactgtcagggtgctgacaatggttgtacaagtccaaactatgtgggatttgcaaatttgaaatacaaaatttaaaattattttaaaatttgaaggtttgcacggcaatgggcacccttcaacagtgctgtccaactttcagttacctaattaggtgtaataaaaaaaaacaaaaattattaagtgcatatttgttcacgaaatggtgcaattccaaccgaagtgtacaacactgccggtggccttcctacagaatatttcgatgttggagtgccggacggtagcgaaaagttaccgtatttcctataataagccccctggggttttattttttgaacccccttccccccaggaggggggctttatttcagggagggagcactaattgaggggggggggggctttatttgtcaacctctctaaagaggggtattcagggggctctaatttaggaaatacagtattgaaaataaaattaaaaatcatgaaatttcatatttttttaaacttttctaaggaagcggtcaaacatatccacgattttattatgatgccagagagggaagatgcattcaattttctgtgcgttttgctcattttttttgttattttttttcttgggatttatttcactgcttcagtttcttggccaaggcggtaacttcaacaatttcttgtcccaagatcattgtgaaaaattctgctcaagaagtacagaaaatttttagactaagattttacattaactaaaaaattttgaagtatttcagttatatgtgttaaaataagttgtaaaaaaggcattgagtatttttaaatcattcccattaaacaaaaatattccatgaaaatattttcggtataggttagcgctagagctgctcgagactctcactctctactctcgttgttgatcaattctcgttctcgggtctcagggtcatttatcagtctcggctcaagagtctcggaaaattttgaggctcaagcagccttagtgtagagcacgatgggtgtgcttgttgtaaagggaaagtgcgggacggatcaatttggcaaattcgctaattcaaaatttactactaattaaatttcgtctttttttgccctgatcatagtctaatgccaacgacaattaaattcagtcttatgcagtgccggcgagccgttgaaggacagtagcggtgagcgaaacatggaatgttcgccgaccggaagtggcaccaattcgtgcccgtcaacacacagttgcgagtcaaccaccggctcaacaacatttggtggaatttgctgtccacggactcaatatgtttgcaagtcagttttatttatttatattttaaatcaaataaaatttaaatgattatttggcctcctttctcacaaaattgcacatttttgactttttggcaaaaatttaataaaaattccanaattaa

SEQ ID NO: 4537 - DNA, 6521 bp, Heterodera glycines
tgcagaaaaagcatgaataaaattattttacttatggatttgcaaaatgcatcttatactatcactgtttcgagatttcgaataagtgtgtaaacttggggacccgtgcccggtttttttgaattgtcgggtttttattgggtttgcctgaattattattttcacttaatagacataagatttgatataaaaatgcataaaattgacaattgttggtgactcatcagaaataggaacaaaatttacaatttggttccggcatcgcctatcggcaccgccgatcctctcgtgtttttttttttgttgttaaaacatacagtaaaaaataaataattgtaaaaaagtaacgtatataaatgctgaattaaaattatttctcctagaaaaggcagaataggtaaaatcacacaaattcaatcatatgctataaacttttattccaatttttgagttttcgcgatagaaatcctgtcttctttacaaaaaagcaaatagtgtatttttatgtcaatcatttttcttttatttcttggccaatttgcggtccaaattcattgtttaatttcggccttaataattatttttcgtttaaaaaaaggataaaaacgtatgctttattaagcacttgccagacattttcattcaatgggtgtgacggcaattccaacaattttgctacacaacaggactgcaaggattactgtcgagttgagaggtagattttaccatcatttaagagaagaaaatttttatcccggcgaaaaaatgtttcactgtcgagcgggataattagttaacgaaaaacgaaatcaaaagtctgacttatggccaagacctcgaaaaaatccactttcggaccgcaaatgtcgggacacttaattttttgactttttttgcatttaaattaattagataatgtgttaaaaaattctttaaaaatattatttccttttcagctgtccggacggtggcgaagttggcaaaaaaaaaaaaattaaaaaatacattattaaaatttaaaaaaaaaccaggtttggaaagagcccaacggcgctgtgcgcccatgcacaacaaatcggcaatgcccttccacacactactgtacccctgttactgtattttcgggcaccgtataccaaacaaaatcactgtgttgtccatccaaaaattttgtttgctcacaaccaaaggttaaggaaaataactttttttactggaattcttacaaaaattttaggaccaaggtgttagatgtagcagtacccgaatcacacgacattttttcaatgctgacacaaaaacttgtcaaccatttgagtataacggatgcgagggtaaaaaccacacaattcaataattatttttaacgtgaaatttaatcgattaaaaaattaattaataattaaagaaaaattaaaggtaatcggaataattttgccacacaaaagtcgtgccaaaattactgcttgagtgaagcttgctctccgggtactgttgtggccagagactcagacaggtggattcgggaaccattttttttaaaccgaaatttttgttttataaatttcaacctaaatttttagttttataaatttcgtagagcttttagaaaacccataaaataaaatttaattaattattaggcttattcaatgcacaaatcctggtggaacaggacgggttagtggcggttgtcctgatggatactcatgcttcagcaggtccttcttcaaatccaactatccgatagttcagctacatttttcaaaaaatgcatcaaataaaagtttttaaaaaaatttatatgatgaaaaattattcccataaaaaaatttatttttaaaatgacattttttgcttttcaacccgaattttattatataaaagccgacaaaattgtttttttttaaatttatgatcagaattggactgaattaaagagtctgatcgaaatttattaacagtggcaagagaatttgtaaaaattaatatgaattttattttttaataactaaattcttatttaaaaataaataaattcttatttttttgtttaagccttatgcccagctggctcttcaccgttcatttccgcattgtcactacagcctatgcaatgcactccaagtgatatattttaattacaaaagaattttaaattcatttttttaataaaaaaagagtttaattacaaaattcaactttcaacttgtttttcatttttagttcaatcattaaaaagaatttttaattgttttttgtccaaaaatctcaaaatttttgttgctttttccaagtttttgaagaattttttaagaggtcggacataatcggtgcattttttaattgaattttggtaattaattcttcaaaaatgccggaataagggcgaaatgtccagaatttgaacataggtatgtgcacatcatatttatttgcctcttctgaagcattaaaaataattggcattaattaaaatgtcagagaatttaatttcgctcaaaacaataaaatcgcagtcttatgcgaaacaaaataaaatgtttttctgatagatgtggatggctcttgtcctggaaatttcttctgttggttttccactacaacgtcatcagtgaacgcgttttattgttgccgttcgccggaaagcagcatcgacacgggatgtatggaagaatgtggtgctaggtcgtttgataaatccgccaatttagtttttcgacaaaaaatggcataactttgcttaaaggtaatcaaattttacattcttggtataattcgatagccaagttttttctctattagcctgcataattcaaaaaaaattggtcaactttggaaaagttgcatgaaaaaaagtactatttctgccataactatgttaaatttggtaattttatttgaacttaagcaagctaatagagaaaaagatgggctatcgaaaggtaccaagaatgtaaaatttgattgcctttaatcaaagttatgccatgttttgtaagcatagacaaaaacagtaaataggtgacatataggaaaatgattatatcaatgttaattaagtgaatgaattttagaataattatcaatttcaaataccctaattcattttcctaatatattaaatagagattttttaaagaaatcgttatataacgttctttttaatatcataaattgaaaaaaaaacatttatagtgccatacattcattttcattatgaaattatttcattttcagtaaatattaggaaaaaattaacttagattgtcctccacaacttgtgccggtgcctggcgaaggcgctacaccctacagatattgctctccgtcggcaccaattaacgatggcattcaggtccgagacatattatatttataatagtattttttaatgtttaaattgtatttttaataaaataatcacatataataatacatatttgaaaaagggatgcggtataaacagacattgccaatactcaacaacactcgaacgctacatttgttgcggacttgagagcgatgtccgactaccaagtagccggggggatttatcggtggggggcaattcggtttccgcttttaggaaaccataacttttttcttttctttgatgacttataagactaaaaaaagttatgacatacggcgccaaaaagccaagtaaaagtcaattttttgagcttttttggccataacttttttgtaaagcgacccaattttttactaataaacagaaaattaagaaaaaaaatggaaaatgaatgattctctttaaaattctacttaaaatttttaaaatttaacagaaatctctagtgaaaggacatcttttttttctgaaacaagttgtcaccagaaattttaattttgtttttaaaaatatgctgtattcttggaaagcttaatattttcaaattacctgtaaattgtttggtacaaatgttgattatgcttggcaatgcaaatgtccgtgcctgcggcgcaaatagtgcgcgaaaaatttaaaaaaaaagctgtctcattaagtattttaaattgaatgcatagtgaattttcagatgtatgtccgcctcaaccagcaaatcttgttcccgttgaattggccggtaactaccgtacctgtaatccatacgccaggtccggcaccccacaggtcagtgattcctttcttcttatttattttcttcacattattttaacgcgtttttaaatcaagaatttttgaatttttaaggcctgcccagagaattctgcatgtctgtacacaggccaagacaatggctttatatgttgccgagtgcagctgcaaagttcgcccttttcctcacgtcgtgtgcatcgatttttacattagaaaattttgaaaacaaatttaaaatttcatcatacatacatgtatgatttcataaaattatgattattatcaatggaaatgaaaaaaactttttaaatcacacctgtcttttctgtaagcgattatatcacttccaaatgttcatcaaaaattaaatcattttaatgaccattatgatcaaaatgcttattatgacagcaatttgtccgtgaattatttgaccaattgggcatgaattttcttctgccccatccttggccaaatattttatcaaaaattatttgttgctttattttgctaacgtccgtttgattctttttaatagcaataatattttcattattttaaaattaaaatgaaaaataatttgtataatataaaatcttttacataattaatatagtaaaaggtaagccaaactatttatttcatcttatgaatgccacaatcaatactttatttattgttttttcatttttaatacaattttatcaaaagctgtcgttgattaattttgcgtgcaattgtacactagaaaatgtggaattacaataatatttcccttttgcgtgcaattgtacacaaaaaacgtggaataaaaattacaataatattttccttttacgtgcagttgtaaacgtgaaattacaattcatatttcccttttacgtgcaattgtacactagaaaacgtggaattacaataatatttcctggaattacaataatattttccttttgcgtgcagttgtaaacgtgaaattacaattcatatttcccttttacgtgcaattgtacactagaaaatgtggaattacaataatatttcccttttgcgtgcagttgtaatttcccttttgcgtgcaattgtacactagaaacgtgaaattacaattcattttattccataaaacgattcattcattttattcgtcaaacacaccgttttttagcaaattctctggcatactgtacagttttttgaccaagataatctcatccgacctaaatcgtggttatttttactttggctacaactgtaatttagattgtcatgggaattatgtatgccgaagggtaaagacaatcacataatataaaataaaattagacaatttttaattgtcacattagtaaaataattaatttttttgctcatttctcaataatcagaagtgatcagaacaacagcaacaattcgtcccaatcccaaattctaatcacacgtcgtattttcaagtcgttaataatttagtgtttttaaacagtttgtgaaaagcgtttgattgacatcaccgaataaatgaaatggtacggatcaaaatcgccaattttggcataaattttgtcctggacaagaatgtttgttatgagcaaccacgtcccgctggtggaccatatcggacgggtgcgcatgattccactgttccaagcaccccaccgaaagttgaacgaaataaccaaaatataaggaaacattttaaaaaatttttattcttcacccttattcataatataagcctaagagggccttgttaacatgtaaataaaattaggtgcgtttcagagcattttctgaaaaaatattcatgaattaattttgcaaaaaattggaaaagtacgcaaaattgcaatgtttaaaatttttaaagaaacattatgggacagttaaataattatatgaataagcattcttctcagctgttaccctgcaaaatctggtgcatttctgatcactactcgtaaaattatgagtgattgaattttcactaaaaagttaagcctaaactttttggcctgtttaaaaaggaattaaaaatttttaaaaattttaatcatcttcctttttgatagaaaaagcatcagagagccttattaacatgtaaataaaatttatcagattcagatcgccatgaaggagtaatctgatcatgttggtccaaaagatttatttgttcagcatcaaaagttagcttacaaattagaggaaatttttctgatttttttctctatataaatagatttttggttaaatttaagaaaaatttgaaaaattttcttaataaacttagttaaaaaataaaagttgtccttggagatttctacaaaaaggcctaatctgagagaaaaatttgctcaaaatcgtaaacttagtcattttt

SEQ ID NO: 4538 - DNA, 1421 bp, Heterodera glycines
  unsure (1)..(1421): unsure at all n locations
ccccccccccnccccttctatatcgtgggaaaaacagtaactttctgactccgattcgaatttatcaagattcaattagtttggctgatgcctcgagagtcgaaattttccatcactcgagaaccaggatcgacctcgagaatcgagatcgagacccctataaaaaacccgagaaatttctctactcgagaaccgagaatctcgagcatccctttccatttcccattcaatttttggcatttccttgatccaattacattcacccagatcactttaacaaaaatttgcgtgtttagcttctgatcagaacgccgctcccgtgctaatcccgttgagcagtgaccaacaacagcagcaaatgtccagtcggatcagcaacttgttgacgacaggcattggtgcctgtgacacaaaattttgcgaaaaaacggatgccaattttcaagaaatttctcatgctcacaatcaacagcagcgaggcgtttccacagccaacagtgcctttcttgtggagcagcttcttcccaaatcggtgcccaattcaatggcatcgccaacttcgtcaccctcatcaacatcgtctccatgtcgacaaagtgggccattaccggtaggcgcggggttccatcaaagtggacaattcggcgactgggtttcccggacatttttaaccataagttttttgaatcacaacgaaatttttcgaaattagataggctattagagaacacatagactatcgaattaaataaattagttcaatttggacaaactaccaaaggagttatactctgtcgcccatttgcccctttttcgtcaatcaatcgcatctagaaagacggcaattcaattaaacaaaattttgctcggattatttggggagcaatttttggttcaattccacagtttcccacttctgccggcattgttgcggccgcaattgcttccgctgccaccaccacaggggccactggcgccagcacatcaatgccaagaccaggattaagcagcgccgtcgacggcggcggcatttctgcgcttagtttgcctcgagcgattgcgccatcgatcaaagtgggcacggccgcatcagccggcgccagcccatcatcattggctttggagtacgtgaacggcggctacggcatgaagaatccattgctgaacgcgcacaacgcgccgcccgacgtggacccgacgccggcgcccacctcagcgcccggcgcgctaagctgtcgcacttgtggaaaggtgcgggtccagacatgggattcatgtaggagagaaaaccctaacttcattcaggggttcccgaacgttttaagcggcaaagaattccaaaaatttccgaaaaaacaaccctnttaaattanaaagcaagtgaaaatttcattttagaaattccattttgcacggctgct

SEQ ID NO: 4539 - DNA, 4572 bp, Heterodera glycines
  unsure (1)..(4572): unsure at all n locations
ctataaatgtttttaaagaatatctattccgataattaagctgctctcactaagaaatctttgatttttgaactaatccagtagcaaataatcaaaaaaattttaatataaaaattaatattttaacatttaaaagagaggaatatttttcatttaattttcaaaaaataattaaaaatttaagtttgaaaaatattttgttttaacaaaaaatttaaaaagaaaggaatattttttatttaattttcgatttttttattattttttaattttatttattttacttaattaatgcattaaatatatcgatgtctatgattttagtattctcagattttgtggttcttgcggagtaatagtcaaaaaattgtactacataatctattgtattctcaaatatttttaaatttaaaaaaaataaaataaaaatgaaggcgacaatgaattgagtgtttgtgtttatttttgctttgtttttcttgagttttcatcactcatattcttcttctctcgtcctgaacttgttggccaaccatgcaactttgttcactacttcttcctgaaaaaacattttaaaattaaaaaattgtttttttaattgtttttttttgcctgtgcgaggttgaagcacatggccagcaaagccattccggccaacaaataaatgctaaaaaatcaattaatatatatatatatattttttagagatcggagaaattttggctgcgttttccttacattaccgtatttcctattatacagccccccccccctctgaaatagtgtcccccctgaaataaagcccctttttgaggggtggttgaaaaataaaggcctcaggggctctatttcaggaaatacagtacttaagaaacggtggaacagttttttgttccagtaattcgttaaaagtccattgccaagccccttcaatccgagtttttttttctttcaaaattccagtcgtcgtctatatttggcacgaccttgtgatgaccagcttctcctgcgcttccttgtcactgccaaccgcttcgccaggaaatttgtcgccaaagccttaaaaacaaatatataattaaaaaataataaaatattaaaaaatataataattttaccaattgttgtcaatgatatgtaacaaaaataaaaactgtccagaaaggtccatctgaagaattttataaagttattattgaattatatatattatttattttaaaaatttaattaaatatatttaattaataaaaattatgtttgtttcaactcactcctcccacagacagaagagaatggcgccagtcaccagataggcaagcattgtcagcaaaaccaacgagaggggcaccttttgttgaaactttcaataattaatgatttttttcaatacatataaattagagtttaattagtttatagctttgtcctttttgggctattaaagcggttaaatatgtattaattaatatacatcactaaaactaagagtttgaaatgttgccaaaaattttctcataatccacgtcataaatgatcaccgatatccgctgaagttgggcttcgacgctttccttgacttcaagttggaccaaatgggctctggctgctaatagctaagaattgaacaataaaaaatattattaattttcaattttatcacctcattaacatcggctgctgcgccagtgacaaaaccgccattgaccggcagtgtattggcaccactggggccaattgactccaacgagcattcgtcctgttgctggaagcgcaatgtgctcaaatctgttgttaaaaaagcgcagatatttataaattttgaataattaatttttaataaataataaaatattttttatgatattgcgcagagatcaattttttgagacttattctatgtgaaaaaaatgaaaatatattttctctctttttaaataagatatctttaattaatttttaagttaaatttttgatcagaataattaatgaaatatatttggctacaactatttatttatttttatttatcgaatgccattttattaacttttttattattccaattttaagctatataatttaaatttaaagggaacaaaaatatttagaactggagcaattaattatcaatatcacttttccttacatggatgatttgaacgggtcagctggcaacccaagaattagcacgtcgaatttttgccgcttgacgacgcttgtgccacaaaatgatggtgtatttaagacgaattgagcgagcatatagaaacctaatttaanatatggaaacaaaattttttattccatttttaaaaatttatattttttaattttcacctaaaaatttttgccatcacatcgccaatgtttgtgaggaacagcagcatcaatgggatgccaatgattgcaaacagaatggtcagtgttttgccgaaataagtttttgcagatgtattgccatatccaattgttgtgatgatctttataaaaaatttttttattactatttttaataatgtaattgaatataaatgatgatgtcacctaaatatgccaactttacgtcattacgatcaggtaaattaattaattggcccaaaaaacgtttcactcattaataatgtgtcggaatcccgatttccgacctttttggattcgaaattagattccgaaattttttgaactgtcggaattccgattactaaaatttttcagccgttggaatttcggtttttgagattttgagtgcctcggcacacttccctggtgggtatcaatttttaggagaattcttgaagttaattagggtttgacctacgcattaagaaataaattgattgacttcaaaactttcgctttaatgttataattccatcttaagactcaaaaaatttcactggcatacttcatatttaataattaattatatttttattttctaccgatagagaatagagaaatgagccagtgaatgtccattgagctgcacggccaaactctttgccgtcatagcctcgatggatggcccaaaggcacctccgtttgaaaaattttgtctgaatttttttaaatttataaattgttggcatttttgtttttattttacctgctcgtacactatccgttcccattccgtcttgtctaatttgttcacacgaaatgtcgcattccatgccacgtcaacagcatgcctgtttatgaatttgaattaattgattgttaattcaacaaattgtaaaagcacctccgagctccagtaatctcactttggatgtaacgctgaaaacagtatgaaatggtattttaaatattaaattttattttttaaattattaagtggattaattatccacctcatgtgggccttcaacggcacggaaaacaacggcacctaacatggcatatcctatcacctaaaaacaataaaaattgttaaccccattagatagaggatagtcaaaaaagacgaaccaatgcacaaagtccaacatgtgagaagaaaaaggcgataatccttttcaccaaattcaccacatgtgtgaccttggaagagttagtttgttaatagacaaattattttgttaattaattaaattttcaagaatttttgaaattattttttattccaaaaacttttgatcgtcgatgatttcttcgggacattcgtggagggtgccttagtgagcgctattacacgcttatcagcagccttaaaaacctttctgttgattgaatgcacattgacagaaaaattgaatgctttaagaatacagtactaaaaaatgaaaatttttgaccgggatacggtatttgtgaaatttaagcacaataaaaatgaattgaattaataaattttgttcatcggctgatggtcattcaatatgtgtgagtatctgtggagaaagtgtaggcaaaaatccataaattgggggcctttcttttttggcatccaattgcatgtcggtcggttgtccgtctctttgccggcggcatgcctttcttccccccgattttgtgccctcgggggaatttacgccaccaatatatatccaaaggcaccaactgcacagctggcacgaagcgccaattgaaagacgaattgttggccaatgcttttaagttttttttgcatttggcaaaatgcgtcatcggatttccccttaaattatgaagaggattttcgtcaaaaatggatgttttgttttagcaatgactgacgaatgaatttcaaaaaatgtagaatttaatgatcctatatttaaatacaattgggacatttacgatatgtacccattgtattaaatgttgaagcaatcaaaaaaacagcaatatcttttgggtcggtattttgttggaaatttaaaaaactatcacttttttaatgataataaaaaaccccaaagccaaaaaacaattcattcgtatttttataatgtaaaattttttttgacacaaattttatcacaaaatatttacaacaaatcgaaaattagcactaaaataattcaggtataanaattaatttaattatttttaatattaatattaattttaaaaaatattacacta

SEQ ID NO: 4540 - DNA, 1627 bp, Heterodera glycines
gataatgagagtgaattgatcgatcgaaaatgtgagggatcgatcaccaggcaaataaatatatcttcgggatgtgaaattttccatttgctcttgaatgatccagtcgagactggttccaatcccttcatcagtttattttaatgggtaactacaagtcaaggcctcaactgtcatgcgcaggtaaagccaccaaaataaaaaatgaaatttttaaatgagtttttttaatgagttaattaatttaatggtttttaaaactttctaaatccaatcagatgagctgaagaaacggattagtgagggatatgccattgtgcggtcaaaattaaatgatgacatcaaaccgaaatttgatgctcgctctgctcttcacatcaattgcttgtacgcttcaatttttaaaatattttaaagaattttagaggcgtaattcaatggcaaattcaaaaaattttataaatttttagtcagggtaccctcgagggatttcgttccgaattggatcaattggacaagaattgtgatgacaaaatgagcaacggcggtcgtgagctttcacttctccatttgatctgcattggcatttgtgaacaggtcattagtgaattttctaattttttttggcacaaaaataatgtcaaatcaaaaaattttaccgctttagcaatccgagaaaatccgccttttgttggaccgttgggaccgttgcagtgtagccggcaccactaccaccaatgttgtgtcatcaaatggtggcactgaacaaccgagcaacggcaccaatattgccattaccgcaaatggagacggtggtgtctgtgttggtggcgacacgcacgacgctgctgctgacgcggcacagcatcaacagcgtgcacgcgcgttgttgcaacagcggacgcggaacgggttcaccgcactgcacattgctgtctataaaggagataaaagcgcgttgcagacgctgttggaggaaggcgcggacccgaacgcgacgccgaccgcgtcgggcgttccccctcctctccacttggcggccatgtacaattcatttattctctcactctcgagaaaattttcaaacaattttaatttaaaaattaaaaaaaactttaattgcaccaaaaacggcacataattgcaccaaaaacggcaccttctttaacaccaaaggtccggcaatgtggatgtgttgcgagtactggtcgcgcatggtgccaacctacagtcacaggactttgtccgctataccgcccttcattgtgccacctatttcgggcatgcccaggtagcagaatttcgccctggttgtctctctcaattgtaaatttgcgtgttctacaacagatcgtgcgggaactgctcgaggcgggcgccgacccaaatgcatgcggcggtgttcatgaccgaccggtgcagatcaatttgttatttgtcaaaaaaaagtgatcaatcgctttttcagattcatattgctgcgggcaaagcaaatccggcaatgttgaaggtgtggaaaattgaagcaacctgttgatccattttcgatctaaattatctaaaatttttaatctttcgaaatttcgcttcagggtgcacccctgttgaaggtttgctgaaattcaat

SEQ ID NO: 4541 - DNA, 2841 bp, Heterodera glycines
ttattgtggtcgaatggacgcggtcaagcagctgttgggtgccgcgggcagtgaagtgctgggaatggtaaattgaaattttcaaattaaaaacaaaatcatttttatttatttattttttataaataggaaaatttattttccgaaaccccattgatggccgcttgtacagcgggacgcttcgagttggtctgttttctgatgcgccaaccggaggttttttgagtaaaaaatttttacttttttattttttgccattttcaggttgacccaaattaccaggctcaggatgggcatacaggcgaattttatttttaaaattttatttagtttttattattttaatttttaaaattttctttttttcagcattacacagtgcgtgcttccacgggcacatccgtgtggtgcaatatttgctggacaacggagctgatcagtctttgactgcccgtgcagttgacagtcctctgatcaaccaattcggcaaaaattatttaaaattatttctaaaaaataattttgttttaaatttgcgtattcattaattacccaatcaaaatgcgattaaattttaaatatataacattaaacttttcctcaaggaaataataacatcagcacccaaaaccaacaacaacaccctttatcatcatacaacggaatttcgtcgttggcctcgcgaattgcgccatttgcacgagcggaaaattcagataaaaatttggtaaaaaaatgaaacgaatttttaaattttattttttatttttgcgcagtctgttgttgattttcctcgctatgcaaagtgtttggaggaccaacaatttcagccacaaacaccaattttatgggcatatgaaaagggccatgatcaggcgaataaatttttttaaaaataaataatattttaaaattaataattacataaaaatatatatttaaaaaataaaaatgttccacagattgttaacatgctgaaatattatgcaaatcggcggcccgattctgacgcctgctctgaatacaggtcacttacagaatatgaaaaagtagatgaaaagcgaaatgttaaagctccgggagcagttcatatacgccattaccttctccgcttggtcgtctgcgttccatgacaaaagttgatttttgaatatttgaaaaaagatatattttttcaaatagttacaaatttaattaatttcataaatacaattaaaaaataaatagatttttttaaattaaattttttaaatacaattttaaaaaaactattttcaaaataattataatatttattacatattccggtctatgaaagcgtttttgatcaaaattttatacatacatttaatagaaatataaatatgaaaattttaatgcaaaaattggaaaagaaattttctgatttttaaaacaatacgtaaccatatggatttattctttgacaattcatgattcaatgttaacaggaaaaagcagaaattttacaactgcgcggtgagctccgttccgcacaccatctttcactgctagacgttgagcttaaagaaccaattggttggtattgaactgtaaaaaaatttttaaaaaaaatcttcgaaatttttggcaatggttcgtttggcaaagtttaccgtggtgtttaccggggcaaaaccgttgcggtaaagcggtataaggtattaatgtaattttgccaaatttttatggtgaaatttcccataatttctaaggttgtcgcatttggtgcaaaaacagaggtgggcggaaaattaaaaaatttttttttcaaactttattaaaaatatttttttaaatatttttctaaggttgacatgttctgtcgggaagtgtccatagtgtcacatttgaagcacacaaacattgtagcatttatcggggcttgtatggatgatcctagtgtaagatttttttaattttctaattttcataaattttttagcaatttgcaattattactgagtttgcctcagctggctcacttttctcactgctccatgtacaaaagaggtgtgaatagaaaagcattcattctatttttatttaaaaaaaagatccaattagaaattattttaaaattcatactttattatctgttttttttttcaaaatttgtacaaaaaaaaatttaaaaaaaaaactaaaaaaccatccagggtcttcgagatgacactccgactttgtatcggtgtggacattgcgagaggaatgaaatatttgcacgaattggtggaacggccggtcattcacagggatttggtaggacaattacaacaaaaacgatacacataccgtatttcatgggggctaaaaatacggtgtttttgtcagaactcacacaacattctgttgcacaacaatggccgtgcagtggtggccgactttggcgagtcgcgcttcgctggttcgcatgacaagcgtgacgacaacatgaccaagcagcctggggttatagcctagcctaaataattgaagagacaattcattccgcggatacaatgtccaattttggacgaatgatccaattgtcctctagtccaataaattaattatactccgtttatctttaaaaaaaattttgaaatattttttccagaacctccgctggatggcgccggaagtgttcacgcaaagttgccgctacgatcataaggttttataataattattaaaaattattaaaattatttccaaaattaaaaaaaaaacaacatcaattcatgaaggtcgacgtgttcagctacgccttggtgttgtgggaaattcatgcagctgaataaacattctcacaactaaagccggcagcggcagctgccgaaa

SEQ ID NO: 4542 - DNA, 5749 bp, Heterodera glycines
  unsure (1)..(5749): unsure at all n locations
gggttgatttaaatttaaattcgtcgtccgatcggtgcatagataattaggggaatttttaattttgcatatacatcaaaattttgtgggtattaagtaaagcaaaatttcaaatttaccgacaacactaaacaataaaaatgggtcaagaattgtgattaattagattttttggatataaaaggcagtacgaagtttttccgttcataaaccaaattcataattcccttcaaatattgtttttatgcaaaaataaaatatattttaaattgactcatttgcccccccccccaccctgctcttttcgtttcttaaaatttttcacatttactgtttacattttaccatattgcattattccaataaatttaaaaataaaattttgtttagcatttattcataaactacatttatttatttcaaattttaaaaatgtctacatcggaatcaaaaaatggtaaaaatctcaattcctcccttaacattaacaatctttcacctacagcaccggacgaaggcgactgcgaaatgcccgatgaacgtgttctacacctcgagtgctttgagagcggtgattatgatgtaaataattgttgaaaattccatttttttccctcaattttaatccatttcagatgatggaattgtacggaccggaccgtgctaaagaaatgctgatcgacttgcgcgactatgcagaggcgcacggaatgccatgtaaacatgtgaagatgctgttgtacaaactggacaaaggactgatcaaatggaagggaaccaagccatgaaatggatgatgagtgatcagatattttggtgacaggacgaaggggggatgattgaactcattggtgatggatgtgatttaaaaaaaataaataaaatttgagaagaaatatttggaaaggaaataattgttacttcccctgatcggtcacacggggttcatttatgagcgcccatctcgccaaaattattattataaaatgggcgtggcacctggcccgacttttttgcgtataaatacgggctcaccgggtggcatttttcatttggcgtcccttttcaaattcacaattcctatggcgatcaacatctccgacaaaaaatcgttgtgcaaccaaatcctcggccaaacggacctcaccgtgacctcgagtggtataaccatcagcggtccccgcctctcgacaccccgcttcattccttttgatgaagcgggccgttgtaggtgttgtaagggaacggagtccgaaattgacactgtgatcacgaaagaaggcatcacgctttggtgcacccgcatagagaaggcccaattcatcccgttcgatgttgtgtatgatttaccgggacattgttttttccgtctgaaaaataagtctcgtgtgttcaacataccctatggcgacataccctcttctgacacgcacaccactaaacgacggacacacaccaatgaccatcagcatgaactgaagcgcaaagcaaaggtagctcttgacttagtggaggccggactaatggcagatgccatgcaggacggcgcacgttggaagaaggcgaaaacagcaatcaatgtgctcggcaacctccttttggcggaatcgttagacaacacttccgctaatgacacttcgctgaaaaatgataccgtagacatcaaaaaagaagaagcaaatgtggaggaagaaaaggtgcaggaagagcccaaagaaaaagaggaaaacaaggaggaccttggagacattgacaaaaccctcgatgagttcttcaacagtattaaagcatccacttcaaacatgtagaccatcattgtgtgtaaaaatgttaaacacccaagcattcaacgataaagacattggctttaaattaccatttggtctaattatttcgggcccatcgtcgtcgggaaaaactcaatttctgctaaaattcattgccgaatcggaccatttaatcaccccaaggcctgtatcgatgctctattgttttggtgaaatgaatgcggcggtgcctgtacttcaaaaggcgggagtcgatgtgtacgcgggagtcccatccgaggaattaatcaaacgtatcccgaagccccttttgctcattcttgacgatctgatgttgtccatcgatgagagatacctatccgatttgttcactaaaaaggctcatcatcaccaatttgcagtggtgtttgtcacacaaaatttgtttgagcgcaagataaaagtggcccgtctttccgctcagtacttggtactgatgcgggccccaaattcgttgctgtccatccgcaacattggcgttcagctctttccgcgtcagcttgacttttttcttgacgcataccgcaaggcgaccgcccggccctatggctatttgttgattgacatgcatgcatcgtcagacccatcgctgcgccttcgcacaaatatatttaaggatgaacaggaggaagatgaaggcacagtcgtgttcattcccaaaaatggagcggcataaccaacaacaacaagtaagggttggacaactgataaaagagaattcaaattggctctgtgccttggcccgaacgaaatcctccaaaaaatgtaaaaagttgattcgaatggcaagcaccgatcagctgctttcacttgtggaaatttgtttgaatctcgtcgcttcgcgcttccgacttacaacccgacagaaaaaacgattaatgccctatgtgagcactgtacgccggatgagcagaacgagaagtgagcggggtgccaggcgcgtgcttgtccagaagggcgcaggatttggcggattgttcgctgctcttttaacacccgttttggttgaattggcaaagaatgtcgtgagcaaaaatgcataaatacccccacatcattattgttttttcatgcaccattcattcatttgacaaaatatggcgaataaatttttacttgtccctcaagaaatttaccgaggtctgacctcaatgtcggacacgggcgatattaatttggatgccgttaggcgtgacttagaccgcgccagggtcgaacgaacacatccttctcgcaaaaatgtcaactacaaccagcagcttaggcgatatttaaaaatgcggcaagagttaacagacaaaccggccaaagttgagctcaccaaagggataagcgtgctgttgaggcgaggcgctgaagatgaggagggtgaagttgtggacactccaccccggcctcccgctcctcctccaccacctccgccgcctgggcgacgtccatggcgtgggccaattcctccaccacatccaccaccgccgcctaagagaggtcatcggcgcccaccaagtcctccgggtcgcgctccatccccgccaggaagtcctccgcctcgcccacaacgtcctcccagaccgactagggcatcgcggagagatggtcgtttggagcagtgggagaaaaggcgaaatgatatacaacgacggcaaccagttgtgcgggaccttcttgcggaagcagctgctgcccccttaccggaaagtgatacagatgatgattatatgttggagagtgggttagcgctgccagcgccaacacaatactatggcgacttgcctatgctgccctacaatgctcaacgtgaaattgagcatatggacactgctcagcagaggattgccatcagaagaaaattaaaaaaggacgaagcatatgatgatgattcggaacacaaaaaatacagggttcattacccaccttcacctccccggcttccgctcccgcctcgtgcgaaagcaaaaattgaaccaccaccatcgcgtcctaccgcaaagagagagcctcagaagccaacaaagttggaactaaaaccatcaaaatttgactccgatttacgaccaaaagtcgcaccgccacctcggccgaaaaaagaacctgaattcccgcttgaccctcggccatccacatccaggcaggctgtacacttgcctccagcacccaaaattataccaaaacctgaaccgacaaagaggcctgtgccataccgtatcccgaaaagagagccaaaaatagttgaacaacagccacagccgctgcaacaaccccttcctgcttctgccgtcgaagaagaaatgcccaccgttcctccgcctaggcgggggaccaaacgccactaccccgtaaatggtgagaatgatggtgaggtgcgcattagaaaacgggtgaggcaaccgagaagggtgagagtacagtactcgcctgaaccgggcccatcaacttctgcacaaagtgatgaacaacagcaacaacaacaacgtgaactgtttgccatcccgtcaaatcagctgaccatgactcagcgggtggaacgactgtacatcaaatgcaaccattatgcggatcgtatgggcgttcggggaaatacaattaacacagcaaacggcaaaccgttggcgcatagcaatttgcgaatggccctcaagtatataatagaccggagagcgggccgccccaccattaaaccacctggagcgaacctattggaagagcggcttaggaaggacccaattttgtattcatggacggctccgccaaagagaccgtcacagagcaaaaccacccggacggaacggacaatcaagaaggaatttcgcccgaaaaaatggagctgatcaacaccactcttgacaaaatgtacaatgatccatcatccccagcggcattcgctggtgttaccgcactgtggaaagaggcgcgaaagaagattaaacatttacggaaaaaggacgtacagcattatttggagggacaccgcacgtacactctgatgcgcccccgcagggtgcgctttccaagagcccgaaccgttgcggcggggttcatgaccgatgttcaagtggatttggctgattttcaggcgctttcgcgccacaatcggggtcaccgatacctgctcgttgcggttgacgtgctctcaaaacgcttgtttgttgttccgctgaaaaacaagagagccgaggagatgttggaggcattcaagcaactcattgaccaaatgcccatggtcccgcatcgcatcttctccgacaaaggcactgaattcaagaaccgcttgctcagggaattcttcgaggagcaggaaattgagaaacatgagccagtgcattcgttcgtcaaggcatcggttgctgagcgggccatccgcaatgtgaagcagcgattgtaccgctattttgcggaaaaggagacgctgaattgggtggacacagtacagcaaattgtggacggaattaacagctcgccgtcacgcgttcacggaatgcgccccattgatgttaacttttcaaatgcgcaaagggtgtggaagcgattgtacggacacccagcccttcaaaggcggacgccacgctttcataacgaccaatttgtccgcatgagcagagagaaggggcaatttgagaagggatatctgccaaattacggggacgaaatcctgggaggatatgacggcagtgtgcttgaaaagcggtgtgcgcacncagatttcgggtaccagaactagcgcggaatgaaccagcggaggagaagattactacagcggctagctctctgatgagcccaggaagttggcgcgncgtaagaaaggatgcagagacaagctaccgcatcgagaaggtttacaggaagagaaaacggtcggacgggaccaccgagatgcttgtcaaatttataggatatcccaatcgggagtggattgctgagtctca

SEQ ID NO: 4543 - DNA, 2624 bp, Heterodera glycines
tgccatccagtcaaatcatctgaccatgaatcagcgggttgaacgactgtacatcaaatgcaaccgttatgcggatcgtatgggtgtccgtggcaatacaattaacaccgcaaacggcaagccgttggcgcatagcaatttgcgaatggccatcaggtatataattgacaggagagcggtccgccctaccattaagccacctggagcggccatatttgaagagaggcttaggcaagatccaattttgtattcatggacggctcctccaaagaaaacagcacagagcacaaccaccaggacggcaccgaaaatcaagaaggaatttcgcccgaaaaagtggagttgatcaactccacgcttgacaagctgtacaacgacccatcctccccagcggcgttcgcaggtgttacagcgctgtggaaagaggcgcgaaaaaagttgaaaaatttacggaaaaaggatgtgcagcattatttggaggggcaccgcacctacactctgatgcgcccccgaagggtgcgctttccaagagccaaaactgttgcggctgggttcatgaccgatgttcaagtggatttggccgattttcaggcgcttttgcgccacaatcggggtcaccgatacctgcttgttgcggttgatgtgctgtccaaacgcctgtttgttgtaccgctgaaaaacaagagagccgacgagatgttggaggcattcagacaactcatcgaccaaatgccaatggtcccacatcgcatcttctccgacaaaggcacagaattcaagaacagattgctgaaggaattcttcgatgagcaggaaattgagaaacatgagccagtgcattcatctgtcaaggcatccgttgctgagcgggccatccggaatgtgaagcagagattgtaccgctattttgcggaaaaggagacgctgaattgggtggatgcagtacagaaaattgtggatggaattaacaacgctccgtctcgtgttcacggaatgcgccccaacgatgtcaacttttcaaatgcgcaaaaggtgtggaagcgactgtacggacaccctactcttcaaaagcggacgccacgcttccgtaacgaccagtttgtacgcatgagcagagagaaggggcaatttgagaagggatatttgccaaattacggggacgaaatcctggagattgacgaggtgttgaaagcggtgcgcccgattcggtacaaactgagggatgaacacggggagaaattcaagggcagcttctatgagcaggagctggcgcgcgtcagaaaagatgcggagacgagctaccgcatcgagaaggtttacagaaagagaaaactgtcggatgggtccaccgagatgcttgtgaaatttataggatatcccaatcgggaatggattaatgagtctcagcttgtataaaagcatatgtattttttcattttgttgaaaaaataaataatcatgtcgaacagtttctttgtgtttttgcccagcaatgtgacggattatccggacaatcagcccaacaaatttcgtgttcggctcccaaagcctttgcattttaatggcacatgggtgtgcgggctgcacagtatcagttacccttactcatggtcaaccattggcacattggatgcgcagtggattgacattcacttcatcgaccgacacgctttcgatgaggaaaaacagcgggtgatccgagtatcggtacctaaggcatcgcatagcagggttgaacagctcagggactttttggcggtcacattacgaaaccgtagcggagcaaaactgttgccaacaccccgtgaggtggaagctaacaggaaccgaacaaagcttcttgattctccaccaccactgaaaagagagaaaagggatgcgtcatcaccgccagtgtttgacgcgggtggaaaacgcctccaggactctcctcctttgtataatataaatgaagacgaacaacttgaggagtcaccgccgccttttgaagaaacaaaagtttcgacacctccaccgcctgtcacaacccccgttaagccaacaacagcagtcaaaacgcccgctcctccagctgtagcaccttccgcaactgcaaaaccagcaactaagtctactaccgccgcccctgttaagtctacaacagcccctccgccaactgtaaaggcaacaacagcccctccgccaactgtaaaggcaacaacagcccctccgccaactgtaaaggcaacaacagctcctccgccagctgtaaagacaacaacagcccctccgccaactgtaaagacaacaaccgcccctccgccaattgtaaaggcaacaaccgcccctccgccgccaaagacaacaacacctgtaacacctgtggtaaagagcccatctgttaagccgacaatttcggcaccaccagctcagctaaaatcgacagccaatgcgccacctccagcttcggtttccgctgaattggctcctcgcgctcctctggcagactctccaccgcgttttgacgaaggagaagaagaaaataaaacagacaaattaaccgccgcaaaaccttcaactaagacgacaattacggcgcctccggagcaactaaaaagctcggcaacgcctcatcaacaaaaaca

SEQ ID NO: 4544 - DNA, 1817 bp, Heterodera glycines
cacaaattaataggttaattcttatttagaactcatttgtttttaattaaataataaatgaattgaagaacttctctgcattgaaaatttcttttattttttcctttttattaaaatttcatcccctctgactttcttggcatttattcggtattctttctgactataataaaacagtaattttcctgctctaatttaggatttaaaaaaactatagagttcgattaaagtttacaaaaagttacagatagataagcaagccaaattaaaaaatacttttctagaaaaaaactgggggttaaccgggcgatgtcaaatctgtgaaatggtgtcacagattatgtatggcacgcacctttctctgttaccgaaaccaatgaaaaaatatacaaaaatttattgagaacaaaaaactaagcattcatatgtcccgcgacagtaattggaaaacccggaccaggacaaggatttttgatcggactctttttactccgtacaaaaagtactgtcttaacaagactccggtcctgttgcattttcctaaaccttaaccggactacatatttggcatcctcaatcagttgtccatctccgtcagaaaaaagtaaatttaatttttaacatttgaaaaccaccctattataaaatcggtattaatcataaattgagcaatttgtttattagctgtattattttattttaagttttttcttctttccatcacttttcctccattgtttttttgtccatcttttttatccattaccttggaaaaaacttccagtcggtgaatcaatcatttcttccattccaattggccacttttggccaatccttcgtttttcattttcattgattcattttatcatccgcataaattgttgcataatattaaatgacatttttcagaaccaaagtcatcaaaaatgttcaatttcttttttctgctgatcttcgcttcttctgcccaaaattcgtttcaacaaaatgtaaaataaattcgacattattttgtttaatattttatttttttgtcaaggaacatttttgccattcactccatggtaccaatgtctgtgttgagtgtggcccatttgcgacggacaaacaaaaatgtaaatgaaatgaaacatagaaaaataatataataaataattggaggacgatctcggatcatttcaaatcgttgtcaaataattttaaagattgtgacaattgatcccatacattgacaagggaagtctcgagacagacccccccccccccccctcctccttcgtccattttacggggggggggagcaaaagaggggggggggggggggtgaagaactgataacatcaccaactgttatatcagccatctgatcaaaagctgtcatgtctaaaataaataaataaaattatttatttttatatttaaatttcgaacaaataaaacaagctgtcagaagggtgagacaagcttattctgacaagtgttcagaaattaaaaaaaaatgtcatagagtaagtgcccaaacaggaactaagtcgaagctaaaaaagtatcactgatgtaaagtgtcttaaattgagttgataaatagtaattaaatttaatattactttttttctctaatcttcttgatcaaaatgcttttgtatgaccagtactgaatttggtacttttgctgtttaccgggtacttttaacattacgaatccgagttcagattagcgctaccgttcacgacatgagctgtaaattgacaggatttctgtaccaataataccatcatgggcaagatgcacatgacgctatcatccatacaaattt

SEQ ID NO: 4545 - DNA, 1352 bp, Heterodera glycines
cattgtttgattcactaacatttaattgaattttaatcaccaggtgaccaattgcgcgtgcttttcccaccgtcaccaatgcctttgaaagtgccgcactctccgccactccaatcgctggtcattaacaattcttcgggagcggaagaagcgagaaaaggaatgccaattgctgtagtggtaagtcgttaatacattaccatcaattaaaaaaccaaaaaaatttaatttctattcactgaaaaatgagaactaaatttaattggttgtaactaatcacaataaaaagaattactgttggatgagctgttaaattttgttagtttttgaatatttaagaatgcatcgttgtcaaaaaaagtcgaattacacaaaaatgaacagcagcgaccggcgaagaaattgaaccatacgcaagccatgggacatcatgataaagtgcagcactttaattacataatttaaaaacgattggatatttttcagccaacaaatatcagcgtcgccaataattcaagcagtgattttatgattttaatttgcgtattttaattaaaaacaaattatttatcagaaaataatgggacatcgcccaccaatgttcttgtgaccagcaaaaatacaactgatggtgagtgttatacctatttacgttttatttttatcaatttgtgagcaattgttgaatccgataacttttcaaatgctttccaaataattttcaacattgtagtcattgtttgatccacaaaaacaaaaaaaattaattagactttttaatgaacaggtgattacttgcgcgtgcttttccctccgtcaccaatgcctttgaaagtgccgcactctccgccactccaatcgctggtcattaacaattcttcgggagcggaagaagcgaaaaaagtaatgccaattgctttagtggtatttacgaatatttcctcatctttgaaattgtaatatgtaattaattttcaacagcagcgaccggcgacgaaattgaacaatacgcaaccaatgagccaacatgatcaagtgcagcactttaattatatattttaaaatcaattgaatatttttcagccaaaaactgttcgcgtcgccaaaaaatcaagcagtaatttttatgattaaaaatttcgtatttaaaaaaattaatcatttattagtgaataatgggaccacattaatggctaatgccctgctgatcagtaagaattcaactggtgagtgctttattcagtgaaaaaaaatattatatttttgtttaaaagattattgtaaatgaattatcattgcagatgatttgatcaacgagatgttaaattttgcggacaaaaaatcaacgaaat

SEQ ID NO: 4546 - DNA, 5274 bp, Heterodera glycines
caattcaatgaattacgacagaacatcacgaaaatcgaacaactcattgtaagtattgctcaaacacatttttaacttttaatgattaaactgcataaaaaataaatgcaaatttttagggcccacaaatgaatattattgaccaaattggcaataacattgttaaaccgacgctcgattttttgagcaaaacaaaactttcattatcgcacctcagcggaggctttgatcttgatggaaaaatgccgcaaaaagaggtgctatcagattagggcaaattacacctttctatttaaatacaaatctcgggtgctaccttaaaaatcaatgatttttaattgtaagctcaaaaaatgtatacaaaccgccaggttaagtttttagaatgccttgaaatttgtagttaagattttgccataacgactatgaaaaagttgggagtttttctcaattacaaattattaaaaatacacaaaggtaacaccgacggaaaatatttttctgcgtttaattaattttgaaaatactggaaaacgagctaaaaatcaaacatgattgaaatgcttttttaggtttattcatattcatcttttttcatttctcctatattagtcatttaatttttgttttttagccaaatcgttggagtgtaagcaaatcgcaaatcggtttactgattttggagcctgactatcggaaagcagcagtcattggaaatattaacggttaataataaaatttagtaaaacatcaatattcataataagggatattttaatatactgaattgctgtggaaaatgttttataatgctttttaattacattttattaaaaatatgagattgcttatttacagaaatattttaaggttatcgaatgttatttgctgaatctgatcttttcccgcgttttggcattgtctattacgagacaaaaatcatccgtaggcaacttaccttcgggaatgggtatgacaaaaaaaactatttatttagattcagggacaagaattcccggctttaaaatttatattaattttgaactaatacttttatcttttgcttctcggtcttttctctgtctggctttactatgacttatttattccactaattatttgtcaatttgactttcaaattaaaggacgattggagttggtctttttacatctgatcacttttatttctattcgagcggtggtgttgtttttggtcacaacatcggtggcttcggaggatttcctccgtttggagagggcgacaccatcggttgtggagtcaacttaacttccaaggaaattatgtacacaaccaacggcaaacgattgagtgagtaaaaatattatgctattcgagaatctcggtctcgactgtggcattgtctcggcttaatttttgagataaatctgggacctttttatgatcattttatgttttaaaaagcatcactctagtcacattatgcgatcgggttttatattaaaaataatcactttgattaaaaggcaccaaatcattgaaaaaattatcataattattatataaaattttctaacttaatttatgggatttttttgtataaaaataaaaatttaagagagttcggaaactccataattaattttatcatgataatcatcttcagaataaaagaatgtttgttttgctatttcagacacatcaaatatgttcgtcgtcatcaaagacatgctgctgccggcagtttttatgcattcagttggagatacaattgaggcgaacttcgagccgaatttgcaattgcctaatccctgagcaaatcatacgaagatgggaattaaaattacacaattgtaatttttcaatacaatccaaacattggataaattcatttcggcaaatgccattcgtcttttctttttaaaaaaatattgaaatattaaatgttatatctgcgacagcgatttttaggtttgtgaatgactttttttttaattgaagagttttttgtgatccgattgtgccaatagatgaaatcccgatcttatgatacttaaatcaaagaatttatgtaagtgttaaatggctcctctaattgcgaaatatgcaacaaaaaaaaagtcacgtgtagattgcgaaatcgatggggaaattgcgaaataaaaaatttgattgacaggtgacctaatttggtccatattgcgaaatcgtaaagtcacgtgcagattgcgaaataatggaagaaaaataaaagaccatcaattatttcagaaaaattcaatttcattaatttaaatgaatttttatttattcaactattgtacaattaatattcctatatcttagaattaattgaatttcattaacaattttggtgcttatcgatttttttcacgactcggaatcgctgcacatcgacggagcggatgagagtggcggtgtcattatcgattaattttatcgattttttttttgcgcggcggcgacatcgatggggagggtagggcggtgtcattatcgattaatttgcgcggcgatgcatcggcggggagggatgggttgggcaaaaaaaaagcacccgtgcggttttgggaaatcggatttgggtgggcggcaacttcaaagtggtccaatagatttgggtttgtcacacgctcctcccataggcacgggtttgtgcggggcggcaacatcaaagggatgcacccctcccataggcatgggtccacgggcggcaacatcaaaggactgcacccctcccataggcatgggttcgtgcggcaacatcaaagggctgcacccctcccataggcacgggctcgtgcggcaacatcaaagggctgcacccctcccataggcacgggattgtgcggtaaacacccatgcgaaagtgcgcttttggggttctatactactaacctttccctaaatttctacttgacaaatggttgattgatgactgttggatatattttagaccactactctcatcatatttgaatggcaagtacgtacttgaaaatcggcccttgtgcgggaaagtttaaaaatttgcttatttccaaaattatactttaaaattagcatttcaagattgtacttgaaaatagcattactacttgaaaatgggcaaaaaaaacatttgaatttttacattttttgagattttataccagtatcataaaatccaaaaatttagccattttttgggcagaatctgttaacaaattgtttcaaattttcagatttttccccgccgaactcccccccccccgctccaaaaaataggaaaaacccattttggtgaaaaatataaaaattatatttttcttatcttttcgcgtttgaattttataacgttttcgttatgttcttgaaaatcagtctaactgaaccaatgagagccctgacttagatggtttgaaggttgatctcgaggtcgttacttcggaccatcgagactctcgaggatgaataattaccctccccttttcgcccattaattaccgatttgcatattcatttatcgcattcatccgattcgttgttaatcctcttattgtgcttttattcagttatttgttttgcatttttatttctcataatgaattatcatttctctcacagaaaaaattcacaaatgaaattttggcgtttgacatttatttttatattttcgttcatacaaaaatccacatcaaatgctacgactgaaattcaggcgaagtgtatgttttaaatttatcaatttcactaattaagatagagacaaacgttttggtaaattattaaaaatttgaaattcaccgctttgcatgccgacaggcgcctccaaagggaaaaattggcactgtttctttttagtaggattataaattgtacgcactaaaaatgccaactatgcgcatatccatcaaatgaaaaatgcccagaacaaaactgccaaaaatagctttgaaccatcaaaaaatgtttaaaaattcaaaattaattttaaaaacatcaaaacaatagataaaagcattttttatattgaatttttttaacgcttaaaaattactttttttatttaaacattttttccaaaattcttacaaaaactcaaaatttttcggttttgaggatgtgtttttttaaatcccaaaagtataataaggtggattttccgcttctttttttcaatttttttttgttaacatttacaaattggatgaaatatgatctaaaacgaaaaatggcaaaatataaaaaatcttgcaaaaccaactttttataattctacttattggattttgagtcaaaatctttttttttgaatttcgggatgaatattaaaaagaagtgaattttatggaccaactgcgtttaatttttaacaaataaaaaatcaatttactttagtaatgttctattttttaaaatttgatctctaatggcctaatcatcccattatttttcagactcaaattttggttcagtgataagtcaatttatggagaatcgtgagaaaattgatcaaatttttgcggatttggtaatttaaaatgttttttgttatatctttttcattggacagaaaaaagagaaagaaaaaagaaaggagcaaatgctttctgaagaagaaccgctgcaaattgtaagtcaatgaatacgacgtttaacttattgacaaatcgaaatttaaaaaaaattaatttctttttatcattttcatttttatttagattagagatacaataacaattgactaccaatggaacacttcggactgtcaaagtgatcgtatgattttgattccaacaattattaaagtcaaacattatggaaaaaagaaaggtaaatccggatggaaatatcggaaatatttttaaaatgttaaatctttttttaattaaaaatttaaaaacataaaatttattattttgaatctaaaactgtcaaccttttttccccaggtcttcgcattgttcgttttgcctttgtgtttccccctcaaaatattggagcagtttattttgaagtgaaaattgtaaaattacaaagggaaatgaggtaaaagtaaataaattacggtttgacgaaatccccggcaaaaaagatttgtctgagaatgcattcgaagtttaatgcttcataactaaagcacaggattttttacgggtttccatatggaactttcccaaacattatgagaccacaagccaaaatttgcgcgtcccttttgttttttttttaattttgacttgtcgtctcataatgtttgggaaagtacccctttcactgggactcccgac

SEQ ID NO: 4547 - DNA, 2309 bp, Heterodera glycines
atgtattttcccgaaaaattaatattttaattatatgtaattaattcttaacaggaccagttcgtcaaatctgtcaattggcgcctgataatgtgtatgatttaccaaaatatttattttatttttgtatatcagtggaattaaaatttcctattttgcctataaatccggagacacaacatttattacggctttttcagtttatttgccacacaaaaaaatttccaataaaataattattttgttattttttcacttatttttggaaaagtttgtatttattggactttgatcattttagaattttatttatttgtttagcaatgcgatggcatgcgccgcaattgcagcgcataatttgggctttgataacacacgggtcaaactgattgtcgatccaatgtattaccataattaagatttattgttttaaattttaataataaattgattaattaaggcttcacaattggcacattattgagtgtgaaattggtggcgagaatggcttccggacgagaacacgtcgagaatttgcggcccaacatggcggagtgagcagtggcgagaacacacttttggcatttttgtcaagcataaaaggcaattaattaaatatttaaatgtattattttattaattttattttttaaaaattatttcaattaattctgaaatcgatttgcagagactttgtacaagccgcccggtgtcaacatttgttagtccaatttttacaaccgatgtgttaagataatgtgatcatttacctttcattattattttttattttaattatttaattttaaaagttataaagcatcaatttttattaaaaaaaagatttttaaaaaaatttaaatagaaatgaattaaattcgccaaattttccatttaattcttttaactcgctcttttcgtctttgaaattttcttttgcatttttgcacatttcagtttttgaacaattttttccgtttttttttgtgcttcggctcattaaaaaaattatatttttttatatttttaatctcaaagcattatttataaagcatataaaatacctttttataaagcattttatgaaataaaatgagtgatttttattttcagtaaaatgataaagttttttatttgcgttttcggccacacactgagcacattccgccgccgtatccgtaaccgccgccattgccaactgacatggaagaggagctgccgtagttattccatgagctgcaaaaaatgattttttcaaatcataattaaatgaaaatgattgaaaaaattaatttaaaaaattgaaaaatatttttgcaaaattttaattttacgattttaaaataaatttttttatataaagcattgcttaatcaatttttaatgaatctttgtttaaattgccaatttttgataaaaaatgagaaaaaagaacgtttacctggacgcgctcccaccgttgttccagctgctactgtagcctgacaagccgccaccgtacccgccgtacccaccgccacatgttgcgcaagaggaatacgatggctgcatgggaggcggtggtggtggcacaggttggtacgaagaatagccatagccgccgccgccgctgccacagctgtagcatgatgacgtcaccggcacgggggcactaaaatgaaagatttactaattagccaatttattaggcataactgaccatgcgcagcctccgccatatccgtagctgttgtacccatagccgtagcgtttaatacgactaaaattgattttgtgaatttataaatttagcaaaatatgacttatgtataaataatttaggggcccgaatttgtacgggctaaaaagttgtggaatttattcggtcggatttttaaaaaaaatttaaaatcttattttaaagaaaaacgagaaatatttttttctcacaatgaatttttcatagatttcaaatgaccaaaaaaataaaataaataatcaaccattaaagtggtaataaaaaaagatcaaaatcaataaatttttaaattaaaactatattatttctgattgtgttaattatgttagagacttaaaaatgccacatttcacacctgatcaattcatggctgtggcgcactgcgcccgactcgtcgtcgccctccgatttgacagctccgattgaacagccaaagctgatcaatgccaaagtgatcatcacaaaaagcatagcagcagagctcatcatcatcattgttttatgttgttgattgcgcaaaaaatgatcaacagaatttggtgaacagtagtagtcacaattatgggtttat

SEQ ID NO: 4548 - DNA, 2985 bp, Heterodera glycines
  unsure (1)..(2985): unsure at all n locations
aaaaatgatcaacaaaaatttggtgaacagtagtagtcacaattatgggttttattttgattttgtttnggttgggattataaaattggtaaattccctcggggctttttataccggcaaaattcaccacatttttttggaggcgttgttcattacgtaataaaaaaaaggtgccccaaaaccgcgtccccaattttggtaatcgggcgaattcggcggcgccgtcactgccccccccnccccaacaaaactgcaaaactggtcaagaattgtgctcaatttggtggaaaatttgttgtggcgatggttgacattggagaaccaccctcactcaacactcgcctcgtcgacgaatcaccaaacacaaaacaacaaattaaatttctttttgttcccatcacattggccaatttggagaacggcgatgatcatcgtcatcacctttttgctaaatttgtattaatgataatgatgatgaccgcattttggtgagaaaattgcaaattttgacgaattcctcgaattaattaaaaaaaaaaataataataataggaacattgtttgagtattttgtgcaaaataataagaaattttatgacaaaatcaaaattccaattccaactgaaatattctgcatttttttaaatcatttttttcaaattttgagaaatgtttacttggaaatgtcgtcaaattaaagcaaatgatgcgtcattaagcataattaagaaggcaaacttgaactaaaggaaaatgccaaatacaatataagaagcggttttaaaaaataataataaaattaaaaatactatgaaatttcttaaaataaaataggtctaaaaaataaatgggataaattttgatgatttaaatcaaaatcagctaggaagttgaatttaccgccagaatcaagaaaggattttcccgaaattttcaattttttgaaattctgaattcctgggttcaaaacatggattttgaaaaaataacgaaaaaacgcctataattgcagggggaagttaaagatttttagaaatttttaaacgtgtaaaaaagctacatgtctaatctaaaagcatagtaaatgttagtcaagttcgaaatgtagaattttaacgaattgtctagtcaaatataagcatggcttattttgctgggctttttacaattttttttttttgcatcaatgtcatactatacatatttgtattttttttttattatttactcaaaatttaaacgggtctcgatattttcgggtccatttgaataataaagttcttaaaaatacattattagtaaccaatattaatttgtgaataattttttccattttccaaagtttttcaaattcgaacaaaaaaaaacccaaagtaatattaatttaattttttttttttacaaaattcaacttcattaatctttttcgttagtaatgttctgtttttgctcccatttttcatttttccattcatttattcgtaatatttttttgtccatttttttcgttttgttttgttcggccggcgcgcacaaatcaaatttttattactattgtcacaaaatcgtaaaaccttctttaattaccaaattaacagcaaatgctgtaccttacctgtcccatccatttgatgatcgaaaaaaacgaaatgagcaaaaatatgagctgatcagaaacaatcagagggagttttagtgtaaactgaaaaaagatcaaatgaattaaacataaaatattcttctgatttcaaaaaaagaaattaatgtttaaaaaaataattttaaatacacaaaatttaaaaataagcatttatttggtaattttgaaagctaattattaaaatggaagccaatttttatattatttaaatgggagccaatatgaacaaatgaaactgaggctgagaaatcctagaagaattaaaaattcagaaattttgaaaaattatttttaaatttaatttatttaatcaaatgatcatttttggatttttaatattttctcggcatttgcacaaaattctaattttcatccatcggttccatcatagtgaacaaaattttgcgtgggcatcagcggcagagcattctcaattttcaatttgcacgaaaaatggaaaatgattattttacgccccctcccgccaatctttccggtgttaaatgattaaatgattgatgacactttttgcattttgtgcagcttcgccacattcttctcccatatctcatttctaaatttggaattcaccgaattcgctgatgctgaacgggtggggggggggaatggaaggccatggttctggttcttgcgcactgccgaacgaaagtgatggccgccgtcctcaagagtctcgaggtccatcgggtccaaaattgggcgacaaaggcgggcgcggtgattgtcgagagtcttgacaccaacggcaaaatgaagcaatttgtataagcatgtgatgtgtgagggggaataagaatgtggaacgcttttttgatgaaccccacagaagagcctactacaccgaccattttctcgtcaaggacaaactgtccaatccaattttggctccatcctttccccccgccaaattaagagaataatgggaggtgttccgccaatttggacaaaaaaagcggagagtttttcatcacaataaaaagtgacattgaaacttgctgccccggccattgaaggtcacacggcttgtggccacctaccagcagcagtagcaccagcagcagcataattttccactcattaagtaaatgagtggaggggggggggggggtttgcacgtcacgagcacacaaagtcgaaaatgccatataaaaggctgaacaaaatgaatgctggctatccattattccaaaatcagttgattaggaggaaccattaattaaccattaataggcacaattaataaagccctaattcaatatccataatttaaaaaaattaattagatagttatagacggaatttaa

SEQ ID NO: 4549 - DNA, 4552 bp, Heterodera glycines
cccggtgtgcccggtgacgacggtgctcagggcaacaacggtgcgcccggtattccggcaacgccccgacctcgtccgtcctacccgaccaccgggtatgtgccgctcttgtttagaatttagttttgcaaaagaatttcattttttcttagaatctaagtcatctcttataatcagagttcccaagttttttttttcaaattcatgacaaaaacactaaaattcagattcttttgcaaaataaattgtagcgctaagaaaacctattaaaaaacaatcgatatttttattagcataaaacatagggcttcccaactgaaaatctttttatgtttttatcggagccctcaaaattcaggacaatctgaaaattcaggacctttttgatttttcaaataggtacactccaattcaggaaaattcactttgtaactctgtttataatgaaaaaccgtttttccaaggtgccagatttgtgagcctgccacgaatggtaacccaggcgaacagggacctgctggttcgccaggggagccaggcaagcctggtgcacctggttatccgggccagaatgggccacgtggaccgcccggaccagccggaccaaatggcgagccaggaaaacctggccaaccaggacaaaacggagagcctggcgtactccggtgaattttcagcatttgcaattttcattattaattttttcattcattcagctatggaccggtcaaggttggccctccgggaccgcaaggaccgcccggctatccaggagggaacggagaaccaggacagcctggcccacaaggctatcctggggagcagggacagcccggagctggaggtccgtcaggatcgcctggaactccgggagaaccgggcggccaaggagagcccggagcgcacggcgaaaagggacactgcggtaggtttttttgtggatttggcagaaaatttttcaatattcaagggtctgatttttcggcattgatacgatcactgatcaattgatttttgattaattttttgtgtgttcagatcattgtcctcctcctcgcactgctcctggctattgagcagaagcgaaagagacggcgagaagctgatcagagtggaaaaccaaaaagaaatgcaatcaaaaattgttttgcccttggattattcatggaataaaaaattttgtttaaaaaattatttaatctgcaaaatttacaaaaaatgaaatttaaatcctcgcttattaatgcaatcgctgcatggcgagaaagtaacatttttctatttttttcctgaaaaatagtttctaaaattcttttgcttttgttagcttgtttactttgttttagagaatgagaagaagattagcaaagactgaaatcaaatatttaaaatgtttacgaacaaagaaaaactaaattttataaaaattcgaatcaaaaatttaaagtaaaataaaattggtcatttccatgcttcttcgagctttttgaaataaatttgcatctccgattccgtcagcaatttttgtccacgaatatccaccaaactttgcccattttgcaatgcaattggcactgaagaatcggccacagacgaaggcttcacaaaagaaaagaaattcttcagccaaacgacggctttacgtttaatcattgggtgatggctgaataatttttaaaaattaattggcctaaatgattgattcattagcgtggagaaaatcttgtgattagtgcgtccaaacgcactcgatatttttttaaattatttttttataaaaatttaaaattttacgtaataacagtgatttcaatgcatgagcagctaatggtattttgcaatgccattaacatataggcaaaactctgctgataatccttgtccaaaaaaccaaaataaattagaaaagtcactacatttaacgcattggccattcaaaaaatggtgtaaaattgttggcgccaattgttttgcagtgcgaatattttcagacaactaaaacattgtaaaaattgaattttcactaatatttttccaatataatagttaataataatttaataatataaataaaaattatggaattttaactaatcttttagtcgcatttactgacctgaaagcgttcattcagcgtaaagttaatctcactttgatattttcgcaaattgtacaaatgaagagcagtcatggacttaatttgttggcaaattatccaattaaaatttaaaaaaatatataattaaattttaattaccaaaatttcagcaaatcccaaagcgaagaaaatgcaactggtgacaaaagtggtcaaattgatgaagtaaaaatcacctcgctgaacatacatattccaaattgaaatgcccaactgcaatggacagagaattgaaatcaaaacaaattaatttcaaagatttttttttattttatcatttaaaacgctgtatgatttatatgtcaaatttaattcttaaaaaattatttttaatttaaaaaaaataaaaataagaattatattcactaaaatttctttatttagacaattaattttgttgttgtcagcgtaacttgaaatttcacaagaaaatacgaaggcataagcgctacccctgcaaaattttataattttttacagcttaattttttattttttcaaaatcagtatgtttctaaaaccaaaaaagcactacatttttgacttgatttttcaagtttttaaacagaaacggatttttgaaaaattgatacgtgattgaaaaacttcgaaattttgtacgctgataatccctactaaaaactgttttcctacaaaatttcaagtcattcattctgacaatcctctttttcattgtttagaagcatcaaatcagttaaattttgtttcaaaatcttattaatttcaattgtttttaggcaatatgcttttttttaaatttcagatttgatttaactgaatattcactccctaaaatttagtcaaataattatttttcaaaaataccaaaatgccaatccagcaaattgcgaactgtttggtggtgctgcgattctccgtatattttcgaaagttaattgtggcaaacacacgttcggccaccaaaacgtggcccattttattgcgaatcggaattaatgccatttggacaatttgcacggggactgctccatggtaaaacgcgtcggcaaagacaaatttggacaacacaaaaatgaaacgaaagcattcatactgaataaaaagaaaattttgtaaatacatattttttccctggcttctccatgctctaaatagtaggaaaaacactttcatttttgtgtttacgaacaaaaatcgtgtgactttttaaaatattttgagaatttttgaaaatttctagaaatttcttgtgaaaaaataacaaaaaaaatttttttgaaaatctacccctaaaaaataccaaaaattaattttaaatactaaaagatgatcataagcctaattaggttacattttgtggtgcctatcttaccctctacgaataattatttttccaaaaaaataacaatttttaaatatttatttacatatttgatacatattttgtttttttcttcatatttcgggctttttttaacatatttatgtacatattttgaccactttttgtacatatttttgacatccctactgatgacattatatttattattaagctttataaaattaaatccaaaataataatatttattatatttttatcagtagaatattcgtaccaatccaatgactgcgctttgaaccaaaagaatgcatttcaaatttggatgaagcaatgccgtgttggagagcaaaattaggttgaatgccgaaatcagaaaagacgcaaacaaaacacagagttcgatggaattcaaaaaaacgacccaatgtattaatgaatcatttagcaaagaagtcgaggaagaattgggagcaattgccattgggttgattaggctttgaataggcttaattgggtaattggtgcaattagagaatagaattctcgtttttcggccgactcgagaaaagaggaaatgacttcaactaccaaaataatatgcgccgtaaaattgaaaacaaacagcaaacgcattatcgctataattaaaaaattttcacaattcggttaaaattcagtaaaaaacatttggccgttaattaaataaaattgacgcctttgttattaagaagaaaatgtgatttaatatattatttaaccgttaattaaataaaattgacgcctttgttattgagaagaaaatatgatttaatatagaggtgcagacttattattaaaataattaattcacaaattacacgctttcttgttgttgaagaaaattgtgatgattaattaattatcccaaatgaagcataaaatataaaaattcaatttcattttttgaaaatgtttaaaaaatttttttacatttgaaatggggaaaaaaattttaaaataaaattgtattaagaattcccaacataaattttcacattgttttttattttcatgttaatggaaaagta

SEQ ID NO: 4550 - DNA, 1496 bp, Heterodera glycines
tgaattggatggcgacttgcaaattgcatgcatgtttaacttttagacaagttttagcgaaaaatttcgacatttttttttgtccagatgatcaactacggactgaaagtccgacaagccaagagaaggacaagttcccggcaaaagcgcatcttgcgctggcaaaacacaaagttttcgctgccgcagtgccctttgaatttggcggaatggtcagtgtttatcatttttttctatttggttcggataagacttggccctgggtccaggcatgtgttttttttcttgcatccaggcagactcggatcggttttcggtattcggtaacctggattttcttgtatgtttgtccaggatgacaaggtcaaacatggaaaaaaggctaggttacccatgaaaaacctgaattttcgggctgatattcgaattattattccaggaaatacaatgcatattttagatttataataattttgcggtataattttttcgtattatttaaattgaacgaatttgataactttcgatagccctaagtatgctctatttagcttgcgaaatttcattgttttttgaaaaaagatttggacaaaataatcggaaaactgctggccaaggcccaattacccccacccgaacttatccttcatgtataaaacattgaatacctaaatacctaattaatatatttcccccaaattttgcagaatttttgccaaaaggacatgctgcagctcagcgaatgtttgggtggtcaggacttgaatttgttgagcacgtatggcgcattttcattggccacttcactgatcatccaatacggcaccaccgaacagaaggagcactatttgccgggcattgcgtccggccaatggcgtccggcagtttgcattgatgacgaaacgtacaattttttcatgaaagtccaggctgttaaaaaaaattttcggaggcgtgaatccgaagactttagactcttagcgggactaaaaatctccaattgcagcgccgagcaaaaatggccattatgccaatttttgagttcaaattttcaaagaatatggcaaaatggggtccgtcattgccttaggcgccgtcgagaaattttttggaaatattttattaagaaaattttgaatttggaacttcaaaaaatttatttatttttggcccgaagagcaaaaaaaataaaaattcttcgaaataacatgtctttattttaataattgtagcactggcccacagtcgaatgagcatgttttttccgcaaaaggacaacaacaatttttgagcgcggttatgctttataaaatagcttctatcttaatgttttaaaatttatttatttgtttttagacaaaaatcaatgtgcagaatgcgcacaatgccaacctgtttattgtgtttgcgaatcgaacagttggagatgtggtaaaaaaacaaacaaatgcttttaccttgttttttcgacttttacacacaaatttttaaacact

SEQ ID NO: 4551 - DNA, 1038 bp, Heterodera glycines
gacacaatcgtggaccaagctgtttcgagcataaaaattcgggaacaaatgaaaactggcggactccaacgatgcaattgtacgaacttttttttaaattttaaaatgccattcatcatttgccagtttcaacggttgtgtttgagaatgtgccgttgcgtgagtggatgttgttgggatccaacgaaaatgccggatatttgactgatgaactgtcagtgtgcggacgaattgcctacggtgccggaattgttggccatctaaaaaaagtgctaggcaagttttcctttttgtgacgtcggcttattcggtgcactacattactcggagaaggtcgtcccctccccctggtcccccttagaaaattttcaaaaaaatttttagcgatttttcaaaatatttatgatttttatgctatcaaaaatattgccaacaaatcgttggtttcgaaattgtgaagggtcgaaccgatacgggggaactgattccggggagaggggaacgaaatgttcctcgcggctaatttctgctgattgggtttaattgtcggaattttgtttttcgtatcggccattttttgtgtgccaactctgtttttgccaaatacattcattcctattcaattaacaattcgtatttttatatcctcttcagccaatctgtgtcattttgcgaaccaacaagtcaaaggcaatttgcgcttgtccgattcccatccaattcaacgctcattaaccgaacttggcctcatcacttatgtgctcgaatctgttgtttattacatcggtaaaaggcgcaacaaaaaaaacattttgacacattttatgataaaaattgtttattaactcaatatttttatttatttagccggtatgattgatgaagaattgtttctgatgcaggacattgagaatgcaattgtacaagtacgttttgttttgttttgaaatttaatcattttaatatagtttcaccaaaaaattgccaattcagtgcatacgtgtacaaggggtgggtcacgaccaccccctccccccc

SEQ ID NO: 4552 - DNA, 3546 bp, Heterodera glycines
ctaattgaatgaattaaaattctttaaatagccctaaatgttctctatttgcctgccaaatttcgctaagtttcaaaaaagttaaagcaaaattctgtggaaaaccagtttttagaagtttgttgaccgtaacttttttgaaacttaacgaaatttttcgagatttggcaggcaaatagagaatatttattgctattagaagatttttaattcattcagttaggtcaattatgaaaggagttatatccaaaaaaccggcctggggcccattcgacccggtccgcaccccccccccccctgccgtttattttaaaaactttcgaggggtgggggaactttctgctcccggagaggggaattagtgcacacggataaacaacttttcccaaaaaaaaatttctgaaatcaaaaacagtcaaataagttatgaaatttgtgttacaggaacccgatttgcatttgatccggcgcatttccatcccaaccctggagacctatgtgaacaaatttgggggcatggcccaatttcggagtgcgtttgccacccaaaagatgttcaagctgaggatgaccgacatccgggagcaggacttcttggagccggccatcattcattacattgcggagcatgtccatccgagtttagaagtgagtacaagtactggctgacgttgtttttctgtccttttcctttcacccgaaatttaaaaaaatattttttaaaataaattaccattgcacaaaaatgaataaattaattaaaaaagaaataattgtaaatactatatttctaattcatcaaaaagcacgcctcctaattatgcgatttctaaaacaaaaatacaaccccctaaaaacgagtttttgaattcaacccccccccctccctcccgaagccaagggtctggctattcccttgataaataaataaattttttgtttattttcagccagccgctactggtctcgagaattccatgtcaagactgggtgggtttggggctggtggatagacagatatgctaaacacctctaattgtgttgcttttttctatcctaaagttaattgaaaattttcgaaactgaaaattattaatgtgtttttttttaatttctcattttattttatttttttaaataatgttttcgccccgtgcaggtcaactgtttgacaaagtgtgcactgaaaagggtgtgcatgtgaacacggattatatcatcttgggaaagtaagtgattaattacaaatactaattttatattttaattatttattttttgtccattaattgcttgtactaattgcaattactaatacaattagttaattaattgttttttaaacaatttagcgtttgtgaagtgatggaaaatttgttggcaatgaccgccaccattgcgcgttcgagtcggtcctatgcaattggacttcgtggtgcggataatgaggttgagtgagcatcgtacatattttcaaattttcaatttttatatatattttttccaaattggtaaaagatttattatcaaaaaaaaaagaaagaaagaattcaaaaattaaatttgctcaaacgttattctaatgtaaacttaactagtgcatttttggcattttgttttttattcacttttcttagaacttagataattagggacttacgtacatatttttaaatattttgattttttttttattacaatttttgcactttttcttatattacctataataattgcatctaaattattaatacaatattttatatttgtttacagcttcaatggaccatcatgttctgtttgaaggcgtcggaggaagcaaaaaacattatttccgacacacttaaaagtaaacaaataattaattgttttacggttttttgaataaaaatgtaacatatttcaatttttaatgaaattttaacaaatacctaaattaattttttgtgttttgactaattgctcccccatttatcccaacacagatgagtcattccttcggatgaacccgcggctcaccgacgttggtcagggcatgttgcagtgcaacggctatttcccggaaagtccgcttgagaagaattggtagcggtgcaattcagtacggctgaatgaatgaattttcgaccgatcattcattttagagttgcgcattctttgtttttttgttttatttgtatttttaagagcatttttcccaaatgtttgtttaatgatggaaaaatatttttcggtttgtttagaacatatttctttttacatcgaacagaagaaagcaaagcacgaatttatcggttgaaatttaaatgtaatgcctcaaaaatagcacataaaagtaacgctaatttaaatgtgtactcttttgaattttattaaaaaccaaaggggggagatccttttggtttgattggtggtttttggatccctctgatcacgaattgacaactattttaaccaattccgacttcctgtaacaaaaagtcgaaaaccaaaacataagggttttcgactttttgaaaggtccttcccctttggttttttaataaaattcaaaagtatacacttttttaaactaatgccgaaaaatttatataaacatttaggttctctctcagtgaatgccaaaaatgggtacttttatttttgcaaaattttgcccatcaaatcagacgagagaattatcatttctgctgctgatggcattcccccgcaaggcagaagagaagcggcgccatcttctcaataaaaatagagctttttggtccaaacccggggggggggggggcaccaactgaccccaccacatgtaaagccttttcctaggtacaatttaatttttttaatttgaaaaaacctcgaaaatcaaaattctatagaaaattggttttggtgaagattttaagaaaggcatccatccatcatttttagtggttaaagtcatcttttcaggtgccaattttacattttttttgcatcccgttaagaaatttaaaaaaccatttcggcacaaagtgccaaaaaagggaaaatggggacataagggtcacagtaatggatctaaataaagtgccacgggaccgcgaatttttgccaaaaccgggaccgggacttgccgggacctgagaaaccgggaccgtgaccgggactcgattttttttcgggaccgggaccgcaagaaaaaccgggaaccggcaccaaccgggaaattttagaaattcaaaaaaattttaaacatataaaaaaaaaattcaaattttaatttatatcaggtgaaaataatacaaaatgattctggttttcatccaataaataaaattaatgaaaattttcaaagaaattgtcttccattatttcaaacaattaatcatttttggaataaatcctccaatattaatagaaattcagatttgattttcccatcaactttttttcggagcgctttttcaaaaattggcaaaaaaaggttgttttttgcgattattaaagctcattgggaagattttacatttaaaaaaatgatataatatggtattaatttaaaaaaaa

SEQ ID NO: 4553 - DNA, 2266 bp, Heterodera glycines
agggtgatcaattctatttaagccgtcaatgggaaaactgactcattttttactaattttacattaaaaaaaacaaaaaattcgttagctaattggatttataaaaaatagatttgtaaaaaaaattgtggcaaattgaatgccggaagttacgctaactcgaagtcgaagcagcagccaaggcagtgacgcgcaacggaatgccataaaaatgccggtgccgccgcccgactcggcggcagtgggcgagccggaccggatgaccatcagcagtgaggagcaaaatgtaaaaattaacaaaaaaataaaaaataccaaattcattttcaacaaaaatttttagcaaaaaataaataaaggaaaaaattaacaaatatttatatttatttttaattaatattttaaatttttaaaactaaaaaattaatgaaaaaataaaataaaaatatttctatacaaaaattaattttaattttgttttatttgtaacggatgaaaattaacagcgttttttaagggtgtgaaaaatatgtcaaaaaagaggcgaccacatccggcacagctgaaaaagtcggtgctcctctcgatcgccaatggcacagaaaatgacggcggcacaaagtcgccccggcatggctcaatgcttcgccgtttctcccgcgcagcttcattcaaaaaagctcgtgcgttaacataatacagataaaatggattggcggaaaatcatcagaaatcgcaaaaaacgcaaaaattgggcacaaagcacgacaaaatgacaataaaataaatattatacaaatttattaattaatttattctccctcctctaaaatttggcacattggcctggtaaacgaaacgggccagttgcgtctgagccaagtttagagcatcataacttttttctttgttgaccaaatccaacaaaattggtatcattcgaaagctcttaacaagctctatcggcttcctaaaaatcacaaagatatactgacatataaaaaagttataaattaaaatatgcaaaaattctgactttttggtagtgttcatgtttcgacttttttataagttgttcaatcgcttagaaataacttatcaaaagcttctaaacatgtagagctttcgaatgataccaaatttataaaatttggccagcctgaaaaaagttatgatgtattaagcttggctcagacgcaactgacccctttcctgcattgcaaaatcattcttgtttcctaaaaaggtttggtaattttcctttataatacgaaaataatctgatttggtttttgatatttgttttgaatgaaaagcatgtttaagtatcccctaagtatattaaatgagagcaagccccgccccctcaattaaattggcatttggcgttttgacttaatatgaaaaaaagaagagaaaaagaaaagaaatagcatatacaaagaaaaaagggaagaccagacagttgcttacttatgtgtgatgaaagcgtaggagcgtgagggaataagaagtgagagataggaaaaataagagagagtgcgagggatgagaggaggagacaaagggaagaacgagaaaagaagggagagtgggggggtggatgagagagagagaatggggaaagagaacggagaagggagaaagagtgagagagagagagagaggagtgggtgagagggaagagaaaaggcgagataatgggagaaaagagagaatcaaaagagttgagatgataaaaaaaagcagagagagtcggtaggggtcaactccgtctcagcaatgttcaaaaagctataacttttttctttgttggccaaacttaacaatcatggtatcgttcgaaagccctagatgtttagaagatatttataagctatttctcagtgattaatcagctctcaaaaaagttgtcagtttaaaaccgcaaaaaaggcagaattttcaaagttttttatttctatctttttttatagttcgaaattttttgtaatttttagtaggctaatagagcctgtgaagagctttcgaatgatatcaagattgtttgattcggtcaaaaacttcaagagttatattgactcaaagttggctcagacggagttggcccgttccggagagagtgggggagagaagagagaatgtgtgaaagaagagtgaagtaagagcgagaggggagacagagcgagagagagagagaaagaatgagagagaaggagacagagagagagagagcgagagagagaggggaagggagagagtgaag

SEQ ID NO: 4554 - DNA, 2193 bp, Heterodera glycines
  unsure (1)..(2193): unsure at all n locations
ttgtcttttcaaggtgatctancacggcgatcaaattccttcctatacccaaaaacggtggacttggatgtaagcattgattagtgattttataaatgccaaattttaaaattccaaaacattcatgcccattctaatttagctcaaatttgaaaacgctcccttcccatcggtgaccatatgcaatctgaacccatacaaagcatcggccattcgaaatgacattgcagcaaaagctacagtaggccaaattctacaaaaattcaatttttgccatttaaaaaaataaaaattaaatttgttaatctaattgccaatgccaaattctgcaataataaagcatttagtcatttttataattaatttggctaattgtcatttaatgactaccgtatgctaattctacaaaaaaatatattttaccattttttccaaaaaaaattttctaatttccaaatttcatgaaatttccacaattttcctattgtcttacatggagtaagccttgcttttcacagatggacgcattggaaaatgtgttgcaggagaccggaagaagtgagggcgttgcggcagcgattagcaccgataatggtccgtccgttagccatttattgggataaaatttgcaattttaaaataaaatttggcaaaatatctttgtttaattgttattttatagtgaagaaggcacgccgagaattgaaaaggcatcagctgaacagacgagaaaagaagggggaggaggagaagcagcaaaagaaaccgagcagcagttcaccaacagcagcgagcacagattggcgtgaaatggcattggccattcaccggcgatatttgcaggtgttttttaggctaattgtttttggagcaaattatccaagtttcaacaatttttaacataattagaaaaatataattgaatgttatgagactaatcccaaaattttgcaaaaattattatatgattatgatagaattgccatcatgaatttaccgtatactgtgcttttgaaaaggtgtacgccacttgctactgtgaggtcagccgactgtcatctgtgcgcaaacagggcagttgctacgccgcttacaaagtgtgtgccgaagttttgtcgtaaattttattatttttttgacatttttagggataaaattttggagtttcgtaaaaaaaaaatcttttttcgataattactatgccaaattcagaaccgtgtcactgtgcgctttctggacaataccaacagcaacaatggctctgatcagcagcagcagcatatgcattatttttatcctaccaaatgcttgtgccaattggactggatggccaaagcgatttggccatgttttccatgtaaaaaaattgaatttttacaaaattatgattgggttgattttttggatttattacagtacacgattttatgcaagtttgatttatgcaacccactctaaactctttagaatgaaatgtttttaaattaattacaaaaatcataaccttaattatcatcgtcataatttttttttgcaaagcgcagacaacacgtggaaggagcatatttgtgtggagtgtgttgatgaccatgggtctgtttgcacctttttccctaataaaataagtaattaataatatttaaacgattatttaattattcaaggcattgtccaatgcgtttcctcgactaccgtacaacaaatggcgagggcaacaacggtggtgggtaccgtaaatctcgacaatcggccgcctcctcctcacatcgaacgtacgctattgaaatgctggacgaaaacatggacatttgtgtgtgccatcgggagtacaaccattgtgtggctaacaatttggacggcgaaattcccgaaataatgccgggcgatgacctgaacctgttgaatatcagccatctgactgaagtcggttggcacattccattgttggcataattttatagcgcagaccataagccttagaagcagctcccccccctttcatatatttcctttggaaatttgtttaataagaagtttgaagacaaaaaatttaaaaaaatttattgaaaatttttgatgatttagaagttttttcaaaaattcttacaaaaattgctagaaatttttataaaatcgggtggcggggaacaacgatacagggagaactggtccgcgagggggggggggaacgta

SEQ ID NO: 4555 - DNA, 901 bp, Heterodera glycines
tagaggtttacaaatgccacttcaggtcaaaaagggcatttcgggtggtgaggcgcgtcgtttgctgttcgcctccgaattgttgaacaacccacaaatcatttttgccgatgaaccgaccacggtccgtttttttctcgaattttcaaaaaataatccaatttttagggcctcgactcgtcaatggcggaaagtgtgatcagcgtaatgcgtgccctgaccttgtccggccggactatcatttgcactatccatcagccatcgtcggaaatttaccagaaatttgatcgggtcgggtagaaattctggcattttttccataaatttgaccatttgcctcctgtggtgcaggtgatgttcctggcccagggacgtctcgcctattttggcgaaccgaccaaagcgacggaactgatcagtcgtgccggcaatccgtgcccgtccaattacaatcccgccgaccatatcattcaggtgggtacacttcatttgaaattaatatttttcccaatgggtcgccgaaaaaaataagaaaatttcaacgattttccgtggaatttttaattcttttcaaagttttgtggaaatgatcttttctcccgggtcgctggtctaaacagaaaaataggcacagaccatttcccctttccctagcctttctcttacccattttcacaaaattttttttttaatttttcgtaattctcccaaaagtgccctccttttcaacgttttgctttcccccattgttttgtcgtttcgcttcagtgccttagcattgagatgggccgtgaatcggagtgtcagcagcgcgtccgcaacatttgtgcggaatgggaacgctgtgcggagggcgccttctttcacgcggaagttgagaagcggcggcaatgcgttcgcg

SEQ ID NO: 4556 - DNA, 3655 bp, Heterodera glycines
  unsure (1)..(3655): unsure at all n locations
gccgcgcaagacggccagctcatgggttcaggtcatttggacgaagcgtacgaacacgctgggggagcggggacggtggcatagccaaaggctggtttcggagaccccaaaaatttacggaacccggaatttcagccaaaaaatgtaccggaacccggtccccgccttgtttggctatcctccttaaaaagatataaaagggaagcggggtcgggacaaaatctcgccgccgattttctaatttaaaaaaattgataaatttttagcgattttttggtatttttttcaattaagcgtcattagtgagattagccgtttctaacccgagtttggcccagaatgttcagttatgaggaatttagttcatttttaataaatgatgaataaatagtaaaaatttggtcattttgtgcccttaaatttcgtgcagacgcagtcgttgctgaagcgttcgctgattgacaattggcgaaaccccggcctcacccgagccaaactcttccagaagctcatcatgggcgtgttcatcggactgttgtacatgaacacacagttgaacggtgtcggcgttggcaatttgaacggggccatgttttagtgagttttttttgtttgtctcttccacttgttacagtattttgtcaagagtacatttttgtaggttaagcgatgctatgaaaaacatatcatttttcaaagttttcgtccttttttccatttttttggaaattttttttgtatatctttcctgaaatcatttgttttcattactcattactagagtttttttgtaaccattacaaaaaaaactatttaaattgtaaaaaatgaatttaaagaatttttattagcaaaaaactctaagaattaagaaaatcattttcccacatttttttctttgtttattttttgggatttattccattttttctttttcaataaccccaatgtcacatcgttttcccctccttctgaagtatcatcgctgaactgacctactccacgctgttcggtgtgctcacctttttccccgccgactttccgctgctcgcccgggaataccacgacggattgtactgctcgggcgcctattttgtcgctcggtccgcctcctatttgccgctgttcaccatcgacggcattctgatggtgaccattgcctattggctgatcggactggtgcccaccgtgggccgctttctgatcactttaggtaagccgtgggggaggggaaggagtcaaggacgtattccaacagggtggggttgagttgggtgatataaacggagcaacagaggggcaaaaaggtcgtcgtcacgctgatatcccaaacgttggcattttcttagtctcctggtagtaagtctccgcgtgagaaatgggtganaacctattcctttacactgtccggacaatcggtcaatggacaaaccgtaaatggacagttcgtcaagttattttattttcttgatcaaaatcaaaaaatatgcgagtgtacgattttttaatgcttggttttttacaacatttctaattacttgacaattcaattaaatttatcattatatagaaaacatgtttaaatttacaaaaatcttgtgtttttattgctgacggattgtcggggagccttcaaaatccatgcgtttcgggaatgttcaaatataggctttatgtttttcatttgccattttgattatgtgctctcctccgccaggcatttccttcctcgtcgagcagtcggccgttgcgtttggcgttatgttgtccgccgtgtgcccttcttaccccgtcgccgtctccgtggccggcccaattctcaccattctgtcgctgaccggcggactgtacgccaacgttggctcgctgccgtacttcatcagttgggtccgtgccaaactcctaaaatctgagtccacgcccccattttgtcgctgtttcaggtccagtatttgtcctggttccgctacggcttcgaggcgttcgccatctctcaatggagcggtgcgtttggcgacgacgaagcgcacgttcgttcggtgctcgccgctttctccttccgcccggaggccttttacacggatttgggcgcgatggcactgttcatcggcatgttctatctcatcggctttttcggcctgcttttccgcgtccgaagggcgcgctaatttatgacacaaaattctctctgtgttttgacactttaaaatttttttaataaattgtttttccaatgtcgaaagtcaccctaatttaaggcaaattgaattaatttttgcggacgaagagaaggaaatttaaattttgccatttctaaaatttattctttttgtagagcgattcgaattccacaaaataaatatttatttaactattttttcgatttacaaaattggacaatttgctatcgttcacaattttatcagtgtttgacgaattgtccgcgccaaatgccttagcaatcgacagacggagtcgacgaacagccaaagctaaaaagtaaatttgttggcaattttcaaatttccatcatttttgactcactgtgccgaacacgacgaagtaaacgatgatggtgggcagaagaaacagcagaatgatcattgccagggtggcgatgaacagctgacgcacatccaaacggacgctgtccacacgccgtctcaacggattccattttttgctgcgaaaggcgcggccgaggcccacaaaggcggtgcaggagactttggccaacctgacaattgagaaaaaattgggaagagataattggaatggaaaatggggataccagattaaaaggatgaacatggattggaaaaaggggggtgggtcctaaattgtgacagtggcataaaacaaaaagttaagctgttgtttggctgagccctgccatttggggtggaaaaacgaacccaatcgatgccaagaaaaaatttggcgacaaaatttccagttttatgtccactaattgtaggccaaaacattggccaagaatttcccggcggaatgtgctcacagaaaaatttgacctgtgcgtgtaaatgtggaagcagaaaatgtgcacggtaagcacgcgaagaaagtcagacagaaaagcgacgagcaccgaaaagcctttcaaatgggagaaatttatgttcagcaaaatattaaaatcgttttacccaatgcgccgaaggcgacaattagcaacgaattagtcaatgagtgttcaaaaacggtgacataagctaaaaaacatttggaaaatgaaaaacaaaaggtcgatttttgggcaaaagcgacgcatttatacttttccacaaatggatatggtagaagaaaaagttggccagaaaggtgttcagcgcgtcgttcagtttcagccccgcggggttgttggtcagccaagtgatcagctgagggaaaggagaaaatatgaaaaacaaagattggcgaaatttaaaatggacgaatttcattggttttgggcagtttagaaagtgtccagtctcctttttctgaccgtttccaactgttcgatgtacaaatgaattgcggcccaaaaattggtggaaatgtttggccattgcgaagtggcaaaagtcaaaatgatcagcccaaacagcgaatcgacgaacaaataaaggagcctggacagaataaattcaaa

SEQ ID NO: 4557 - DNA, 3718 bp, Heterodera glycines
gcgcaaattttcaaatttgaacgttagctcggcagaaagtgcactccattccaacaaccggttaatggcactcattcatggcaaaaaaggagacaaagatgaaaacgaaagaaaatgccgaaattgaatcaaacacttattaaataaataattaaaaaaacaaattgcgcaatggaaaaagaaaaccaatttatgatgcactagaaatgacgaacaaacagaggacgaccggtcaaactaacaaatgagaacaaacaataggcagatcaatgattaattttttccatatatttataccccttctctctcctagaataaaaatcattgccaccaaatgcctttccccttttctgcctattgcgccttcagtttctccttcagcgaggcgggcatttcgggcggcggcgggcgcggtatgttcagtgacaccttgacaaagtcgtagatgaacctaaaagacggagggaaaataagaaaattcacattatttaattaattaatagtcaccattgaagagcggtgagagtgccgatcatgatgatacgaggcaaaagtccaccccagacacctgaaacggcaaatttgtaagattatttcgagttctgatgacaaaaaatgaatgaaattagggccaatgcggaattcggttttggccgaccaattagatatttacgaacatggtaacaggcataaaatgtttgtcgacaagtgaaatttaaattaccaagcgggccgagcttcttcagaatgcccattgcgtccgcactcgcgtccttgttaagctgggagacaagtgtatcggctggatgagaaacgatcgcacagaaaacgcctagaaatcatgagtttatgcaagttaaacgttcaatcaaattctttccactaattgtgttaataaatatgccccctctccacccacccgcaatgtatccggcgatgaatgtgaccaccaactgttcaggcttggtgcattcggctcttggcttgggcaccacatgtttgtagagcagttcaacggtgcgctcgaagcaggcaaatttcatcctaaataagggaaacaaatattaaaaaggttgtaaataaaaagtaaatcaaaaaatgagttgaggcacaaaaaaaagaagataaacaatacaaccaatgggtggtcgagatttttactcggaccatgtccggatattttgagggaaaagaccggaaagcggaagtctgtcaaaacagaaatttagacgcgggaatcccattccgtccctccttccgaccctaattcttgtttttttacaccctggactctttaaaataaagtaaaggcttacattgtgtacgggatttggcgcatccacaacggcggcagtcccttgtagaagcccatcagtccctcggtccggtaaatgaacggcgcacagccgcgcagcgttggcggcgctccgggcgatgtttggatgcgcactttggtggcctccatcggcgccagcatcatgtcggcgaagaactccgcgctggccgaggcggccaagtacaaataggtacggcagctgtaagccaattcctggaaaagaatggaccaaatttacaacggagcaaacggaatgctaagaaaaactaattcagggcacaaatggacaaaaatttaaatttcgatttatcggttgattgaaatgtttgagtcattgatgactaaaaaaacaaaaccatttaaaattctaatgcctagttagattcgatttttggatgtttggctcgttcggataagacgaaaaatttaattttggagatcgcattcaaaaaagtaagaggatgggatcgccatccctttaaaatgaatgatttggattgcacatctattagagcctataaatgcaaatttgaatttaaaaatatacacgcaaaagttttgttgctaaaagggtccaccattttgagcagttttgtcaacaactgactatgaccaaaacacacaaacaaacctcgccgatcatcccggcgtacacattcttgaacatttcgtacagtccgaatttgccaaggccctgcattgaatagccaatggcggtgggtgcccagcctttggccaagccgcggacgccctcctcttggagagtgactttgaagccgccgatgatccctttgtatttggcagggtcgacctaaacgcaatgcaaaaatccatgctcatcccgcaccaattaaactgtcggaaaatacctgaatccgacatttgaccaaatccaacgggacaatggcggtgtgagtgataccgcaagagagaattccgccaatgccgcataacccgtagaacttcatcgagccaaactccacttcattgccgctcttagctggaaaagttgtcgatttgtttttcaaataaatcgaagatgattctttggacctattcaaagtacccaataatgccggggcaattgtactggcgaccaactcagtgacgagccgagcggtgctaagccaaaggaaatcctttaacccatcgtaaagggtgggcacgacggagaagtacaaatacacccaggagaccaccaccaccacaactccgtaacgattttggtcgccacttttgcgacgcgaacgcacaacaacaattgggttcttcttctctgccgtttcggaggtcatgagaatttttaaaaatttgtgagaagggaatgggtaaatttctgaatttcaatcagaaaaataaatgaattcggtaattttttgtcaagtacactttcacgaggaaacaaccaaaaaaacgccgtgattttcacatttaaaactcatttctcattgtgtgcgcttttgccacgtggaaaatcagtggtggtggtgacgagatgagaatgtcaaacaaaacaaaaaacggagagaaggaaagaaaagggatggatgagaagcagaaatgttgattaacaaccaacagaactcataaaagtggaaaatgatggaataattggacaatcaatcggtcgtccgattaatgccatttccgacatctgccaaacgcaccattctctgctgtcgcacagttcgcagcgatcagtggcccggcgccaaacgcctttttggtcgcttcagccagctctgtgatgcccaccattattgtttttggtcagcagagagaaataacaaattatcaagggcaaattaaggcggaaactgaaagaaaaaaagagggaaaaatgaatagacaaaatgcaaaaaattaaaattaaaaaaaaataacaaaggaattaaaaatgatttttagttatttaaagaacgcttaaaaagagtgaaaattggaagaaagaaaggaattgaatcaattcgttttcaagcggcggaatttgtttagtctgtgacctgtacttgtggagaaaaaaagaagagaaaccatacagaaaatgaatttttctccgttcgcgtctggccgcctacgcttttttggccttttctctgttctcctatttccaattgaatgtttttctttctcttcccatccgaattatttggcgttttgtcttcaagtttgaatttcttacaattggtcttactccttgttggacagtatgcaatttatttgtatttgcttatcaattattaacacaaaaggaatttatttatattgaatgtgaatgaaaatgattattttttacttggtttattttatttctctgctcattttaattgtccgttttctctccgttatcattcattaattttaattacctttaattaatcg

SEQ ID NO: 4558 - DNA, 2433 bp, Heterodera glycines
tttaatttttttaacgcccaaaatgagtccaacatcagctgttgacccaacagcttcgaccccttccaaaagatgtgccattgtcggcgcgggtgcgtgtggcctcgcatgcgcccggtaaacaattcaaagaccctactgtaatcacagataccgtatttggtgtcaacgatttatcatggggcgtaggacggatttaaaaaatgatttatatcccgactatctcggtttacgttacggtttacgggttgactgtcctaataatggtaagccatttcatggttcccctgttagatgggcacttgcttacggcttccgtcccgtagtgatcgaacgacgacaaaatttgggcggcctctggcgttacactgacgatccgttacccgacgaatgtataaaaactaaaaaatgctatgtgtctctgccattttggcatttcgtttcctcccatttccccgcaaagtggccaccgtaatgcgctgtacagtaaccaactcgtccaaagagttgaccgcgttcagcgactttccaccggactctcagctgcccaattacatgcggcacgacaaaatgctcgcctatttggcggcatatgctcggcaccacaacttggagcagtacatccagtaatatttgggataaattacaattaaaacttctcgcccaaattttggcagatttggcaaaaaagtgaccaaaatttgtcggtcgccaaattatgccgaaacgggacaatggacagttcagtgggaaaatgaagggaacggagagcaaattgaagacactttccaatgcgtattggtcgcaattggacaccacgcgaagccgaattggccaaattgggaagggatggcccaatttgggggaaaagtaagcgaaaaggggggggatttaaaaagaaattacatcaaaaaaaaagattttccattcgcatgactttcgccgtgtttcgcctgacatggaacaaaaaagtgaatgtcgtcgtcggggccagcgattcggctgcggacatggcggtggagctgagcagagtgtccaaggaggtgaggggcaacagcagcagataatttaaaattaaattttcttgttgccgagatcggttcctcagattagggttactccccgacccctcggggggcaaaatgtagagctccgcggaccgtcgggggggggcacgtcaggggtcgggtcagggaatgggcccaaaatactgggtccgagaatgtctggtccgaggaccgttgggggggacacgccgggggtcgagttggagaataggcccagaaatgtcgggcgtcggggggactcaaggagatggacatgttgggagtcgggccggggataggcccattcggggtcggggagaaaccctaccttagatatatccatttttattggaaatggacccgaaaaaaaactccggttgagctaatttattttgtgggcactaattggcgattctgattagccaacaaataactgctgatcagagggcaccaaattgcggcatttgatttccaaaattgccaaaaaggtgcttttgtccacccgccgtggcttttgggtgctgcgcaaatgtgccgagaaaggccttcccgtggactccgtgctgaccacgcggttcagcgcgctgctctcgcgctacgcgccccgccgcttcgacgagtggcgccgcgtcagatttttgcaaaaggtgctgcacaatttagaggccaggacaaaaatttaagttctcggcattttgtccatttggccataatccgatatgactgactgaacttatttgaaaagcgtgccatgctttttgacattccgtttaatcgctttcatatttctgtctgtattggttacttatttatttaaatttatgtttggtgccttctcgtatagtcaaacggagaaagtgatcaaattgatcagcggtaggagggcaattgatgaccagcaaaagttccctaattaattcattaattaattgatgccaggggttggatcatgcaatgtacggcataatgccggacatttctccactggtcagccaattcttcacggtcaacgacgagttgccaggccgaatgttggccggcatggtcaccgttaagccggacattggccattttacggaaaacggtcactgatcattgactattacactgatcacttatagttgataaatgcttctttgcacaggcattgtatgggcggacggcacgcgcactgatcaagtggacaatgttttgttgggcaccggctatcgctttgacttcacactgatcgagcggggacagctgctgatcagcagcattgatcagtcgtcggacaacggcacgacatcgatggcacagctgtacaagcacatgttcccactgggcagctccgattggaacacattggcaatcgtcggaattgtgcaggcagtgcaaaatgccaaaa

SEQ ID NO: 4559 - DNA, 1763 bp, Heterodera glycines
acaaattaggtaccagtgtgaccacaggacatgacaaaatgcgtgtgacggtgtgccttacagctcgaaacaagggacaaaactcaagccgtacgtgctggtcaacagaaagcgatcgataccgcaaattgtcaaccaatttgctggaaattggtgatcaatttcgctggctcgatatggatgaatgatgacacaacggaggactacatgcacaaaatcatcggggcaaagctgttcgttggcgaacgcctcttggtttgggatgcgtttggcagccataagagcgagagaacgacgaaggtggtgaatggattggaagtggagacggtttttgtccctggtggctgcaccaaattcatccaggtaccaaatcatccttcacaatgaaattcatttttcttccctaggctcccgatgtctcgtggaataagccgtttaaggagcgaattcgacacttctacagcatttggatgtccaatgaggccgaaaagaagttcacgtcagcgggaaatccgaaggcacctgctcttcatgtggtacttgattggatccaccgatcatggcaggaaatctccaaagaagtgatcatcaaatcaattaagggtcagtttaaaaattaacacaggaaaaatgcctaaacttttaagtctgtggactgactacgccattggacggaactgaagacgaaaaaattgcttgcttcaagccggaaggagcaattggaccgatagggatcaaatttttgcgcgagtttagaggaaatcaaacaatgagagatggacgaaatgatcaggaggaagccgcctatctgatgatgatgtagagatggatggagtgggagatgacgatgaattgctcatttgttaaattttactattgttttttgaaaataaatggtgttgataaaaattccatttatccccccgggggataaatggagacggggggattatttttcaaagccctcagaaagggggggggggtaattggagccagctggtcaaagccctcagaaagggggggggggataattggagccagctggattaatggaaacggagggataaaaagagaaaacacggtaagtacctttttttctccgtactagtttcgatatattaagcataaataacacatttttcacttggtttgaggcttttacgtttacttttattatgcctttaatgccttttttgggattttcgtgcctttaatgccttttttggcttttttccgactaatagtgaattcttatggctatgcagcagaaaatgtgcaaatggttgaaaaattctttccttttatatgcattttctattgccactttttcagttggagatttgagtgtaaatataaaggcataaatttgagagaaacttcattcatcaaattcttcacaccacttcatggtatctgcactattacatctacctaatgtgtattttcaatcttttctaatcctaaaatttcatcgttttgaagcatatacattgtgcattcctgtacatacctgtacataatacctcctacattcctgtacataatacctccataatctctccctcctccaactcttcgatatttcattactccatcggacggacatgcgcgaactgttgttcaagaccgccaaccaggaacagcacactttcactcttgaggtcgaggagaacgaaacggtgaaaggcaatttccgacagtgcttaaccaattttcccttctggtagggcttcagatcgctcaaatcaagcaaaaaatgagga

SEQ ID NO: 4560 - DNA, 924 bp, Heterodera glycines
ttttcagaatgatttggctggtgctgatgatggtgagatgttggtgcagcctatgcacatgaacgatcatccggcggcggcgcaagcgggctatgtgaacgaccacgctgcacaccatcaccaccatcatcatcatcaacaccaccagcagcagaatgggatgctcatcgatcacaacgtgtggcagcagattcttgctcccgtacaacaacagattcagctgacggcgcaggattacccggccatccgtcgagtgggaacaacaaaaacatttaaattcaaatttatgatttcccctcatttcagctcatggcgctgggctttccgcgaaatttgtgcatcgaaggtgggggggggggggggtggacagatggaactacaattgataaattgtatcaactgacgtattgaatcgcgtacattgcctttggcagcgatgggatgaaggatagatcggagcttataaacggcttgagtctgatggtgaatccggacagggcctgtcgtgggataagaccccgagtcccctcgtcgccagttagcctttccgaattctgagaatcaaaacggacgaatggaagtgagccctggaccaatgctgatagccggtgaaatcgtttatcctcgtgggcggagctatttctagatcattaccgggacgaatgcaatgattttggcgacttttttgcgggatttatgaaagagaaggaagaaaaggcgcgtaatgcaattgggagtgagggcgagcgcggtgcaaatgatagcagcgtgctgataaaaacaaaggtaagcgggacgggaaaaaggattgaaactccgagccaaaattggggtttgattatactcaaaaaggagggcggttaaaaataaattatgaaagcaaaatgggttccaaaatgacgaaggaaaggctgtaattaaggt

SEQ ID NO: 4561 - DNA, 2755 bp, Heterodera glycines
aatttcaaaatcagcatttgaccgacaaaaaatcagcatttagggggagtgcattttgtaacagattaattctctcttccgtaataggtaagaaactgcattttaaattttccatcaattaacctcgcatccaattatccatagttttcccacttctcccttttatgtattattctcaaaaaatggaattcgaatttctgatctcaaattatgttttgcttcagatttaaaattcatttctcaactgattttattaagattcttattattgtttttcttatccaatggattggattcattgtaaggcgtttcgaatttaaagcctgctgctttggttttactgctggttcgctccctccccctgtaggtaacaaatgcgttgcagttggtaatcgtggtggttcatattggttcacatcctgtggccacattgtttgtatcaattgcatgaaacagggcatgtttgtgtaaattaaatgtccgcttattaatcagttacttaattcgttaattattcaggaggaccatcgcccgggcataaaggctcctgcattatctgtcaaaaaccggcatcaatgtaagtgtaagtaagcaacagcaaatgctttataactcgtgtcagcacaccgtcacagaatggaaatcaaccgctcaatgaagccagaaatcttgacactgttcaagccacaaaaggaagtgttggtggagaatacgcagcgaatcaaatcggcgatggatttgcagaacaaccatcggcaaatgctgattaggaaactgcacgaaaaggttgtgccgcttctgctggcaaagtgtcgcgttgagaacaataaaagtcactgtttttagtacgatagggcagccaaatttgcgagaggagcacaagcggatattgcgaaacgggacaaacgggagaaggcgttgctgacggagagggaccaactgaagatggagttggacacggccaacgaccaaatccaacgattggaacaaatgcaattccgaatttacgtataaaacatggggaaaacatgcatttttaggctgaaagaacgtgagaatgaaattctacgcctacggaagagtccgaatcgacgccacagcccacagcacaggaaaagtgagacgaacgggcaattttaagacctaatgagcgaccaatttcaactgctttttttagggaatatctacccgagtttgaacggcaacactcccatcacttcgttgtcatttctcgggtgcggtgcgatgagtacacccaacgatgaagtatcataaaaaaacattcacaaaagattaattataagcaaaaatggattaggagagcgccatgaaactttatgttggccatgttgagtatgaacgccaaaaacggcatatttttgatgagaaatttcaaaacccatgttttagtatacagaggaatttcgcatattagtattcgccagttattgtacaaattgatgattatgcgtttagcccggcggcatgaacttcaacatggccacagcaacgccggcgaattttggcattcgaaacgaaaacaatgacgcggagcagaacatcgaagcgctgttccggacgcaaaatgtgcaggaggagacgccacttgcggggcccgcgttctgtcctacgacgccttaccttttcgcaatggcggggagcaacagcgaaaagtgagagacaaacgaaaaaagcaattttcagacaaattaaccaaatttagacgcacgggagtaacgccgaaatacttctgaactgatctaatgtaataaatatattgtgcttcttttgttcgatatatgtgaaactcattcatatttaccggcgttgtatacatatacacatttggtatattaataaaatggcatatcggtcgtgcataaattgtttcatttgtcgatttgaaatggatgtgggacgcttacaatcaatcaagcaaaacaaaaccgtagtctttaagggcagcaattttcgtcaaaagacttattttttgcctatatttatcttttcaacataactatttttctaattaaaattttagtcgaaaatatctcatttaataaaaaaaagctgccaaaataggaacaaaaaaagagaaatccgaaatggtatttatgcagggctcgcaagtgtccttatttctaagatttttcttatttttaggcttccccaaactttttaaattttttgtgcttattgatttatttcgctgatttaaatgctacaaaaactcccaatttccaaaattttttcccagcggcgcctatcggcaccgccggcaactaagaaatttttgtttccttaaaaaataagctcaaaatcgtaaaaattagtcatttttggtgaaaatctgttaacaaattgcttctaatattcaaaaaaaattccccggtggcgcctatcggcaccaccagacctccctccccactttctctaagttttttgtaaaaaagcgccacaaaaaagtgcatatgttacgtttccttcgcgctaatatcagtttttcaaaaaatcttatttttggggtcaaaatcttagttttaatctcgtttgtccttattttgaaaaaaaaaacttgcgagccctgtatttatgtattacatatctgtactcagattttcaaaaaaatttatgtttttcgctataacttttttctttggcatccaaatctaagattgctggtatcacttcgaaagctcttcatatgctctattagccttacaaaaagcgaaatgattttctaggctgaaaaaat

SEQ ID NO: 4562 - DNA, 2903 bp, Heterodera glycines
  unsure (1)..(2903): unsure at all n locations
agagaaattaggaccaaagtctcaaatntagagctgtaattatcaggaaattctcgaccttattaagtttttcaccaaaaatgaatattttctctaatttttgagtccaaaaattttaatttttttttgaaagtcaccttttaaaggttattttaaaaattttaggttatttatatttcttttttttctcgaaagtagccttaacaataaatagtaaataaaaaactgaggagacaagaaaaaaaggcaaacctaaaaaccagaacccttttcattctctttccctcattcgtacaaatatttatggatttttaaattgaaattggtgttttgtttttgccaaatttttggcattaattttttattttcttgaattcaccctccattctacttcatatgtatgtatatggcagagatgtgatatctgaggatttttcctcatttgtggtcttttgagggtcaaagaggatttttttgaaaaatgaggatttgcgggtttttgtggtcttttgagaaatttgaggatttttgtggtcttttgaaaaaaaagtgacaaaaacgcatatttttttgaaaattaggtatatttggcaaaatgttcgaattttttcttcaaatcttaaacatttttttgacaaaatttgttaacaaatcgcactcaaaattccaattttttcccggcagcgcctatcggcactgccggaccccctcccccaatgcttccaaaaattttttggaaaaccgcgccacaaaaagagcaatttaaaagcaaaaaaatttaagagatgtcaatttattaataaaacaatagaaatcgaattattttatattattttttggaggttttaaataagattagttttagatatttaccaaaaattaccaattttgcggcctaattttgcgattcttgaccaattttttaagaaaaaataggaattatttgggtccggcggcgttgataggcgccgtgattgttttcaaacggaaaaatgacagttgactgattttgtttgcaattttatgatgtttcaaaaaatgaggatttttccttccaaatgaggattttttgaggtattttaatggcaaatgaggattttttatggctgaaatgaggattttcaaaattttgagatcacatctctggtatatggtcaaaagaaatcgtctaactatgctaagaataaacaaaatactcatttaaaaaagttgaacacctaattagagcactttttaatgaagcaattgatgtaaaatcaaaattaaagaatattagccaaacaattatatatgtatattatggaaattgatatgctggggcaggaaaagcccattgaagcagaatgaccacgaacttttttacctacccaaagagcatttaagtttaatatttttcttatttctttttttgcgcagcgctttatttctgtgccactttttcgtcggtttttacaaaaaaatgaagaagcccgccgttgtcgaggtaaattcactcagggtatttgatgggcggggagttctgttgatttctttgccctttaactttgtgaatggcattcccatgacccattggcatgcattttctgaacaaagaggcaatcccttcccatacggcaaggcggtcattcattttcattccaaacactccaaaatgggaaaaaatctgagaaaaattcctgtcgaatcgctttttgaaactactaaaagtcttcgatttgacatccgctgggccactgttcgggtgtccgcctcatttgaccactatgttcttaagtgccaatcagattggctcttaaaggaaattgagcgtctagtgattttacatcgaaaagtattaacggctggagggaacatatccaattctaattaatgacaattacaggctttccaatttattaagattgagttcgtggcggatgaaaaagaacgtctgttccaagtcgtttctcagttgaacagcgaacgccgttcgattatccaccgcgccattgcgtcctattttggggttgacgaaaagtttggggcgaacttggtcaaagacggtgccactgaccacgaacaattctgtgggaagctaaacgctatggttgaccagttgatcgactacaccgacgcagcaaaagtcgcagtcgcaggagactgtaagatggcgagcacagaaaattttgaactttttatagcatagcaatcccccaagaaatcccaaaagtgacacttttatttctggttttcgagctcatcaattaaaatctacatccattttgtttgaggattggtttcatcaattttaacagtattaattactacatttatcactcagttttgcatcaacaaggccagtgtgcgtaccgatctcttgcggatatgaatcagatctcaaatctgaaggcgcacatttctgagcttagtgctcagaacttgacccaacaggcgcaaattggtgcacagcaggttcagattgatggctttcatgcccaagttggtaatcagcagaatcgccttcaggctcaagttattgctcaacagaatctgatcggtgaccagcacaatcagatcggtggccttcatgttcaagttgctgctcagcaacaactggatcggtggccttcaggcccaaattggtgaccagcagaatcatatcggtggccttcatgctcaagttggtgaccagcacaatcagatcggtgacctgcaggctcgaaatactgctcttctggctcaggtttctgatcgtatgtcacagctttctgatatcatatccctgctaagaagaccgttggaccttcggaatcggnncggtgatttgtcgcagacgggcggagaatgcctaaggattcagtgtcgacgatgcggctcgtcgtgatgaaagtgatctgacggntggaaacgaatcttatttttgc

SEQ ID NO: 4563 - DNA, 3939 bp, Heterodera glycines
  unsure (1)..(3939): unsure at all n locations
ttccgtggagcgggatcgaacctgcacccattttccttctccattcctatcttaaaaaaaccacgggtcggatttattggtgtcgcattttctggctcccaaaaaaattgttggaaaagagttcgggtgatttttagaggccaaattttaaattacagaacaaaaagaaaacgaaaaaaggaagaaatttcggacaaaaaatttttgcttgatcattcccattcactttcttcttctcaatcactcccttccgtgttactttcttccgaatcactttcttcttttccgatgtacttttcagttcatccatcaattcagcgtcaaactttaaatgctcgaaaataataatattttttgatagaaatctttgagtttgacagaaccatattcacttttatactcataaattttcttaagattattttccttcgatgctttttcatcgattttgaatttttcaatgagataattaatactggaaaatattcttcaacaggaataccatgaaccatatcgttcatcaatttctcctgaattattggaaattattaaatctatttatattttttaccttcatgccaattattcagtaataatgtgccagcagaattttgtgaatgaatggctttttgcttttttcgaccaaaaaatgtgcacaacgattcacgacagaatccaactgaaaacgatcggccaacagaagaacattttccaccgaatcatcttaattataatttaaaattattagattcatttaattttaatcagatttaagagttttatttgcaaattaatagcgtaaaatatcatttcattcaattttcgatgggaattccatgcccattctgctccttgcaaaattaccgtccaactcggcactcggtgaattcactaaggaaattaatttttcaaaatttcccactgcatttttatcattgtcaattactagttttagggtttgttcgttaaattcaaaaaacaaaatcttgaacatttcttacatatttattcacattcaccacttggccattaaccattaatttgtcttctgcttgaaactcactaaaaatggattattttaaatggcattaattaatcgttaattaattacatgattggctttttcagttcggctttcacaatgatttccgctttgagtgttattgcatcctctttttcgtcgtatacgacgccatttgctgggtctaaaaattcattaagtttcactattgagaaaataaaaaaataagcataatatacctcataatatctacaaaatctatcccataaactgtttttactaaatgattccaaatttcctctccgcataagccattcatcgctttttgtggcagaaacagtgccaaattcgatagcagcttcaaaattccaatctgaaaaataaagtgaaataatcaagatttggagtttcaggaaattaaaatttcaatttatcaacaaaattaatgaattcatttcaccataaattccacgactggacacttgatagaataaatagtcaatagcattacggtgaatcgaaatttgccatggcattccgccgatggacacttcttcacttttcacttccttatttatttccaatgacctaaattcggtcactttaaaaagaatttgaccgcggcatcggttaatttcaacggcagacaaatcaaaatctttggctaattgaagaacattttgaacacaatcttctaaataattattggcatttaaatatttctttcaattttaccatgaacagcgaaattcggtgaatttatcacggaaattaattgttcaaaacatttctcggcattttcaatagaattaatttcaatcttgggagtttcatatgcattctctccaaaaaataaagttttaaaaaaatttgattgagccgccaaaatctaaaaattgttaggattcaagcacaacaaaaagaaaattgcaaattaataaactttttgtttatttgtgttattttaacactcaaatgaaacaagtaattaattaccgaattggaaaaggttttcccactttcactttcgctttgaatgtcattgtgtcctcctccacattataataacttttcctttgttcattagtttctaaaatttaatattaaaattataaaatctggatttattcaataataaaaattggaactttttcaattaatttttaataaaatacaaatcatttttattttccttaaatttccaaatgcataattgtcttgaggccagcaatccctaattcccccatcagtgaaatgatgaaaaaatgactttttaatttcttcatcgttttttgaggatgaaacaatggataattcgaattctgctttgcagctaatagcaaaatctaaaaaaactttaatttattatttttttaatgatttcttcatattcccaatttttaggtgtctgaatatgtaaatcaaaatttcgtttacatttttataaccatagatacataaagaaaatccaagagatccctttttggcgtgcttaatcgcaattttccatggcattccgttgatgaacactttgtcactgtaaaaataatgtggtcctcgtccttccgaaaatgctttgaatttggaaatcgtgaacacaatttcaccactggtttggtaatgattgtttgctaaaagagtttttgcaaatttctgatttttatatggcatttattaatttacctatggcaaagaaagggccatgcagccaaaaaatagaaaacagcagaatttcaattggcttcatctccaatttagctaaaattaatgataaataataatttagtatctatgtttttccgttgtttattcttaaattgtattttataaatttgttttttattaatccaactttaattttttacaaaacatgaaaagaacaacattccgaaataattaaaaatcaatgtaaagatgaattttggtcaaaaatatgtacaaaaaatggtcaagatatttacataaatttgtaaaaaaaaatccccaaatatgtaagaaatatgtacaaaataccctatgtaccaaatatgtaaaaaattgaaaaataattattttctttggaaaaaaattcttcggaaggggtgaagtaagcacaaaattccataaaatgagatttattgtaaataggtttagaaccacatttaagttttgaaaaattaattttcgtttaatttttattttttcacataaaattttataaattttcaaaaatttctgtaaaaaatcctcaaaattgtaaaaaatgtataaaaaagtccgaaaaagtccaaaatatgtagcaaatatgtataaaaatctcgaaatatgtaaataaaagtcccaacttttgttcgcaaacacaaaaaagaaagtgtttttaaataaattacatttactttattgaattaaaatttaattacttaaatttaacaagaaaaaattaatcaaatctttccttttttaaaatcatagcttaaaaagccgcaaattattctttttaggtgcaaatcgtttaactgtgagccaaaattccctaaatttcccagccggcaatttcggcaccgcggtacaaaagcgattccctaatttttttgagcaatttgagtttgggtgggacctttgattaatacttccatctcggaatattataaattttaaccgaaaatgccgcacttttctaaatttatcggtcgttctaatttttagtttctattaactgtcggcgggagttctttagctcccaaattggggcctttttaataaaatttaaattgtcattatttctgattgcaaatttcaggttttttaaaattaaatttgcattctttaaaatcgaattctctgctttcaatgcgccgctatttttccctaatttttttttacttttcaanaatttctattggcgttttcccgcgccacccaatttcatttcattccct

SEQ ID NO: 4564 - DNA, 2318 bp, Heterodera glycines
  unsure (1)..(2318): unsure at all n locations
gggatttccatgagaaaaaaatggcacggcttaaaaaacactttgggtgtccngcgaaaggcaaaacaaagaganaatatttttcggaattaacaaatggatccataaattaccaaaaagtntaatcgcttctcacattcgtacagtgatccaatggaatgtctttaataaacgtgtgactgtttgatcattaaaagacttttgatcactcacaattaatgcctatacaaatttcttcaagatttttatgttgttttttgaaaaaattatattttttttgaattttgagcaaatcttggctaattcttgaaaaaataccaaaaaaatagtttttctacactggtttttatatgcttcttattttttatgtttggtaaaattggagttcgatacgacctctttaaaaatgagaagcataaaaaaattttgattttaattttggtcggattgaatttagcagatcaaatggaactgttcgtcttacgtcacgcggagtacgaaaggctttacaattgcacggggttggacatcgacgcaattccattggagaaaaggcaatttgtgcccgagtcaatcgccatctgcgttttgtgcgccatttattatgtaaaattgaaacaaaagtgaacatttcataattgacccacgggaatactgtaatggggacactaattcaatgatactgtgcaatcaactcaaattagttaatttacaatcaattagatgctttatttgccctgtatgtactccatttggaagcatttgcgcgagaattcctgctacaaattgctcttttataagggcatcactgactttggcattctgtggatcctcggcttcttcagcggatggctcaatttgcaaggggccgttttctgctctcatcccaagctgatttatttcatcggagtggcagtgtcatgttggaaattaatttttaaaaatgcaaattctttaaacatttatttagccctttggatagcggaaagcactgctgatttggtaattgtttcatcattaaatccaattcttaccatttgctttgggtacattttgttagttgggattatggatatttgcacatggataagatggcttttgataagctgggtagacccaaagtcatgtgccataccaggcttaaccttttttccccaaaaaattccggactgtgcttcgtctttatccgatccgacccttgatgaatcggtaaacatggagtttgttgttcgtcaggtgttggctttaaaccgctgtctcgagatcggctcgccctctctgtcccaccttttgttctccggccgtcgcgtgtccctttggctcttcggctgctctctctacgccctctattgggcacttttccttaaacccgctgtgtacagtagcctctatttcggctggttcttctaccctttttctggctaccgtagtgacaataggcgtgaggtggccgcttttcccttaccgtaaccgttccatttcgtttttttcaaattcagtttgaaaatcggctccaaattgtccaagacattgccgtggctttcttttgcccgttcatttatctgatcttggccatcaaacttttcgtcgatatccgaaagaatggcgccgtcatctccgaactcagcgcaatgcaaacgaaggcaaagcattgggaaaagggaaaacaatcagaacatacgaaggatgaattgccatggctttagacttttgtccaagtgtttctgatttcgctgactaacattttgaccggcactctctacgtgttaatgcaatggtacgaagttgaccaatgggcgattactcttgcggagttctcctggtaacactcataaatcacgatcaattttcccattttcaatttgaggttccatgcccatggtataatcccatcgttcgttttttgcctattcaattgtcccaagggctgccccccgtcatttatttggcgctgaacaaaaccatccgccacgactgtcgcctgctgtacctgaaagtgttcaagcgtaaccgtaccagcagctccggcggagttactgtagtccggccggcgttaacatgaggaggacaaaagcgaaagaaactgatgcggatgtatttaagcagccaaattgaggccaaaaaatcatcaaagattattcatttgtattttttaaaattcttattaaaaaataataaataaaaaagggaaataaaaaaatgaagcgacatgtttaaaaatattgaaaatttaatttcataatttcacctctctattttttgaatttttataataaagaggagatcgttttgatttatttataaaatgacttactatt

SEQ ID NO: 4565 - DNA, 4250 bp, Heterodera glycines
  unsure (1)..(4250): unsure at all n locations
tacggtagccgacaaaaggataaaagaaccaattgaagtagaggctactgtaagtggcgggcgtaaggaaaagcgcccaatagagggcgtagagagagcagccgaagagccaaagggacacgcgacggccggagaacaaaaggtgggacagagagggcgagccgatctcgagacagcggttgaaagccaacacctgaccaacattttgccaaaagcattttcaaattgaatttaccaaatcggcagtgctttcagccatccaaagggctaaatttaaactattctaccaaaaaaatattaaatattgttcaccagtcactccaatgccaacaaaataattcaaagttggaaaggagcagaaaacggccccttgcaaattgagccatccgctgaaaaagccgaggatccacagaatggccaaatcggtggaagcgatgtaaaagagcactttgtagcaggaattatcgcgcatatgaatccaaatggagtatatgcagggcaaataaaggacctaatgatcacgaattaggacctaattactattttctctctcacttaattagtcccgggagattgaccctgcccagggaatacacaataaatacagttgtttattatttaaataaatacataataaatggcgcataatacgcaacgggcgattgactcgggcacaaattgccttttctccaacggaattgcgtcgatgtccaaccccgtgcaattgtaaagtctttcgtactccgcgtgacgtaagacgaacagttccattgatttttgatttaaagtctgccacccttcaccttaagtctcgaaaaatttggataaatttgaaatgatnttcttcggcaaatttctcggtataaaaattgaaaattgtaagacaaaagtgcgcttttggcttgtcggattattatattttgttctgcttaaatggcggattagccatcgctttcgccgctttcattgtttggcaaatggtggcttttgctttttttgaatttcattttacgttaaccattcaaaaaaacctgtctttaaataaataagcgtatgtaattttttttttcagcttcatttgacgtttgctgcttttttcgtaattacgccaataggcaaaaatataataataatttattaaaatgcccgagtattttgggtctataaaagtttgtacccggttcgggctcaaaaattaaaattttcaaaaaaaaatcaaattaaacatttttcatcaaaaacttatataagtatttacaattataatgattttaaataggctaaaaattgaataaattagttgaattttttgataaattttttgaattagaattttataagatttttctaaaataatgaattttaaaagagttttgatgcataagatttgaaccagggacccaaaaaatgatggtgccttaggcgcaacagaaagtttttttaacaaattttgacgctcgtcaaaaggtaatttcgccaaagtgatcagaagatcagaccgtttctcaatgtgatctcaaccgttttttgttttattttttgtggacgaaagtgcaactttttccctccatttttcttccatcgcttcacttatcgaaagtccatttgctcttttttgctcaccccactcaattaattgcctatttaaaatgtggcgaattctaaaccaataaatattcctcatccttcccaataatttctgatcaaattggacaatattttggttgcatttgcattttcggtattagcaatggcatttcagcaacatttggtcaacaaattctctccacttctgatttccggttattattccgatgggctgcattagcatggcattgtacccgcaggtggtacattggagcatgttctacgtgaaggacccttatcatgggcaccaactcggccgtgcgctcgctcgcagagcgttggaatttgcaggggacagacccgtatttggttatgcaggtcagaaaacatacggcagtttggacatgtttttgccgattgattggtctgtcgaccgatcgaatgatggccaatcgattgccttgtcaattgaatggtcgattaatggccaatcgattgcgtttatgttatttcctttcatgttcccgaaatgtggcacaaatacgaagaagagtacgcattccatcactatttggactggcgactgtggtcattcagtgcgaaatgtgccgacgtgcgacccgaacgattggaccacgactcgagagtggagctgaaggactggcgtgaagcttcgttcggcaaacttttgctttttgaccgccaggtgggcatcgacagatcggcatatttgcggaaggcacttcgccttccccaaagtgccgcaatggtcagcggcggttatttttggcatccagtgccattttaatgattttaggttgccgtgtgcagcgagacgggcgacgtggttggcttgtgccaggcacggcatttgctcggcgatcggctcggcatcagtctgttctatgccaacagttcggtcagtcggtctttgcacccgctttacgcaccatccgtttttgcttcagtccgtcgcctcggctcttctcgtgccgttctgcttcaatttgctttgcgggtccgccaagttcgactcgttcatctacaaaactccgtccgccaacatggagtccgtccgcctcttccgccaactcgtccaaaatgggccggtcgaacgtcggctttttttcccgcaattctcgcgttattcgctgccttttcccggccatcgcatttattcgatcggcgatgagcatgtgtcactgatctgaccaaagaagacgaagaaagagaaaggggagaaacgaaagaaatgaaaaaatacgaaacattgccgaaggttgcgaccatgtgccattgggaagaggacgcccaacataattgtccaaaagcctaaaaaattattctaaaattgaataaattttattatctgaccaatcaatgaggtcgaaaagccaccaaatttccaaattcagtgtaaagtgctgtcactgaattcctgatatcgcaaagtggaacgaatgcaactgatgtaagcatccgaacattcaaacaaagaccggaccggcacaataacgcttaaattttccgaaatttctaaaataaaaaagaaaaatacttgccataagtcttgctgtttcactttcttttgtaagttccgtacaaaatgaaaaaagcaaaaccggatctggcatccgggaaagattgtcgtaacggcatttggcatagccatttcaaaatccaagaaaaaagaagtgggagcaaaatttggccatgctgcacgcaaaagtgtaaacattctttcgttggatggttgtaatttgcaagtcattaaggcatggcacaccgggaaaatccatttttgaaattgtaacaaaatacttttgaaaataggtaaataatttattgtttttgatattttataaaaagtttttattttattttttggttttaccaaatatttgaattttcaaaatttttgcttggcgcccaaacgagcgcgcccaaacgagctggcgcccaaacgagcgcgcccaaacgtgagcgcccaaacgtgagcgcccaaacgtgagcgcccaaacgggtgggtccccgcgggcgtgcgtaaaccatcaaaataattaagagcagcagtagcatttattcaagggaagacaaaaattccttcattcccttcatcgatttgacaaagctttcaaattatgttgttctattaaatattatttatgcattatttaattatatttttacatctgaaatgataattttacaaataaaagttattctcagtcacaaaatgatgattaatgggcaaatgttacaaaaatttttgtataataatcgtcaaaaactaacatgaaataatattatattagagttaatgaaagaagatatgttaagattatataaaattattaaactaataatgaaaatgatatattaaaaaaaaaatttcgctacaaacttgggattagagagtccgaaaattcaaaataatggaaaaattgcaaatttattttttaattaaatcttaatctttagtttggcattatctttaaatagaacgcagttataactgatataattatttaaataggcttatgtattaaattaattattcatcataagatttctgtaatattattttattaataaattttttggacccaacatgaatgacattgatgaatggtgtaaatgattctcctttttttcacagctct

SEQ ID NO: 4566 - DNA, 1048 bp, Heterodera glycines
ttattatgtcctgtgaattgtatcttcccagcaaaatgatcactttcgtcactttgtcctggttttcttttattatgtcctgtgaattgtatcttcccagcaaaatgatcactttcgtcttgtccttgttttcttttattatgtcctttgaattgtattttcccagcaaaattatcactttcgtcactttgtcctggtcttcttttattatgtcctttgaattgtatcttcccagcaaaatgatcgtttcttaaaattgtccggaattttcttttattatttccctataaatgtatacaaccactacaaactgggcatataaataagttgatttatcgcttaaaattcattattttttcatattaaaatagattccattccgagattcatttcccccatttttttaattttacatggctggacccacttcacattttagggttgccgactgatagtgagatatcccggctggaatcccagcactaaaagactcccggatcgggaccatggcaatatcaggatttgaatccgagcaaacccgggtttttcatctggaatcatatcccggaatccgatcccgattttttcaaaattctcggctctaagaccaactgaacatttaatttttttaaatttctaatttaaggtgacagaatgaaatatgcattctattattctattatattttccgccttttccaatttgcatgtaaaagcattcccgccaaaagataaagaaggtaaatctgtaaatatattgaactttctctaagttcctgttgtattcctaaaatacgaaattccgctggctatgccccttagccaattccatgaaatgcttatatatattcctcctcttaataaatttcaaatttaaggcaccagtaatggaaaaattgtcaattctttggcagatcaaatgaaggaagtgttggacaaaggagaatattcggatgttcattttttggttgggaaggatgacaaaaaggaggcgagtcaaaaaaagcaaaaaccatagcttaatgcccaaggataaacaataacatttt

SEQ ID NO: 4567 - DNA, 7888 bp, Heterodera glycines
  unsure (1)..(7888): unsure at all n locations
ttttatctttntcgttaataattaaaaagattgtctggaatttgtcttgcgccacaccgctgtgccattcatttatgtaatttgacaccagtctgataataatttcgccaaaatttatttattatttgtccatttattacgaattattttgcatctatcactccaaattttgttaaaaaaatttttttattgtcccaatttttaccatttcacaaggagtgggttttgttttgaattatttaaattttttaatttttccattttggcttatgctaattgttgattttgtttagggaatttgccaagccatgggcctgttttcgtttgcacttgccgactgtttggccacatttcatacatttgccatactgttcgactgtgagacacctgtgccatttgacgagcagcacaagcgatacgtgttcgaacacagggacaaaccgcggctaatctacgtttcggaagatggtagcgctatacaggttgacggtgtggtgaagcaagggaaatttgtgatgagcatcgagacgatgtatctcgataagcgaaacggagttgatcacttttgcacattcctgcgcacttttggcatttgtttcttgatgtgccattgaatgtgtttatttgttgcctattcagagcagtaaattgtttgcataattctgtttaattattttttgtttacaaccaaaatattgatccgcatttttatgttataattttaattcatttttgaaatttttatttaaatggcaaacgaagacttccgcttgtccgaatgcatccgttttattgagcgaactgcccaagagtatgattgtgttctgccggttccacggcttgggtttgtcacggaaaattttcttaataattttttttaaaatagctcaaggcgcgatgagcacctggatgcctgtgttcttatggaatccgtgggctcaggccatcggctctacattttcgagtttgaggattgcatccaggtatttttaaaatatgaggtcaattaattaaataaataaataaaacacacccccacaggtgaaaggacacatcgaaaacgaagacggaacaagtacacgcgtgatgattgagcactatgataaatacaatgggttatgtggatttgaatcgtttttggcgtcatgtgcttttaccttttttggattttttgttcccgtttcctatgaagatgatgattgatttaattttaaaataatttttattgtatattgtgtttcacaaattcataaacaaattcatccgaattacttgtccttttcaaaaattgcataataaactcataatcaaatcctaaagacataaaataaataaaaactaaaacataatggccacaaacattagagaaaatcgattgaaattttcttcgattaaaataaattttccgaaaattatttgccaaatattttttgatcagatcgtttggcatctcgccataggagtcaaaaaagtaggccacccccggcgaacgcgcccatattgcgcaccaatgggttcccggcattcccgacgggtcctgaagtggcaaaatttatttaatgtattttttggcactcaccaaattgacaattagactgcagggaaatttcgtgcactttggcaatcggtcggccggaaatgtgccaacaaaatattttctcgtcgcccggttctcaaagagagctctgtcgatgaaccgattgtccattcctgcgacgaatccgcctctcctcaaaaacaggtaaaatcccgcagctgcagtacctgctgcaccaaacaggtagatgaggcagagaaaaaagttgattggcgacttctcgatcacatccggaaaacacagtacaatcccttcgtgtgcagcattggaggagggcatttgaacaaaatcggaggaataattctcaccattcatactgtaaggtcactagtgattgatctgttccggtcaatcagaatgagcccgtcagcctcggcataggctattaaagtgaccccctcgttcggaaccgctacggcaaaccgaatgttcaccgctgtacagccctccttgatcagctcaaagcccggcgagtcctcctgcgcattggtcatttggaagacatagaggcagtaggcagtcttgaacatgctgtagctgatcccgttgctctccgttgtacacgccatgccaaggtgctcctgggcatcatgatacgcccttgcgtacctgttgttctcgtagtccaggttgtacgggtactggggatatgtcctgtcagaggccgtaagctcaatgtcccgcacctgaataatctgattcacaagcagttgccatttgccactcacgttgtggtgattaaaatagaagggattcttctgattatggccaatgtaattctgattggacaccagtccaatgacaactcttcgtggcacctcctccgtgaataggttggcagagaagtcatagcgaccaccagtgacaaagagcgatttcatgaacgacttccggataccgtatctggcgggttcagtgtccaacttcctggcaatgtcaagactcagcccgttcatcaaatcgacagtcttcacgatcagcctacagtcgacaatttcaagcgtgtacttgtccttattcgcatcgtcctggtggaccataaagtcgtccgactgcagtgcgagctcaatgtcaatctcgacgttgctgatcatgtacaagtcctggttgaatatgtcggcactcagcttgcttatcgtttggaagctcttgctctcctccaccgcttttttccgtttttcgttcacttttgtcgaatcactgtctcgaaaatagcccgccacgccaaagtaggcatcctttgccgccgcagggtaactgagctcggtgtccaggtacaccttgtagctgtacagctgattggagtcgtacacctcacgctggtttatgtgcaccttcagattgcggatgaaagttgcaccgggcatttgtataaggccaacagccacgttggctgatacgtcaactaccactccgtcttctgcgattttcttgagcttgaattccgtgcacacaaacactttgctgaggtctatgtagctggtgatcggatgaatctgaacaaacactgataagagttatacattgcccaatatttgccttaaaatggaaaggccttgagctgatcgggttcagcgtggaaggtcggagctccctcaaagtacgaaatgcttccaccctgctgatgataattctccaaccgcaagttcgacccgttgaatataactcggaccattgtatcagaaagttacgacttttttaaactgaagagtcagcacaattggccaaattcaaaaggcacctctcttaaaccaaaaaaaaaaaaagtatggaaaatattttgaaaatcacaacactaccgtcctgtgagcgtacgaatctcaacgtccagtacgtccacctctctagccacaattttgtggaacaacggtgactgaaagtctttctcgaccacactgcccgacgtaccctcgaccgcaatcacttggaggagattggcgaaggagttgccaaaaatcatgctctcgattattccgctgtttaagtagatgcacaggtgactgacaccaccggccaagtcaacagcgtacttggcttggtcttcgttatgaatttcttgctgctgttcgtagcccaacacgtaggccagctgatccgtcaaagtgatgtgtgatattttgtcgctgaaaatccttagcgtaaaacgtccaagctcgtccgcgaaatagaatcgaaatcccttgaccagctctatcagctcattcttctcctctcttgtctttagctcataattttcgtcgaaaacttcgcgctcaaagatttcccagaattctgcgatgttttgttgaatgtttgctgatgggttaaactccggcgagtcccatggaagttccggatgtcgcacaatgtacttgtgcacagcattcacaaagtgataatcatccttctcgtgcagataatgaacgtcgggggtcgggtccttgccgtggaccagtcgcatgtagccaccacgccacggcttcagctcttttagcagctccaactctcgttgcttcaatttggccaaacgatcctcctctgcctccatggcgagttgttcgtcttctttttccttcttctctctagccaagcgttcatcttcctttttcacattggccaatcgttcctcctccgccttctccttggcgagtcgttctacttcctccgttgccaaccgctccttttctgtcttcttctctttggctaatcgttcagcctcagatttctttgccttctcttgctctttttcttgctgcttttgctgctgttctccctgctgctttctctgctgctcttctcgttgttttctctgctgttcttctcgttgctttctctgctgctctcgctgctttctctgctgctgctcttctcgctgctgtcgccttttatcttcctcctctctctcttttttgtctcgctcatgcttcaagcgaagttgatcaagttttgtgcgatttttcaacggatttaatggtgcttcttcaggctcttcctcctaaacgacttccatgtcaagaagttctccctcatccgggtactgtattgacctttttcgggtcacgagtcgttccatttccgcgatcatgccatggtgcattccccgttcgagctgctgaggcgtaaggaagctaccccttggcactctgaaccggaacttgcgaccatcgcgcaggtgaatcactgcgtattgtctctctagagtccctacagtcgcccaactaaactgtacattggcaataagaactgcgcaagacaacacacctgttgggatatattatgccagacatgcccaccatccatcctggcccatcgaacaccaatttcttttgcaagtgcactttgaatttattcgttttattgccgacaaagcccggcgtattgcttggcaaaattacaaagaaagagttgctcatttcaacgaaaaatcaatgaatgaatgatcagagatcacttttccatctaaaataggtgttccgtcctccgttcttctgtccagatggtccgtcatctttcttttggtgtttcatgatcaggtaggtgcagtcaaagttcaacttggcacagtcttggcagaatgtttgggtgaactccagcttctcttggccactgccagtgttgaggatgaagcgcttgtcgcctcgcttgaagttttcgttacggcattcgttgcacataaaggtgaacaccccatactgcaacggaagaagaacattgtagtgctgccaccagagcaaacattacctttggacgtgcgagcttccagaaaattgttgggtagtcgaagaccttggctgctttgcgttcgtcgacatctgcgacttcaacctctgcggggttggacttctttgcgttgttcacgtcctccagcagtttttcccagcgagactttcggcccctcttcttgagcacagggcgttcctctgcgtgagatgactgagagtcaaccaacttgacgtcatcatcactatctgaaacatgaaaaaaatgagaaaaaatccaaaatttttgtaaaatttgtgaaaaattttacccattttatgttttctttggttgttttgtgcttcttccacgtggttcgcttctataaaatgcttatattttgtgttttattttaaaatttactctggatttcgtccaaaaactgctcattctgcttacgaggagccattttcgaggaatattttttgtgtgttaagatgaaaatgagaaggaaaagtgtgggggtactgtatgtgacgtgacggagagggcggggggtgtcacgtgggaataggccactcccactcaactgagagcacgcagggacctccagacgggaggatttcgaaatccatccacagtatgccctcctatgccacgccccttatcattcacttccctgtcagtcatttagatgcacccactgacaacagccttatccaagctgctgaactgtaaagctgagaatttggccgagtacctgaataacccagaagctgttaacaaggcgagtgcatacctgcgaggaaagaagctcaagacaacctactcgaacaagggcggcactacaaaggaggtcgagtttggcaacttctcgctaaagtctgcttcggagacgtacgccgtcgagggattccttggcaagtgtcctttctgcaaacattccctcactttggaaagttcagaggtcaaagtacaccagtacttctacataaagcaccggatccttctgctgtacccccagctgaagtgcatcgttgagtaccacagcaaaggtcattgcaagtactatccgttgggtaagccttcgctgcgatgatgcccataatctcgcacggtttcagagttgttggccatagaggacagtgcagagataacaggcgaaaagccaacagacaccaactacttggactacctgggcttccgaagtgtttggcagccaacccccgtctattgaagcgagatgaagcgttcgagaccgtcgcaggagttccccgagattgagttcaacgtaaacacgatgggtgttacggtgtacagccctagacatctgaagacccctcggtttgtgccatgggatcagccgggtcggtgtacacgctgcaagagtgggaacgtggagctggactacatcatccagccagagggagtgaccatcttctcttcacggctcaaggatgacggagagaactttctgccatttgatgagatcggtaagggtttggactattgcgaaaaagtaatcagcagcttaagtggactttggcgacaatgccaagtttcgcgtccggtcacggaacaaaatgttcaccctgccactgaaacacccggaagtttaccaagctgcacaagtcgcagcggaagcgaatgaactgctggcagaagttccaccaatggctgacaacaatgatgatgatgataatgttgacccaaagtgataactcagtgtgttgataagccattttgttatcattcgtgatggattacccgagaataaatgagcatgaactcaaatttcccattccctccgggattgttgtcagcgggccctcctcttcgggtaagacgcagttggtccttcgcctgttggcacacgccaacgagatgtttgatccctcgccgaaggtgataggtaagccctctttgccatggtgtaatgggcgtcccattgggttaagtttgggcttacggtgagtactcctcgcagatccccgagctcgagaggcagggcgttgtcccgcacgctggtcctccctccgaagaaatgctgaaaaagttgccaaaacccttccttattgtctacgatgacctcatgggcgacattgatgcgaagaagttggccgatctgtacaccaagaagtcccaccacaacaacttttcggtgatattcctcacccaaaacctgttcgacaaggcgatgagagtgccaaggtccaatgcgcagtacatctttctgatgcgtgcgcccagcgatatgttgagcattcgtaatttggccagccaaatgtttcctcgcgagcaagggtttctgatggacgcgtataagcaggcgtgtgccgatccgtacgggtatctgttggtgaccctacacgcaaacacagacaacctcttacgactgaggacaaacattttcccagacgacaaagaaaagattgtctttgtacccaaaaatggttaagaagcaaatggtcggacagcgggtgttggacaactacgagtatctgaagtcccttgggaggacgacatctcacaagaagaggcgtcatttgttgagcagtgcaggttgtgaagagctgctgaccctggtggtgatttgcttaaacctacttaacg

SEQ ID NO: 4568 - DNA, 748 bp, Heterodera glycines
ttacacttttttattagtttgttttaaaccaatgatgaatatttagtttttgcatttattattacgttttttttaaatttaaaatgatcagaaagcacccgaattttgaagcttagaatttttggccttgaggaaaattgaatttccggtcttaacactcaattttcaaggttgttcgaaagtcaaatctatgctgctattcattcaatttttttgtcagagtcaaattaataatttaattttttgttttttttaattttatatatatcaacatgatcattttatacatttttatcaaatatatccattttcgctttcgttttttattaaattgttaatgattttttttttaaataatttttgcccatttccgaccaaataaatttttctggaaagttattataaaagctatatttgattttagggtaaaatcaacagagaaaagtggacaaatcattacattttttaatactatgaaaaaaagcagaaaattccgagcaaaataaaaaatgaatgggatgattcaccatttttatggcatttggaaaaaagagagaccattgaattaattaaaaagcatcattttgtgcgctgtgttagtgtttttgcttttcccccactgtttattatacaacgaaaaatcattttggatttttagaagcttttggatatttttccgcaaaaaatttaattgtcaattaacggattttaggattatgtgccagacttggaacctcggcgggggggg

SEQ ID NO: 4569 - DNA, 1845 bp, Heterodera glycines
tgttaaaaaaactttctattcgtaacttgattaaatttactatgcttttaaattagatggttgcaatttatagacaattaaaaataattttattttttaaatccttaatttagtgcccaaacttcccggtgcccaaatttctggtgcccaaacttcctggtgcccaaacttcctggtgcccaaacttcccggtgcccaaacttccgccccccattttgactaccctttaacatgtttttgacagccctagtttaatgcctttatttggactttaaaaaaattaattttttaatcaattaaaaaacaatgttttaaccaattgatttcattaataaaaagtaaaaagttatgttgttttttaatgttttcaaattaaaatgcattaaattactgcttttcagttacctacatcaggtcgttgtgagcccagcatggaatgagccgcaatatttcatggcaggatgtctaatggacaattgcacaacaatttaccaaaagaagggtgtcaacgtggtgatcactcgcttcagttggaatgatcacgattacctcggattccgtttgccacatctgcatgaagccattaaacggaaccgtgatcaaatttttgcagaaatgaggtgaatttttgtttcttctttttcagttaaaattatgggaacaaaaaattctgaacttttaaaaatattatttgaacattttcgaaagcattttcaacaaaagcatgtggaaaaagaggttaggtaggcgtttggttcatgaaaatgatcaccgattttgtgtcaaattttgaagaaacgtgaattttaaattggtcggtgacaaaagcctgggggaaattttaaaatttgagtccaacttatttctaagtcttcaaagttaagtaaaatgcactcaaaaattatttttagaccaaaataaaatttcactcgagctcattacttttatttaaaattgtttacagtaaaaaattcaaattgaatgggggcactgccgatttacgttcaattatggcacttaatttgcgaagcacatttaccgaaacagtttatagcaaagatatgtggcaaaattttgttttggttcacaacaggaagtttttcaacttggtaagtaaaattggagaaaaataaataattttttttaaatataacttaattttcttatttaccgcattttctaaaacattaaattaataatttttgatacaaattgtcaataaaaaaaagcttaaaatccaacatttaaaaataataattttcccattcctaaggcgtgtacgattccgcttggcattgctggcgttgagctgcaaggactgcatgcatacgacaatcaaacggaattgttcaattcgcaatttttcaccgttgcgaaccgttacaagttgattttgatgctttaaaatgattaaatgtttttggcatgcaaaatgtaacattgcttctgtcctacaaaaatccaatgttgaagtgataaataaattgccttactgtctaaaagtcaaatttaggctgctaattcattcaagtttaggtattttattttttacttttcaaataatgataatgttttaaaaaatactccaaagaatcaaaaagcggtcaactttaagttttgctcaattttgttttgtttccaatgtttgctgtgtttttcaagtgactttatctttaatcctatgttttcttttgaagtaccaccgaactcagtcacttaaaaatgtaatttttatttattttctcttagaaaaatacaaattttgtggttatctttatacaataaatttagaataaattcacaaaataaaaataattaaaattcaattatttaatttaaaaaaaa

SEQ ID NO: 4570 - DNA, 3004 bp, Heterodera glycines
aatgacgacgacaggtggcacattcgtcatttttatatgcattcattcgatcattagtcatgatcagcagaaaacacagtgattggaatagtttaattgatttagttacaaattaggtaaaacaacaaaattggttattttttacccggaaaagtgaatattggaaattcagggcttgtctcagagcacgctctttttttttgcaaaagattgccatgtgcaattaatctgtgactgatgtttaaatggcatttatctttaacctaccaatacattatgtaagactgatttctttacaattgtctcatcttaatataagcactggcttaagaaactgagaatagtcattgattggacacgtaaaaatcgattagatgcttcaattgcagtagagccatctttgtactacttaatatatccccatcccatccataggagttcttgctaattcctgaaaattccccaaaaccaaaagtttgctgtgccctgatggtccccctacacacggcctttagttttgtccttgaaaaccatttttttaaactttttcccattcattttttacgatttataaattttcctgccctaaaatggtagttgaaatgtcttccggtgctgcaacaactgcttctgccgctgctgttgctggaactgctccgtccgctggccctgtgccctcatgcatttgctcgtccacctcgcagctgttgacagcggccggcatggacggcattccgccggccaaaacgcccgcaaattcgggcccggacgcaaattttcttgccgattcgttgggcgtctcaccgctataccgccaagaagatactaaagtattaacaggggatggttgactaaaatccataaaaatggatgcattttttgcttgattacccaccaaataaagaattttaaatgttgaaaaacggaaaaaaaattttagcgatggcaaaccgccgccaaagtgtaccagtcaagccgtagtcaaatgcacagtccaacctccggcacttgtgcaccgcagcactttcattttggcgaatcgctgacggcggagggccatttgacgcaaaaaattcgccaatgccgaagcagcgggcaagtagtttcatccaattttttatggcatttttatgttcagtttttatgacattttgtgccttttatctcacaaaatttgggattttttttataaaattacaaaaataatccttcatattataagcaatcaattccatactttgtttatttattttgaaaatcacctttcaatcgaaatttttctgttttattgcactttgagtccaaaaaacgcatttataataatccagcaaagtccctgttcaaaaaaaaaagttcatgccgaacttactaataatcatgcaaacttagaacccgtccctttatctgaattttacaatacatctttataacaaaaacagggtttttctcctcttccagttcccccatttcgttggaggacattgccgcggtgaaccgccaattccatcggcaaatggacagcggacagcgccggcgggtgaacggcccggcgctgaacggctcgctggagttggaggcaattgcggcggtgcatgaactcgcctcacaggttttaattagtttagagagcatagttccatgttggatttgatgtcatggcaattcatacaaaagaatttcgtgcaatttttttaatttttcagttaaaacagtcaaaaaatcagaataagaaaaagttgaataaacttgaaaacgttagaaaaaatttttttttttttttttttgtatttctgttgaaaaaattcatttgggttttttgagaaaaaaaactgggtttcacttgataatttaaaaaaaaacttctttattttgatgtacggcggtcaaatattttaccatgttcacccatccactaattttgaatgttaaatgaaaaatggtgtatttatttcttgatgttagcctcgcagttgggtgattcatttaattgatgatgcccgagttggtaaaacgattgttcatttcttccaatttttgcatgggttcaattcccattggcgccgcgaggcattttctcccattcctcagtgggcaagagattgtgaatgacgcgatttaattgatcgttggctcgcaaactctaatcagacacagagggcaaagtgatcagtggttcatgttgatctcccattgtacccgcttcaccatcgggcattgggttttgcaatggactaacaatttagtttaatttcattttataaaaaatgctttttatttattttagtgtgtgtgtgtgtgtgggattttaggcgctaatttgacatattatgctgaaaatttattgaatgcaaatacgtttttatgcgaaaaattatttttgaaaaaaaaacatttctcattccgtcttccagaaataagaatttatttggtacttatccttttttaccccctcttgaaaaaaaatttacttctaaatgggaaaattttattcgctttggtcagatttttgcaaatttgactccaagttaatgcgcattagtcaatctttcgtcatgattttttttttatatatataattttttccgcacactttttaaaggtcaaacaaatttctgtctctgaaattctgccccgcacttccgacctgatcttcctgaacatcaaaacgtacgaaggtatggggtaggcaggcgtaaaaaaagttacaaatttttttttgagaaagttattttgcttatgttagaccatccttacactttggaattgaccatgaaaggatggcgcgtttgttccacgcacaccgattgtatgaatggtaagttttgcaatttattattggcaaaaaaaaatttaaattttcaaagttttcaggcgattatcacaacgtggcactgcacacgcgctattttcagaacgcaaaggaattgcttaaggtgaaaacaaaaatttctcacttttttagtgtgggttttttaggtttttagtagagcccggacgggaccgg

SEQ ID NO: 4571 - DNA, 3162 bp, Heterodera glycines
ggtccattttccaagtcccgatcccggtcccggccatttcaaaattacgggctctagtttttagattttaaaaattttgaaatttttttagcataaaatttgggttcagcatttccctctctccgtattttctttaaatttctgacatagaaatttttcacaaaaaaaccctaagaaaattttttaaccggttttatggtttgaaaaattatactgtaattttttggaaaatttctttaaaaatagaaaaattgctaaaaaatttctttatttccttaaaaaatattaatttttcatttgcatctatattgttaatactatataatccaaaaaattttcaataacagatggtttcgcctgaccacgacaagcacttcaccgactgtttggcgcaacgtttgagccaattgcagcggacggcgtcgcctccggcgcatgccaacaaagcaagaaatgttggcacaatttttttaattactcgttttttgtaatttttaaatatgaaatatgagctttgaaaattgttttgcatctcaataaaatttcacaagttccattcatccgttttttttttggataattccattttttattgtttttgtttaatgcggaatatgaatacggaacggagaaaagaattatgtgcaaaaaaaatgccgcaacccagtggaaaaataaaaaatttacacgatgaaaaaacggaattttcttacccccccccccccctcactccctcaaccaatgaatttgttttatcctgtgaaattttcataattcaaaataaaatttcttgattaaaaatgtaccgaaaaatttgctgacttttccctaatttcagttgatccatgcaactggttgctgatctgatcagtgaatgtgttgatcaaaagaatcgttcttggcaatgtgaacaaaatcacacaccccacccacgtccattctcacaacaattaatttttacccaattttgggtgttggcttatattacctaattacacaagtcaaattatggcaattttggggagaaagggaaatttgttttcccatttttaaatagtcataataatgcttaattgacacctgtgcaacccaattgttcaatttattgctaattttggatgtgagcagccccatttccatcatgacaaacaacaaaaaatactggcaaatttttcaaattttattttcggcaaaaaaatttcaaatgaatcgtcaggaggcgggcgcttcaattttttttcgaaaaaattattagaaaaatttttcttggtaggcctgcacatatcacaagctaacatagtaaaaagtaaaatactgtttttttttaaattactgattcgacctcctcattttgatctacctgaaattttgatcaagaccgggccaaaaaatggattcaataaaaaattcagcatttttgtgattctctaattttttcttgaaatttataaaaaatgtttcccatgtggttgatgggtcagctattttacgctcacaatttgctggtcttgatcaatgaaagcacaacacacaatggccttaatcgacttctatttggtgctaggcatgtacatacattattattattatattactctatagtgatggtcgagaccgaaatcctttttttcgagactcaaaaaaaaatcccgacaatttacttgaaaactgagattcgactcttgagcagcattactacatataccatgtgccaagacatttgcgcctcggattatgtgcgccacagacttttgcgcctatggtttaaaatcggtttcaaaaattaattttgtccattttaaatataaaattaataaatttaaaccgcgttatatgtacatagacacaaaaatacaggacgcaaaaatgtcatatataaatctactataagaacccaatttgtcactctctcgtccccctttttatccactttgtgaattcgaattttgcatagtttcaggaattctattcattatttgtgtggcattcgtgcatttatcgataaagctttttcttcagtttaattttgtaaaaaatcattttgggtttcgcaaatcgctttttaattattttttaaaattaattatcctttcattcaatttttaaatttgcccatttaattagcgccaaatgtttgttgcacgttcccagtgttgtgcgcctgttacaaacagtctaaagattagtcgctcttttgcggtcccttggaggcaatttttcgacaaattaaaagcggacagaatcaatgcgcaagtggtgagaaattagggggtggcggatggataaaatttcaacaatttatttgggaagtcgataatgcactttttaattttgcgggccaataatttatagggtctcaaaaattgtccgattgtgtcacattttcaaaatctttcgacatggttgtggtggtggtgggaccctaaaaatctccaaaaaaatggggggtccgtttcgttacattaaaaaaatcccaaaaaatgagtaattccattttgaatttttgcagaagcataagccgttggacgatgaccacaagcggtacgcggatgacgaatggcattggatgccgacgggcgaaagcgacattcaaaaccaagcaaccgtcacatttctctcgcgcacattgaagaaagagaaattggtgcgttaagaaaaatttaaaaaatttttgttaggtagcttatgagggaggaaataataggtgatcgtcgttccaccctggtggattaaaacaggactccaccgacccggtttttgggatatttgaataaattccttaaatttaactcaaaatttcattatatcatttaatagtcagacctaaaagtttaagtgtcttcactgttcacatgctaaacttcaaaaaaaaattttgtttaatttcaataagtacgacaaaaaacgatcgaaaaggcaaaatttttaagcataaatttttagaaacttgtgaaaacgggaatttttgaaggtaaatagagaacaattttggctatcgattgttaccaaagaaaattacgaaagaaattttgcattttaaaaccgggccggtaaaaaaaatttttttttttttagaatttgagacaatcaaaattattataaatgcaatgtatctatataagtatgtaattatatgagacatatcttttattccatttccca

SEQ ID NO: 4572 - DNA, 1546 bp, Heterodera glycines
ttaatacaaaaaactaccaatatttagcgaaaattccctttttgtgatcagtgggaaacgaattctggacagtgccggaccaagcacggcacgacgattttcagcggaacattcaatgagcatttgagcacagcgatcgtcggcccaacgaatggcctgaaaaaacaaatgaaattagttatttttaatcgaataattaattaattagtacagcattccaaatgatgagttcgtcggcgattttcaattggtcacgttcgataatttcgcacaacaaattttgatcaatttgcaaaaattcctcagattcaaataaagttttggcattttggtcaatgtaatccaagcagcgacgagagaaatccttaaaataaaacaattaaaaatattttgtataaatttcgatttgtacattttcgttgagaagacgagcttcgtcaaaggcaaggaaaacatttgacaattcattaattggaaacgccaataaggctttgaccagcagagaaacgttatatttattggctaaaaatgtttaaatataattatttatttattttttaaatttttcacctgcgtaaagcactgccatggcattttgtccgttcaattcgcttaaatcttccgcgtaaatgaagctcaacatcactttgaacgcttctgcttcaacatcggtcacttcaattacgtgaggacagtcggcagaggctaaaaaatgatgaaaaaaaaacatttttaaaaaatatttcgattttttttactttttgtctttgcgtttttatcatcaaaacggaacatcgacccaaacacatcagaagcgaacatcatcacgcatttgtgtgctttcaaaagctaaaaaaactcggaatagaaatggaacttgttcaaaaattaaaaaaaatgaggataaagattcaattaaattataaacatttccctggcggcgaagcaccgtctgaccctcattttactaaaatttgaccagaaaatggcaaaaaatttggttttttttttggaaaaaaacgaatacaaatccctgcttttcctccgtgcgctgaaaattttagaacggaaccttggattaatcaacttttgtgggttcaactcacctccttttctttcccaaccaaaaagtgaacgtccgccccatcgcccgtgctcaacatcagcttaaatcggcccagcaaattgctcgacattgtaatttttaagaaaaaatggcaataaagattgctgaatatggaaattataataataaaagaggtaataatctcttttcttccaaaaaagaaaggaattggtaatggaaaaactaaaatttaacattttaacttcgatttacagaggtcgatttggattttaatgacgtaaaatgtgaattaaaagggcttaatgatctgattacacttttgctcctaaacacaacaaatcacggctcttcacaccacaatgacggcaagcaggactgggcgagcagttggcgtgcccgtgcctcgggcactccgggcgccgccgtcgccgagtttgcagcggccatcggtgccgtgcc

SEQ ID NO: 4573 - DNA, 2676 bp, Heterodera glycines
tatggaaaatattgatatagaaatccttcctagaagctttaaaccaagctaaaaacatgtttttcgtgcgtttcaggcctccaatagtccaggaaaaaaatatggatttccatataattaccagccctactcattttactaaaatttgaccagaaaatggcaaaaaatttggtatttttttggcaaaaacgaatacaaatccctgcttttcctccgtgcgctgaaaattttagaacggaaccttggattaatcaacttttgtgggttcaactcacctccttttctttcccaaccaaaaagtgaacgtccgccccatcgcccgtgctcaacatcagcttaaaccgacccagcaaattgctcgacattgaaatttttaagaaaaaatggcaataaagattgctgaatatggaaattataataataaaagaggtaataatctcttttcttccaaaaagaaaggaattggtaatggaaaaactaaaatttaacattttaacttcgatttacagaggtcgatttggattttaatgacgtaaaatgtgaattaaaagggcttaatgatctgattacacttttgctcctaaacacaacaaatcacggctcttcacaccacaatgacggcaagcaggactgggcgagcagttggcgtgcccgtgcctcgggcactcccggcgccgccgtcgccgagtttgcagcggccatcggtgccgtgccgtacaataggccggcgccaggtgtgagcgcccgttggtgctgatggtgcagaaacaaaggcgtggtggcgccaccgacggaagaggaggaggacaaatgttgctggtggtggtgttggagttgcgcaaaagttctactatatataaattgtatatcgttgatacacctacatcgtgttattgcggtttcatggcaaaacttataaaaaaaaaactccgatcagaatgtcataattctcgatttaaagcttcggcaacaattctgaccacgttaatgccattatttttgtactatgccaaatttgtttaaaaaatcaataagcagccccacctgctgttggtgttattagtaaggttgttgttgtcgttgctgaatttgttgttggaccaacaatagctggtgttgttgttcatcaaaatgccaccaccaccaccaccaccgattgccggcacattcgaatgcggcatttgttgttgatgaactacaacagtagcagcagcaaccgatgaagaggaggcggaaggcactgaagaagaaataacagcggtggaggaggagggcacttgttgatgagtggccaacaaaaccatgccgggctgtgatttttttgtaatgattagagctgggatgccgttaatttacgaaaatgggatttgccactatttggagggcgttagcctgcaactgattctgttccaatttcgggcacgtttaaatccacacctgccgctgttgctgccgaacagatgctgcttgatgttgttgttgcaccagcgacgattgttgctgcacgtgtcgatgttgatggttgtgctgttgcggtgtttgttgttgcttgacgaagttgctgaacgctgactgttccgaccgggttatgatactgacagccgatgcaccgccggcagttgtggtgccggcacagctcgccgttgttcgccgatgcaactgtgccaatgcgacaaacgcaattttggcatcgcgttcaatgtgccattgttgttggggaagtgcgtccgtttctcgctcctcctcactttcgtctaccgaatgttgttgaccggagttctgatggtcgttccgatgatgtgtgagcattaatttcttggttctaaaataaatgctgatcggtaatttagcgtttcaagtcgagaaattcgtttgggactcgataattcagtcgcgatcacgttcataaatatcagaaccatatcacatggtcggttgatcatcgccagtttttttcttccacttaatattcccgatcaagagttgtcagaagagcaaatttcaatttaactgctgatcggaagtgatccgataaatctgatcacttatgccaatcacccgcttttgacacctgaacgtcagtgaacaagacgcgtccgcgcacggaaacggcgcctcgccagtatgcgcacgcatgtgcagctttaacgcagagcgggacaaaaagcatttgttgcacgcgctgcactgaaattgggacgcgtccacctcctggtgcgtacgccggtggtccgccagcgtcgtgcgcagacggaagcggcgtccgcacgtgtcgcaggcgaacggacgctcatctgctgggcgcaacacgcaaatttatattaaaaaaaaaactgaaaaggttccaacttttttggccacaaatttgttcaaaattgacgaattttttggaattttgcaggctattagagtatctgaagagctctcgaatgataccaagattgttagatttggttgacaatgaaaaaagttatagtccaaaaacatgctggggcccaaacctgcctgggcccaactgaggtagaccgaagaacccacggcccttaaaagcgtggaagggctcacctactgagatacggggattccttaatttttccaagccctttgaccagaacggagtggccgttgccaaatttgggcgatttttatccaattccgagactaccgacccgtatg

SEQ ID NO: 4574 - DNA, 4381 bp, Heterodera glycines
  unsure (1)..(4381): unsure at all n locations
cacaaatttgttcaaattgacgaattttttggaattctgtaggctattagagtatctgaagagctctcgaatgataccaagattgttagatttggttgacaatgaaaaaagttatagtccaaaaacatgctggggcccaaacctgcctgggcccaactgaggtagaccgacacaaagtgctgaaaaaagcaacccgtcctttgggactcgaacccacggcccttaaaagcgtggaagggctcaccgactgagatacggggattccttaatttttccatgccctttgaccagaacggagtggccgttgccaaatttgggcgatttttatccaattccgagactaccgacccgtatgggtgcgcatgtgccgtctcaagtcccatgcccgcttaaacggacgcgtgcaatgcacgcaatgggacaatgtctcagtcctccgtttggcgtgccgcaccgttgcagaaacagcagcagaagtggacgccgccatcgcatcagcattagataaagcagcaagcagttgtccatcgcttaatctgggcatttattacgtattttgatgatgtcattaaaaaaaattaattatgtcataatttctgtggagttgttttatagccgtgaaaaaaattggggtgggaaatggagtagtgagtcgtttcgtccaaatgcccgggcctctttgtgagattgtccaaggctcttaaccgatgcatcaatccaccatttagcgggtgcttggaccaaatcatttagtttttatgaaaatttactccacagaagagagggtgttgcaccccgagaatttttataatttcctctccgatcgccgacttaggacgcaaaaaaaaaatcatttttaagcactccaaaaataggtttaaactttgaaccaaggacaaatgccatcaattatttgggaatgaattccctttggacaaggagaaaattttattttctcattttgtgcctttgtgaagagatgacgtcatcctccgcgtgtgccatgtcaatgtgttcggcaaatgcttgcgcaccggcggcaccaaatgaaccagcaaattgttgttgttgttgttgcggtggagcggacgagcgcgacgggggcggcacgctgcacaacggacagacgaacgcatgcgtggcatgggacgacgacgaggcggacactgtcacaacaatttacatggtagccaggattcggaactacattttatgcattgggagcagaattccattttcaaaatttgggcgtcggaattaggctcccggacaatccgtcagtaaatttatataaaaaaatgatcccgcttgggggaaaatatacaaggcttttttagactcccgtaattatgaggttacggatttccgtaaccaataaacactccgtaattatgagccacgaagttgcgtaattaaaatccaattacgtccaatcccaatcggaattcgtcaagacttttggggatcacaacacaaacgcattacaaaatgcttgctcacccatgttgcgcaaatgatcacggagaagcccaatgcagtcaaaggtgaacaagcagcagtcacaacggaatgccatcgccacaaaatttttgaatgttttttgagtgatcactgatcagaagacaatgacttaattggcaattaattaatgactcatttttgatcataaatcaattcgcaagaaaatatgccggggagagaaggcattctgagaacaaagaacagacagtttaaatattatttattaaaataaaatacataaaataattagtttaaattaatacaccgaaactcatttaaacaattcggaaattggcagtgccgtcgaattggctagcaaattttgtaggttaccgaaaaagggatctttgatactgtgagctttcattatagagacatcacgttacagtaccccattttgattacaaacgatacagtatcaaatagaacaaatttcttttgagccaacttaggcttaaagtttaaaacttgagcgccaacaatcggtaaaaataaaatttaaaaaaccaacaaattcaacaacagaaaaaacaacattgacaaagcataaaaataggaaaaagggtcatttttggcaagtgtttggtgagatcaccgggcgcagatgtttttcttctcctccgcctccttctccaccagggacaaattgcctaatttcagataagcgacgggacaaatggcgtcatttggtgcgctattgaaatggacctattggaaatttttttaaatttaattttctgacccaaaaaatgaaatgttccaatcggtaccatttccccccccccacgccgatttttttttaaactcccaaataaattttaaaaactggcaccacacactcacctccgtcgtcgcctcgtccatggcaatgcgtcgccgcttgaacatcggacagtcgagcacaaatgtttcatactcaccgccctcgccgcatacgtgcagcccgtacttggcatgcatggccaccaaatgggcacgcatctgatcaatgcgaggaaaaacaaaaaatatatattagaaaattaaagaaatttttagaattaatgcatcacgagagtctcgactcgtgctctgccaagattatttagttttattaagcattaattaattttgatgttggatttgaatttgggacctccaaaacatcaagtttgctcattacacagtcaaagttccaattttcgaagccctcagaaataacaaattcacactaaataaatgtaaaatttgtaaaaaaaaacggttaaaaatttcgcgaatcttcaaagaaaaatcgtcgtattcaaccggccgctgctgtcattgtcattttctcacctgttcaagcgaatggcccaagtgtttgggggtcagcccaagtgcggcaactttgatcagcacggccttcacaccagcggaaatctgcgaggacggcacaaaattttttagcaattatttgaaatttaagaaaaaaaaattttttttttttaatttttgaataaactattactagtaaaacatgtaagaattcaaatttttcaggtgggagagggcaaactgttccccctcttcaattgccattgaattcttctcaaacaataagaaaaagagaagctacgaagaatggacgaacatttgcggattttggtattcaaacagggaaagtaaaaagggctactattttttttttttttttgaaaagcgtggattttttcttaatctcacagaaaactgtaagaaaaaacaattagaaaaaggaaaacacgaaaaattttaaactaaaaaattttctgtggcattttttcacatcgcatcaaaaagagcagcatttttcaatgctttttggatcaacattctcgagtttgaaaaatgtttttgtgtaatttttcataaatcccaaagaacagtaaaaccggaaaaactcaaaattttcatttgtcattttgtgcagcaccattcactgaccatggcgtccaacagttggagttggtccaattcccacaggaagcacagcgggacgagtccaagccgttcgcacacatgttcaacacgcaatttttgataagtgctgtttatcgcgcccgcggaaacgcctaaaaacaaaaaattaaatttaaaatccaaaaaataattcatttccaataaatattttaaatttttttagtttttttccgaatgaaattgtaggtttttttaaattttcattttgctatcgttcgtcaaaaaatgccattttttgtaaatttaattatgaaattttatttaagaaaattgagcaaaaattttttgtttgcaaaaagatgtaaaaaatgcacaattaaattaaaaaatcaccccgaatttccgggtcccattctttgaccgtcttcaaaaggtggtacaaatcctccacttcgtcctcctcgtcctgcacataagtgttgctctctacacattttggacgccccgaaattttgcgttggaacagcggcaggccaagggcatccgcgtaaaactgaaaattgcaggaaaacaggcctaggagttttttccaaacaaaggagacctcggaaatgcaaaaaaatgaaatttaaggaaaattaaaaatttgaagccgaaaatttaaaaaaattatggcacctttgttctaatttttggattgcaaatgcattaaaaaaaatttaaattgcattcaatttctttattttaaagcatacatatttagtctcactaaccttgattccctcactgcccacactttggtacatgtaactgtccaactcggcaatctgaaaatttgctaattttggttgtgaaaatattttttagagatttttgtggttgatggatgatccgaatccagcatccatttcgtacatttaaatagattttgngcaaaaaa

SEQ ID NO: 4575 - DNA, 1645 bp, Heterodera glycines
ttctttcaacaagggccgcgtgcaagagatgcgcgcactccaattggacttgaaaagcggtgaaatagcgcagtggcgccccaaatatggcaattacaaattcgaaaaagaaagtggcaatttgttgctttggcaaccaaccgatttgagcacaatgattaacatggacaaccgaacgcatcaataacttattaaattttttctattaaattgttggctgaattattggcattctgttttttcctgatctaactttttttcgaagaaatatgacaaaccgaaattcagcttgtttacccacaaaaactgcaataaataatcaaccaatttaattttgctgttaattttaatttcatttaaatttgtcaccaattttttaaaatctttaattgagcaattttgttaccgatggtgccgtggctctaatttgaatgtgttcatccaccaaagtataggaaaaatctttgcctcaagtgatttggcattttgatcaagcacctatttattattacataatttttactaaatagaagagtataattagcatgagagttgaaaaacttcgaaatcaggattttggacaaaaaatcagattttttgggtaacacttttgcaaaactgtgttatattacaatttatgcaatcaaaaatataccaaatatatttttttcaacctaccattttccttacgaaattttttttttttgctgcgcctttttcagaaaaatttttgggaataggggagtaggctccggcggtgcgataggcgacatcggcaaatatctagtaaatttattcatgatttgttaacagaatttatccgaaaactcaccaaattttgtgatcttgaaccaattgtccaaaaaagtccaaatttcgcaattagtcggcacgggaacttttggctcaaaaatatgtgtaaaaaatggaaaaatcgcgaacgtgccgcgatagcaaataatgaattaattagatgacaattttttgatattgacgaaaacaggaaaataatgagatatttggctaaattggtcgtagaaatgaaagtgaaaatgcgacaattagtttaatgggtggcatgtgaccagtagtgctgttcgagaccaaaaatttcccgagactcgagactcgagaccgagaccgagactcgaccccgagaccgagactcgaccccgagaccgagactcgaccccgagaccgagaccgaaaaccccgagaccgagacccaaaaaacccgagactcgagacttttttcaaaaattttcctattcgcttaaaaatcgttaagaacattttttgactctattcttaactaatttttggtttttttttaaaattttgattcaatttggtacaatatttatcatttcaaaaacgcacaaaacaaaaattcattaaaatttatgtgcaatttgttaattgatttagtccaaaaaatgaaaatattttacgaatttaattgttaaaattatgattgaattcccaccgaaaaatgaataattttgaaaaattagaagaaaaaacatttacttggaggggaactgatcccacgctaaaatgaagaacaataccaagagaacacccacccggacacacctacgagtaaacaaaatgaagcaaaaaattaccaaaaatatattaattt

SEQ ID NO: 4576 - DNA, 5863 bp, Heterodera glycines
gaaatcggtatttttaatttcggattttttaagaccaagaaatttaagactgagcggagaaatggcataaaaaattttacttatcaaagcaaatatggaccagttgtttttggcactgtctactgagcccgttgcagaggaagaagaattagattttgcttatttggaacttaatgaagatcaattttgaatttttcatataatctatgaattttaatgaaaattttggaaattttataaaaattttaaaaaatttctcttggaaaaatttccggttggtcccggtcccggtcgaaaacttggtcccggtccctgattaaaaaataaatatttaaataatgtttcaaaatttattaaaccaaatttattctgataaaattctgtcttgaatttttttacataaaaaagcaaatccgttggcaatttcagtaagcaaaaatattttataaaaaaattaataagttttagatgcattcggttgtccatattcatcaattgtgcccaaatcggtcggttgccaaaacaatgaattgctaattctttctttgaattcgtagtcaccattttggtaccactgcgttctttcaccgcttttcaagtccaagtggagtccgcgcatctcttgcacacggccctttttcaaagaaattcaaaatttaataaaatttttagaaatttgggcctggaaggcacttggagtcctatcaataaaaaacattatgaaggcacaaaattaatggttcgacaatttctgctatttgtgtttcgagttttgatttcggctttatgattcgctgtccattggaataaattataataataaatatgttatatatatatatatatatatatatatatatataatttttttcttctctctaataagaaccaacctgatcagcgtcaagccgctctaactcatattttgctgtgccgcatctataaaaaaaacccatcaaaatctagataaaaatctcatataaaatttattaaatagagaaaagtctccgctgccgatctatataaagctttacaattaattctatcgttcaaatatttttaaatgataaaaataaataaatttacccataatttttatattttgagtgattttcgaatttttagattatgtaattatatcaaaaacaatgtattaattcaaattagggttaagccccgagcctagcaaaatgtcggggaacggggaggaaattccccgaaagaatttgtcggggatgcctggagaaatttaaaaaatgtcggggagcaacacactcgtcggggagtaaattttcataaaaagtctagaaaaacacaaaaagaaaaagttcagaacaaaaaagtcttaaaaattcatttaaagatacttccatcttatttcaagtgcaatttacgactttcgtaattccacgaaacatgtcggggcttaaccctaattcaaatcataaaaaaaccaatgtaagcctttaatcgaatagcttctaaatgcagaaatatcttaaatagaaataaaaaaatttttacaaaaaagttaatccataaataataattatttttatttattctaccaattttctagatatataaaaggtcaaataaacatggttaaataatgacctggtcaaataacatcttttattaccgccctgaccggattttgtctagactttttttgagaatgcacttggaccagcaagataaatccaaaaattttttagtgggttcgtttccttaatccatatatccacataataagatcagaagagactctgctgatccgtcttgatcagatttcaaaaagtgtgtgcattttccaagtccaaacttcggttctttaaaatttcattatttttcaattttattgactcactcgccactcaatgtgattgttatgttctcgaaatcttgtgaagtgtagtaattaattgggtcccagcagtgtcggtttttgaacaccacgggaaaagtgaacggtgaagcgccactcataccgtaaccatcaacggatgctttgatttggatactgtaaaaaataaaaacactattttaacaacaaacagcaacaaatatttttttatacatatttatggtatgccctcccaattttctggttgttcgaaactaaaatccagtaaaattcatctctggcacctaaggaatcttttgatttcttaaaaactttcaaatttatccaacaattcctatttataaaagtcatttaatattcatctatttttggatttttgcaccttactaattcatcctaattatttaaagttttgaatttttccggtttacgtgccttcaaaaaatgattttgattgaacacaatccgtaattaacgacctaaaatcatgaaaatcgttaatcaaaacacaaaacttatggatattaattaaatttctacgatatttgcgtgccatcaatcataattatggattgtcctcaatcaaaatcaattatgcccatccattctgggctggcaactcaacaaatatcataattatgtaaaattaattaaaattcaagatttcccgacttacgtgcccttaaaagctgttcggcgcctttctccccaaaaacatttggacaattgaaaaatctcatcgtaatcaattttcacatttgccgtacagtttttgcttgccccggtgatgcatccgtcaaaaagtgcgagagtgccgaaaatgggaacaaaaatttggcacaaaaataaatattcattaattacggcgttttttcggaggatcttctttagggtttttgtccgggtcatttttatagaaatggacctaaaaattccaaaaataagaaatattttaattagaaatgcgtggggatgaaattttcaatgaaaaatccaaccaaagaatttcaaaaaattagccccccccccccccctaagactgaaagatcctcaattattcatccattaaaatttgagttttagaaacagcgcaaatttcattaccaattttaattaaaaattttctcattatttgtcatttgtaatcgccttctttgtcggtcataaaaaattattttttgatgaaattttaattaaaattcccttttgaaatttttttaaaattttacatattttcgcttatttgggggtaattagtgccaattttgcaatttttctacctaaaaatctcatccctaccaattacagaccatggcacaatgtttcacatggtcataatatttgttaccgcagcttggcatctgtaaaagaaatcaaattaatataaataaaataattttttattatttttacaaatgcaattttttgcaaatccctcagacaaatccgccgacttccattgaatgtgccaaaaacgacgccgaatttctcgttcggcacttgacctttgtactaaaagatggcacagcttaacagttttaccgtatgaaatgcctaccgtacacgcacagtactcttcccccggtgccatgccattgctcgcttttgtccccttataacatgcgtagcacgtgttttctccgctgctcagttcattgtcgtcaaaaagcggcgaattaagccatggcgggcgcaaatggcgcggcacgaaacccttctgtttgaccaccgccgagtgccggcactgctcgtggaacggagtgccatcgatgggacggcacaattcgtcggcgccatcaaagcattaaattatgagaaataatttagaattgaaatttaaatgcttttttaattttattgaccatttgttgggttgtttttggaggtgatggcaaaatgaacgacaattccaatggcaatggcgaatatggcaaaattcggatagaacattttgatgagcaaattttttttactaaattaattatttaaaaaatatgtcattttattttaattttttttttgtttttgcaatggacggacaatccaaaaacatttattttatgttaatgcatttttttgatggttaagcaaatcgaatgtttagcagttaaattatgattcactcttctgctgctgctctctttgtcggtggaccaaattttcgaacatttttaatcataacattttgaaatttaaataatttttttgaaatttggcaggataatagaaaaacattgaggatctatcgaatcatatcgtgaattaaaaatatgtttgctttttagcaaagttataagtaaaatttatttttattaaaatggtttttgaataacgcccatttttggtcagtttttagacaaagtctgtcttataaaaaatgtgaaaattggatgaatggacattgattggcatattcagtaagcaaataaaatcctaaggcccaagatacagcttaaaggaagaaaaattgaattggacactgaaaacggtacaaattccgttccaactaaaataaaacttcctcctatttatgtaagattataaattgattgtttaataattaaaaacttttcaaatgatgataataaatattctagtaaggaaagttataaagatggaaaaatatcaaaataattatattgaacttttgcaattgtgaatcatcaacgacgaagtaaaatagaagattaatgatgattagtacgtttggattaaccatttgctcaggcagtgaaaaggttgtgaaaacggtgaaaaatcattgctaagagtgctctaaaatgagtagatgtctacggatgcttgtaagtgttgtttatgaaatgatcaagtaagtgtatgagtgatcgtgtgactagggacgagtgagtgattaggaacgagtgtgtgatcaaagagagacacagagagatcggtgtgagtgagtgataacagagagtaagtgatcagaaaattaatcagtgtgtgtgtgttaacatgtgagagagagtgatcgggatgagtgtgatcataaagacaatgattagaaggtgatcagagtgagtcaatgtagattagagtatgattaggagtgagaatgcttgatcagagaatgattagagtgatagcgaatgatcagagacgtagagtgattgatcacagagaaagagtgatagcaaatgtgattaagtgagtgctgatcagaaaattaatcagtgtgtgtgttaacatgtgagagagagtgatcgggatgagtgtgatcataaagaaaatgattagaaggtgatcagagtgagtcaatgtagattagagtatgattaggagtgagaatgcttgatcagagaatgattagagtgatagcgaatgatcagagacgtagagtgattgatcacagagataagagtgatagcaaatgtgattaagtgagtgctgatcagaaaattaatcagtgtgtgtgtgtgtgttaacatgtgagagagagtgacgggatgagtgtgatcataaagactgaatgattagaaaatgatcagagtgagtgaatgtagattagagtatgattaggagtgagaatgagtcattataaagtgaaagagtgattacaagtgagagtatgatcaaagagagatagaagagttatcagagtgcgagtgagagtgtgattgaagtagtgaggaattacaaataaatgattgcagagagagagagagagagtaatcggggtgatcagagtaagaagtgtgggatattgagtgatcagaagatgcagagtgggagtgagtgatcagaagatgataactaggattgagtgatcataatatatcagacaaggacaaagtgaccaaaagtgatcgggatcaaaaaattatcaaaatgctcagataaacatgtgcgaatgcgtgtaaatcatcggaaagagaaaatatactcagaaaatgatcagagtgagaatgagcgatcagaaggtgatcagagtgcgaatgaatgatcaaagcatctaaagccccctatatcttaatg

SEQ ID NO: 4577 - DNA, 5667 bp, Heterodera glycines
ttctcgcccatccctactgggactaacccttctttagcatttggaacgcaaatattatacccaaaatgtgagttctaaatcgtaaccgatttttgaaacagacccaaatgtccgagagcctcaaaacttttcacacgcttttatgtaccttttttgtagcagcttgtcgcaaaacaatggcgggcttcctttcggcaaaatcctctgatgactctgccacgtctgttttcagcgatacccaccttacagagcagaacttaaattcaataattttggttttaattagtcaattagcgaatagttttgtcaaactctgccataacattttttatttaaattgttgtaattagtgccgggaattttgagtgatttaattaatttttggtgccttgccgattaaaagaaatgaattagtgtagggttcatttttctgatttactgattcttttatgagactgatttttgaaaaattcctcaaaaatggccattttatgtaaaactgtaccaaaagtcccaagttttcaagaaaattccaaaatttttcagaaaccattaattaattaattatattttttaaacactaatgctaattttaaaaattttcagttgcgtgccctgctggtcgtctaaagcgcttttttccaaaggcatcgaaagatatcgcagttgtgtgatttgctttttacactaggattcttcagttttttgcaatagattttaatcccgagaattttcttgtgccgagactcgataatcaactctcgattatccatactgatcagatacctttctcgttctgatcaattgggatcggcggcggaagcgtaaactgttcgttgccgtgatcttgcccttcctcaccaaaatggcatttgcacgacaagccatactttttgcttctttcctcacattgttcgacatttttgatttggtgacaaaaccacataattgctccgaaactgggaatctcagcttaattgcttatgtttttttaaaatactcagcactgaattaaaattcttgtatatttttaaatttttcgtatattgtaaactctaaaaaactaaattttaattaaattaatgagttctgtccataaaatcgtgataaaaattctctattctccaacgcacctgctgtgatggaaaataccaccatctccaattaaaattttattgttttaactccatgttatgaacgtttaaaaaaaaaatgttttttttgacggaaggggcgaaaaataaagcaccgatgacccaattgaagggatacggtagccatcctttttagatggcaattgcaaaatacagtatcattttgtcctctcagaccaattgtgcaggttgccgctacacaatatttcgcctctttgtcaggacatgaggagttggccatgatgaagtttctgctgattggctggctttcttgtccctgtttgcacttgagacctgttgaatttgatttataaattaatttcttaaaagaaaagcactgggtaaagactgaatttttgagaaatttggaaaaaaataaataatttaaataaaaaagttttttttaaacactggaaaaataaaaggcaattcccattataaatttgtgagatttttgacaaaaatcttttaacaaatcaaacacaaaattcccaccagcaggactctaaatgacattaaaatttattaaaaaggcacattttgtcttttattgaacattaatctatgctttttcttcagcgattcatctgccggcattttaaaacaattattattttttcacccatattctgtcaaaatggtgctatgacgttagtcaaaaaaccatcaaatgaaaagattttttgatataactttgctcagaggcaaccaaattttaaaatcttgatatcattcgatagccctaagtatttctattagcctacaaaatttcaaaaaaattcattaagtctcaaaaaagttatggccaaaaatgttgaaaaaaaacttggttttctgagcttctcaagtcataacttttttcaaacttaattaatttttctaaaattttgcatgataattgaaaacacttagagctatctaaaaatatcaagattttaaaaattcgtacatactaggctaagttataaataaatttctgacaaaaatttttcatttgatggttttttgactaacgtcccagcaccgtcaaaatttgactgcctaccgaagccaccgttggccaaataagcgacgaagacgaaaaggtgcagaaagaatgcaagtgtctgacgcatttgagatggtttttttctaatgatgtttttttttctaaaattaatattttttacaattttattttaatttttttaattaatcgtaaaatgaatccatttggttttgcagcagatcgaataagtggtgaatagaaattgtgacagaatgatggagatgattcattgggaatgaatgcattttgtttttggtggattttccgtaaatattttacgaaataaatgcgaaaggcacaaaaaagattgaaacacataaaaaaagtaatgaaaaggataaaaaagcataaatttgaaaaaagctagcaaaaaattcatattttttgataaaaaatcaaataaaaaatccaagttttctaaaaaaaattgtcaccatactataaaaattcctatcagaatagttttcaacatttcttatatgtgttataaaaccatttcaattttttgcatttaaattcaatctcaatgattctcattaggattttagtaatttagtaagtccattatatttaatcaaaaaatggttttgactgatatgtatgtaacaactgatttgtcaccaaatgatgggaaaccatcaaaaccatcagcaaaaattataaatgattaatgaatgaatgaatgaataattacacttttctccatttgtgatagcccataagagaaaaagcagaaaaatgcaaattaatagccactggaaattattttattttatttattgaaaaatcttttataaaacaaacaattaaattattaccgataaaacattgcgaatagttttcttcttcaaatattaatcttagcatttgattccttagcatttgagcttttccttttttttattaaactatcgccattcatttgaactccactcaaaaaagccaagtaaatcaaataaatgctttgaaaataattatttatttgattatataaacttttttgataacagcataatcaacacatggcaatggtcggagttttgaaacgaattcttttttgcgttatgttttgccttgtgggccagtgctacggtaagacaattaatttgtagggcgggaattttgtaaatacatattttttcctggcctatgctctgaatagtaggaaaacactttcttttttgtatttgccaacaaaataagaaatcggataatcgggtttttccaaaaattagatatcaaaaattaattttaagattactaaatgtgattataagcctattgaggccattcttatggcatttttttgttgttgcctatttcaccctttaaaaatgttatttacatactttggtacatgtttcgggtttttgtacatattttggtgtttttttttacattttaatttacatattttgcaaaattttgttacataaaattctcagccctattaatttaccgtaaaaaacaaaaagaaaattaaaatgaaaattattctccatttaatttaattacaaaggattgatgtgtaaggacgggcgtgctgtcgtcataacaggctatccggatgccgaaaatgtcacaaccacaacgtgcttcattgaagagaaatattgcgtttttgtcacctgtgccgttggtgaatgcttttaccccactcataaaaatagtgtattttttctggaattttcggttgatttgccaggatttggagttttgtcctggaatcactaaaattagttttcgagttattagcagtttttagcaactataaatcgtagccctagtaataaagtcacagttattttaattttttgctaaatcatccgcagatgatagtccggggtatgcgctcagtgcgtggtattgcggtgggcacaacgatgaaacattttgtgccgaaacgatgtcagaagaaatgaggcagcgattcaaaaatgtcctctgcaaatgccaaattggcgaaccgtacaaagacatgaccaatgatatgccaaaaatgacgcttccaccgcctaagccaacatcgccaccgacgccaacaacgacggagccaccgagtgagccgttagaattgggttcccggatgctcgggccaacgtccggacaaatcatcacagtagacaatccgtcataaaatttttgggcaataatgatcaaaagtcttgtgaaaattattgtaaaatttaataaataatatttacatagattcttaacatttctagttacttcatacttctattaattgaccatcttgagagaaatttcatttaagttttaaaaaatgattatttcatatatatatatatatttaaaaaaaaaataaatctagttgacggattgttcactgacagattgtctactgacggattgtccggggagcctgctgggccggggatgtcggtgctatgtcgttatataaaaaccatcaaatgacaatttctagagaatgatagcaagatcactttattttgttcgttttaagaatgttttgatcagaatttttgatgatcaaaatcattgtatttttaattaaaaaacttctgttagaaattattcttgttttttattttcttgctattcgtcgatagacctatgtgtcctctaaaaacttaaggctaataatttataattaaattcttatttcaaaaaatttaattaagtttcaaaaagttatggccaagaatgtttgaagacctgattccctgtgtacttttggcattaactttgtggaaacttgacgaaattttttgaaatttttactttctaattgttgaaattttcttttgatggttttaaaaaaaaataaaagatttgatttgcatgcgtggtacttttgacgaggatggatacggctcgcttgaggacaaagaatgcgacaaaggccaacagttttgctacttggcaaactgtaaaaacggtaataacattggaatgcattatttacctcgcttaaaaaaatccaaatttggtactaaatacaaatgattgtcaataatttttaaaatatttttataaattttgctcaaaaaactaaactcaaaatttaagttaatgaaagattttctagaaatgactttttattcttttcaaaaaaaatttttaattaaaataattaatttattaaaatattatttaaaaaattcattaaaattaatgcattttcttgttcaaataacttgtagacatggtcagctatttgtcttggggttgtgcgaaagacacggattgtgccaaaatttcggctgattggaccatgaacagaggcggcggcaattactcgtgcgagtgcacatttggcgcccctggattaaacttgggcaacgaaaagctgcacattccgatggcacgtacgattgtgttcaccgaaatggaaatccccaacagcggaatttcttcatgtaatatgcaaattggtggtgccattctttgggtgctgggtgattaatgatgcatgagagtgtc

SEQ ID NO: 4578 - DNA, 979 bp, Heterodera glycines
tcacatgaatttgaatggatatgctggcaaaaaacaatataatttctataatatttttgtttatatatttgttatattatcagcaatgcgagggggcgcgtcatatgaaattcatacaaatgagaggggtaaagttgtgcatggacttcatcaataaagtcaagaaaagtgagcatttcattctgctgtcgactctcgctgtcgacaaggtacatggaaagctaagcgggaagaagttcgagcagttagtcacatcagcaaatcactctaaaattgattatttggggcacatgagattgtagatcgtggagctatcatatgcatattatatttattagagtgcagcgggaccgggaattttgggcttaaccgggaccgggaccttttctggttgaaaaaccgggactttttggctgggaaaaccgggaaaaaaccgggactagtcccggtcccggtcaaaaccgggaccttggtactcagttgtactcagttgtccgtgtccaggtcccggtcccgctgcactctagtatttataatatgctaccggttttatttcctaatataaaatcttgaataaaaaataaattggaaaagtggtgccaggccaagtcgtctggccaagcatcttaaaccaatttgtgccattaaattcttttatttgaccgaatccaaataaaagagctttcacaaaatgaagaataaattccttacattaaatacatatcatttacagttgcattcggcaccattggacgacttactgcagtgccaatcagtttctgttttacgatgctgattggttagggaaaggaatacgaataatacgattttaaaaataataacttaaatattataataaataattttactttaaatatttatggtttaaaatttcaaagggcaggaattatcgaaactttcgatgctatttttcttcaacaggtcatcggcgactttgactaaaaaaggtgataaagga

SEQ ID NO: 4579 - DNA, 615 bp, Heterodera glycines
atttgcgtcttgttcgtcaaaacggacaacaaagtctcgaattgctcggtcatttttaagatattttttagatcgagatacttcagatataggcctagttggatcaagttcatggggtatcatccgatttcgttggttctcatcttcatctttgattcgactaataaatctttaattgtttttctgttttggtatttttatctaaattacgttgccataggtggattaggagccgaaaatcgcttgttaaagcttgagtgaaagccttccaggccattattttttggaaaaatcttacaacattatggtcgaaaaaccaatgaaatttgcattaatagtataataaagcaaaaacaatggcgacacggaaagtgaaaaattcaaaggcggatcttggccttttgatgctttatgcggtaaaaggagaaggaaaacaagagttgcttggatgtgtgtgcatgatgattttttaataaaattactctcgttagcccctggaaaggcaatttcatgaataaattttttattcacaatcgggacgcaaatgttcggggcgcaaatgtaggggcacaaatgttcgaggcgcaaatgtaggggcgcaaatgttccgtcacc

SEQ ID NO: 4580 - DNA, 1764 bp, Heterodera glycines
ttttgcgactgaaaacgagcaaaacgaacaattgtttatggacgaaaacgaaaatatcatttcaaagcttgacttaacagaacctgatgcttcatttttgcgttattaccaattcaataagggtgatcaaaatgcaaagtgccgtatttgttgaagtcaaatatcacgcaaaggaggaaacaccacaggaattaagcatttgaagcaacataaaaagtctttaatttatttttcatttctaactacttgttaagttatcactagagaccggcggatcgggactcccgcgggattttacgggagtcccgctcccgactgtaaaaatgcactagtaagaattgaatttttttggaaaaatgaataatttttgatcgaaaacttaaatatctagcaaaaatctcaaaaaaaaattacggcggcgcctatcggcaccgccgggccttaaaaatccttaattttcttaaaaaattggctcaaatttggcaaaaatttgtcatttttgaataatttattaacacattgaactcaatgcggataaaatttcgttgaaattaattcaattttccatagtaaatcatgaaaatgaatatattttaaaatatttttgcaaaataccgaagaaaacaaaaattatacgaaaatcattaggtcattttttagacaaaatatgttaacaaaagaaaacgttttttaaaaacaaaaaaagtcgtcgagttgctaaaaaatctgtaaaatttgccacagggcttgaaccctagaataaattataaaaaatttatttgaagcaatttcaaaacatttgcttctgtattcgataaggaattttcgtccaagctgccgcaaaacaaatgaatattgagcatttccatccgaaagaaaaatggcacaattcacactcgaaatacaaaaaaattgactcactaattttgcttttcatttgcctttcgtgtgagccattccgggaaaaaacggaatgactgagctttttgaagaagcgtgtccaaggtaatttttttctctgtcttattaactaataaacaattattagttacccgttgaaacctcgtgaatttatgacagaattattgaaagaagaataccgaaaaaactcaatattgtaaaagaagaaattggaacgagaaaatttttgtccttcactacagacttttggcaaaatctgcgcaaaaataaaagatttttggggtaaaagaatacatcaatacatctatatattattttaacagaatttaggtttgaccgttcatttcattgactcgcattttaaacgaaaatggcgtatttaataactcagccgatgccagagtcccacactaagccatatcataagtttacgactcaatcacattcttacagattttggaattgaaccaaggaaattcatatttttcttcgcgatgcagcttcgtgtatgatttgtgccgttgaagaacttggttacgaacattttgactgtttttgtcacaaaattcaattggtaacaaaagagaaaaataaatatatttatatttaaatttcaaggcacttacggacctcttgaacatcggactaaaagcattggcgaagtcaaaaaacagctgcacctttgcaggcctttggtggcatttttcatggaacagcagtctttcatgattaatcgaattatggaacaacaacgcccacttaatttagttcatattgattttcggatgtgaaaatgccagatttagaaatgctaaagaatctttcaaatgtaagaaatgatcg

SEQ ID NO: 4581 - DNA, 1937 bp, Heterodera glycines
  unsure (1)..(1937): unsure at all n locations
attttccactaaaaagtactttttcttttttaaatccatttattgatctcatcatccacttccatcatcctttgttttttcttcgttttccgtccgttcatttcgcttttttccgttacacaattataacataactaattcatttggcacctttaaaagtgcattgcaaatagaccttattagtcattcattcgacaagtttttgcaacttttcgccaaatcctttggcaattattttagtcaacaaaaataaatagattaataagaaaacaaaattaactttattcgttttcccctaaattgtggccaatttcgcattggccaacactttcttttcggctttcattgcaaattcaatcctttctttcactttgccccaaatgttctcccctcccccctcattttggcttcaaaattggccaatccgaatttcgtcttctttcgaacggaattaattcattgggcgaatgggcaaatgaatgaatggattttttggcatttgcttaacgccttcgcaaaaagacaattaaaaaaagaaggaatttgaggagggatacaaataaatgcacacaccaaatttgaaatcaaataaatattttttcttaaatttgatgttaacgacgaatttccgacttttgacccctcagggaaaatttatttttggccaccaaaggaaacagccgcagaattctcttcgtcaaaatgacatttgtttgcataacaaataaaaacattgctgctacaccaattgggctttcgttgctgcgcttttgcgatttaaaaataaaaataattttattttttaataattttattttcatattttaattaatcattcgttcgtcgattttcagtttcaattttcagcattccccccccccaccctttcctagctgtgattctctctttcctttcactttttccgtttcatttggccaagcaaatttaatcgttctttttttctgtccttttcctctgttgctttttcgtcatttcattttgcttttgccatttaattacttcgatttgatctccgttcctttttcccccggagatccgttgccttttttccctcttttctcaggcatttgccaaatgttcggcgtttcttttttcctttgcttttcccccggtaattaattaactgtcttttgatgttttgctatggcttcttcatcatcatcccttccattccctttttaatccttccgacttttcttcaatcccttcaattccgccctttccccaattttcatcccttccgccgccgccggcgatgtttgaccatccctataacattttgttgccatttaaactttcaattgggcaatttaatagttattggaatggaattgtgcaatttgccatccatttaattttttcaagtgctccacgaagaaggggaggagactgagctcatttaaacaggaaactttcatttgtcgggccaccactcacaatcaacaacgagactcactctcgatgccaattagcgcttcagccactaaataagccatgccatcatttcatttcgtccactcattttgccttttttccattatctccattatctcctcctccgttttctttgccacattcccatcaaaacaaaccaaccgttcatttcccctgaagggatggcacagaatccaaatgcaaataaaccctttgccccccccgccccctcaaaactctcaacttgcgcacaataaatattatttccgcgtcatcccccgaggcgtccaaaagggcaaatgcctcaaaacattcaattcgatgtgcagcaaaaaacattatgaaaagcaacgaataaaataatattttaaaatcattgaagggaacaaattgcaataattanaattaattggagtgcattaattatgacggacaacacaaaattagcagccaatgggacaacggacgaagaattaatgagc

SEQ ID NO: 4582 - DNA, 8553 bp, Heterodera glycines
  unsure (1)..(8553): unsure at all n locations
ccgcgcgcgtccgacgcaaatgccacggtcactctgctgaccagcttgaccagctcggacatntggtttgtgtgtttaaagcgaatggcataaagcaaaagtgatgctatttccacaacaggtcctgcattgtgatggcactgtcactgctttacaacagttatttgcccattgtgctccaaacgcgggtggagccatgtttggcactcagtttggaggtgggccatggcacggggcattttggggaaatcactttaaaacttccttattaattgcaaataaatccttctgaaacgaagccaaaaagggcggatttatttttaaaccctatttatttgttcataatccattggattggcattgaaattatattatataatccattggattggcacagaattaattttctttcagatgcttcgcaccggcgggcttctcaccggtttgcattatttctttatttttttggcattttgtccattttctattttgaattttgctaatttcagctgcccttcatcttttgctcatcgctctccaccactgtgtgggcattattcgtccccattacaacaaggaacaattgcgccgttccattttggcattttgtgccttcgcttgggtggtgcccacggccattttgtggctgttagcactaagccgaccaaatcagggcttttggaactgcgagcggcccgacttttactacacgagggcattccgttggacagtgtccacactgctcggctcaatcttttgtgccattacgctttgctatgccaaattggtcggcttttgattttggcactttcccttccctttaccttttcattgccaatttgtttttctttagctgtgcattctgcgcacccaacacgagaaatggccaaaacaacaacaatcgcaacaacgacaattgcattgtcatcgcccgtcgttgttccgcagcagcagccgtcgccccaccacggactctgccgcgccgtgcgcggaagtgttgtcctgcggctccaagcggcgacgccgcgagcggcgtacgctgtggacgacactgctgatctgcgccagctttctgcttggctgggcgcccgcctcgctgctgttcgcgctgacctgctccgactgccgggtgttggccagcccggccaattaccgcgtgctgttcgctctcagctgtactcagttggcatttctgctggccaaatcgttgctcaacccgttgatctattcgctccgtatccctgaagtcaatgcgcacattcacaagtgcatggcgacaaagtgcggcgcagtgttcggctgttgctggtgagtacagtaagggaagcgtttggctgtgcatggttaataccgtaagacagggattgaaaagactaagccgatggctattacgctccggtattgtgatagaaaggccgcgggttcgaacccaccgggcgcgtgtcctaggaatggcactttgagtagccgcactgctcgaggccacgagactgaaacgcagtcggggctaacttttttaacaatatgccaaatcctttactgtacacggcaatttgaagtttcaattgggcagtcaaaaaatgacctaattttatttatcgctttttaatgctttttcctttacttagggactccaaaaacggtcgtttccgtcctcggattagcatcagcggagacgcccaacgccgcaaagcgcgcaaaagccgcagccatttgttcgccgtctcttcgaattcgtcctcggcacacgaagacaattgtcagcacaacacaaaccattggggtaaaacggcggccgaaatggtcaaacggagccgacgaaagacgcgcgttgggctgccgcttttgagcgaagcggcgatggaaaacggaggggcgccgatgggggcggaagaggacgccgcgggggaggaaaagggggaaacaaagccggaggggacagtggcggagatggagccgaacagaaacaattccggaggcgaaaagcgagggaaaagcgagtgccaaaacagaggcagaagcaaaagcaacattttcgaggagggcaggacgacggcgacggcactgcaagtgtcgcaatgaaaaggcgggaagtgacgaaggaagtgggaaaacgaaagtgccatccaacggaggaagaaggcttttgaaaatgcgcagctaaatgatttgccgacattcacatagcacaacccaagtgctgctcgagagtgtcgcctcgggaaattctcggggttttcatggtttttctgtctccgattttgagttttgagaaatttagtctcgaacagcacaaaacatatacaaacgttgtttaatttatgtattcattttgtaaaagaaatgtaaattttttgtgttttttattttcttttttggccattaaaaattaaaatttgtcgccgtttgatttattgcaccaaataagcatcttaaaaagcattttaaagaaaataaatatgaaattggtaaaatgttttaaaaatcatttgtttgctgagtcatccacccttctgattaatttattatcactcaatcattatcatatcatttcatatcatattatcagctgatgattgccctttctcaaatgattttcccctccataaatgcttcgatgacatgcaaaagttcgaagcctttcttttggggcaccttaaaacgacattttttttaatttacattttttaaatataattttcaccatatgaccggctccacgaactaaaaattttaaaatttaaatttttttaaaattatgttttcttttgaattcgacctgtcaaaaaagtcagtccgcctttgtacattgtcttaaagccgcccacttggcctcggaaaagccatggcctggccgatttttccagctaaatttcgtgtaataataatttaggggggctttctcgtatttttacttccatgccgagactggcacaaaatttagagcccaaaatcaaattgcaacgcatgtctgtgtcgccgtagaacagcagaactggcacacccgccttcagcacttttttcacgtggaattcaacgccctctaaaaaaaattgttttttgtctttttaaaatttgattggcctacccaaaaaaggtaattgggcaataaatttaactcacttatcaattagggcaatttcttttgggtcaatttctcaatttcatcattagcatttctttttttcctctcccaagtgatttgcatatgatcatgatctgctgatcagttgtctcctctgtattgcatttctaatcccaattttggctttgtgtttatttaaatttgtcacttcccatggaatgcattgcatttgttaccgtatcccataaacccacctaccgtattgtgtcttgtaattgtggatgccccttaaatggatgaattaattaataaattattattttctttttttaagtgttttttgtttttttttttcttacccgcattcggcccactgatgagcattcggtgagacgtgcaaagcttcgcggactaaaaatgggaaaataattcgaaatttcaaattattcgccttttaccttccgccttgttcagatagcttctcatgtcgtagactaaaaagcattaacaaattaaagtatttactaatgagtttgcgtgggactgaccattttcgcactttaattccgacaattgaacgtcgctttcctccgacagaaactcaaatttcggcggcggggcttgtggccattttgcggccctttgcttggcaattaattggtccaattgtcggccttcctcgtccgggccaccgtctgaattgcgttttttaaatagttattaaaaaaaatattttcatttaccgcatttttggtaaatgtcataaacattcagtccataattgaacccggaaggcaaatccttcaaattgtggtgttaatatcgttttattaattaattatcgtcccattccgactgaccacgtccgccaaattgcaactgtctaaactttgttagtctctgattaattagtcccattttcccatttcttttaatcaccaatgtttcccgagcattgatctgttttgatccgctgccagtccaactcgtccaccattccgtgtgcgtaattgtagcgaattcgcgtgtcttgctccagcgaaatgttgtggtatccgttgccaattgccattccctaatgacatgattaaattttgattttttgcatttttttgttagccgcttttcccttttccaccttaaatttgatcgggtattccttttgtccgtcgacaattcgttcggctaatgtcggcagataaatgccggcgtacgactcgcccgaaatgaacatgttgtggtcacggaattcggggaatttgatgaagaactgcttgatcgcctcgtaattctcgagggatgtctgttgagaatggttcactaattaattaattgagttaattgatttaattgttttctttctttctgtttttaactcacactgtcatcgctccacgctttgtctttcccggccaatgaaaagccttaaggtaaatttgaccataaacttcaaagttactgctgctttaccccctccccaattaatcataaaatttccattacaaagagacggaataatcaaagaaattttttcataattacaccgccaaattcgaaaattgactcttcatctgtgttccaaaatagttcaacaagttcaacgaatgaccgatcacttaccaactccggccggcccttccatgtaaacgaccgatgcctttctgttccatgcactcggatttttggtgatcgtttgtccgtccgagctgacctaaaacgaaggggaatccgtattttattagcttatttaaatataattggcattaattgaattgcacttgccaagtacggcccatgttccgacaaaaggccgagcagtgacgaacagccggggccgccgttgtaccaaaagatcaaagggtcgtccgacgcatttcgctgcgaggtgaccagccaataaaagagctgatgctcctcagaaaccttcaaatagcctaaaaacccaattaatataatttgtttaatcatttccataattacccgaataatgctcaaagtttggcttaaagtccaacccgggaagatccaaaattttgtccttattgttgaggaattccgtggcgacagcaaacgaagcaaagaaaaggccgaaaactgtggaagaagcagcgaaatgccgcatattaaaagcttaacgaaaataataatttaaattgaaaataaaatccacaaattttgcttatttttagtttttatacttttgccgccccggcgtatttaaaaaatgtgcacttttatgcgttgtaacatttgtaaagcagtcaaaaaagaaggcaaactttgcgaatttcgtcaaagaaattggccataaatttgtacttttattatatttttcgccgcttttttctgccaaatctccgataagtgcgcgaaaaaggcaataaatgcacaaaaaaatattattgagcattgataaatgaatgataaaataaatgcttattttggaaagctaaataaatgcaaatttaatttattcgttgaatttagggctttagctcactgaaaagaagctattttaataggagaagatcagctcataattattttttgaaaaagaaagaaagagaaagaagatagatgctgagagaggtgagataatgggagagagtgcgagagaatgagagataggaagactccgatcacctttgctgattatcctaataatgttctccgatcacttgaaagtgccttgcgaagcctttgattggatcacttccattccctcccccgtgggcaaaagggcaaatcgacggcaattcgcaattcgaacattgcgttttatacgcgcagcagacgtgtgaaatggaagtgcaaagtgcgcaccgattaatcattactatccattcgggaacagaacgggagcagttaatggacggacgacaaagtaccgatcggaagaacgacacaaaggcggcgtatcaatggtcagcaaatgcgatcggagggggggggggcgaagcgatcaatcactgatcactactaacaccaacaaatcactcccattttacgcccttcccttttcaggtcagtccgtctgccgcgccattcgccgccgctccgctcgaacggtgcctatttatgattgcataattagaataatattaataccaacaataataacagtaatagtattcattaatctttacgaatgcgaaatcaatgcctaatttttagtaattataagcgtttaacaatttaaattgaggaaaaagcgatgaatgaataaaaatgaatgaataatgaatgaataataatgaatgatgaatgaattgatggtaagcttttattgttgaatttatttttcttttcaaactgtctgaaactgaaatacaaaaacaaattaaaatatttcacctttatatatatatatttacaaattagatggcttccgagtttggttccgtatcaaaccgaagagccaattacgagaaaccaaatcagagaaatgaaccgaattgaaagtgcaaaaggctaccggagaacacgagagactatcattcttttgattttcacattgaaatgcattctgtttgataatgtttttgcaaatgtttaaaccttttcaacaatctacaatgtttctacaanattatttgncaatgtttaacattttaaattgttcagttttgcaacacaaaaacgtgaaagaaaattcaaaatccacgtaggaatacaaaagtaaactctaaataccattccgtaaaaatttacgtgcaattggattttttccttcatgtttaattgcaaaaccaatttacccatatgaataacgaaattccaaggaaatcctaaaacccttataaaagttaaaccgtacccgtttaaaaaaaccgccaaaaacctttaaaaaaaaacctaaccccccgttaaattcccaacctccggaaaaaaccaaaaaatccccatttatacccaaaaaaaaaatttaaaaaatcccctttttccactttttttttggaaaaccccctttcccctttttttttaaaaaaaaaatttttttaaaaaaaaccccaaaattttttttttttaaaaaaaaaaaagtttctttttttttattaaaaaaaatttggtttgttgttcgcaaaaccccccccccctcccccccccctttcccccccctttttttttttttaaaaaccaccccccccttttttataaaaaccccccccccccccctttttttttttttccccccccccccccccccccccctttttttttttaataaaaaaaaaaacacaaaaaaaaaaaaattttttttcccccccccccccccccccccccccctcttttttctcttttgtgctgggaggggggagttttttttttttaaagaaaaaaaaaataaaatttatattaccaaaaaaaaaaaaaaaaaaacccccccccccccccccttttttttttttttttttttttttttttttttcccccgggcgggtgtttttttttttttgttctttttgtaataaaaaaaaaaaaaaaaaaaaaaaaaaaaaaaatactttttttttccccccccccaccaaaatatttttttttttctctcggggggggaaaaaaaaaaaaaaaaaatttttttttttttttttttaaaaaaaaccccgttgtttttttttattttacaaaaattttaacacacaattttcctttttttttaacaaatttttttttcctttttttttttttttcccccaaaaaaatcctttttttttaaaacaaattttaaaagggcggaaaccaaaattttttttttaaaagtttttttaaaaaaatttttttccccaaaaaattttttttttcccttcccgaaacccttcccccggggaaaaaatgggaatcccaacccccctgattttttatttcccgtactttcggatttccccatttttgggccacttttttttccaaaacaagggctgccccccgaaaaaatccttttgattcgcttttaaattagtcaacataattccctattaatgatgcaccttttagtgacgaaaatcttgaaaatagttacttaaaatagtgagtaanaatgccaaaatagtgaccaattagtggcaaaaagtccgaaatagtgacaaatagtgacntattttcagccaaaattaagcaaaaatatttttattcactggttgcagttgcaaatgagctacatttcctttataaaattctcttagcaaataatgatattttttaaatcaaaaattttgtcaagaaaaaaaattttgggggagaatttttgaaaaaattttccaattcttagtggtgtatttaaaaaaaaatttttttggtcgattcttaggagtgtattttttgaaatttttttagatcgattcttaggggtgtattttttgattttattgcattttgctaataaaatctctgaaaaatgtcgaaatagttaaaaaatagtgataaaacgccanaaatagtgaattttcactattttagtgacgaagcgt

SEQ ID NO: 4583 - DNA, 1831 bp, Heterodera glycines
  unsure (1)..(1831): unsure at all n locations
agatcacgtcccgcacccgnnttctattccttagtcagagtttgacattttaaaaacaaataaaaataaattgttgcttttgctaggaatattaatatttaagtatctaattaacaataatatattaaaattcttttaatctttttgataaaaatacccagatacgcagccctaatcatctcattaagtgcttttcatttgttttattattttgttacaaatcttcagaaataacaacagtgaaatgggtgaaaaaaaataaacaataacaaaaagtttcggcaccacgtcgcctcgttgtctgtcctcagtctgtccgttcacttcacatcctttcgatgggctcaatgccgagcaaacgcatgccttcgcctagcacttttttggcagcagataaaagcatcagacgcggcagtgccaccgcaattgtttcatcctgcacccgaagggcggccatcgctgtgccaatttcgttgcacagtttaagcttaaagtgtggcacgacgcgtgtttttattggaaaagcattggcagaggttggactcgagtccgtcatcaccgaccaagtaaatggccaccggattcgggtccatcttcttcatcgcggtcagcaacaccgtgtcgaactcctgaatgcgccgagccaacttctgtcccggctcccgcatttccatgttcagtttccattctccgtccgcgttcaatgcgcggatgcgttccatgtgctcgtggtgggcgtgctccagcgaacagagccgactgaacttctcctgaaacggcaccatgagagtgtgcatagcactttcggagatagccccgaaatgattcgagtagagactctcgaggagaccctggggggacgtacatggagcagcaaagcgttggtgccacccggacgaaaagagttgcgaaaagagaaagtgaagtgactgtttcgatgacggaagacaatctaacgaacggagggactcaaacgcattgtccagccaaaagtcacggacggattgggccaattaacccaatcaagcaaattcactaacatttggggaccattcacacaacttttagcatcgatcgaagggccaaccgttaacatatcaataaaagtctcccacatattccaacggtgctaacaccagaaagagcagcgtcgactcggccaaccgtcggcaaattgtgcccaattcggccggctccgcgcgcatcgtcggcgacgcgtgcacatacgcatccgcctcgcgcgcgccctggtcaatcagaaagtccaccgagtcgtttttgccattgcgcgtggacagaccgatgatgcgaccggaaagaaatacaaatttaaatattgatcaataaaaggcgccgtttaaatgttacaattagacgaatattgaattttgtaaagttgacggaaaacaaaaaagatttattgtttttttaaataaaaaccgaaagagacgtgttccattcggtccgccaagtcgtcgtcgccacggacgcgcagcaaaagtcgcaattggttgaagtgattggtctacgaaaaggaataataaaacacatttattagaagccaatgaatgaatgacctggccatagtccaccaaatagaaatatttgtccgcgttgtaaagacgatgtcgcgcataaatggaagccaaatctctgaaaaggggaaacaaacgccgataaaacaattaataacttggattgtgaaaacacaaagaaaaaaagccggtggtgcaaccatcgaaaattttgtgaatttttttccgatggcccttaagataccattgcttcgcgggaatctaaggaaaaatgcagaatttcgggggatttgaag

SEQ ID NO: 4584 - DNA, 1905 bp, Heterodera glycines
cccccccccccctcccttttctcttcccaaatggcccatgtgaaatgtcttggcaatgttcggagaggaaaagtcgatgacaattcgctgcttcgtaatgctgtatttggacaacagttccgcgaccaagtcctggctgaacattatgcgacggaaggcggccaaaagcatttcggcaaaatgccaaagaaatttattatgaaaaccgaaaaaaataaatacaaaagccaaaaaatcacaaacaaataaatgaaaaagggattggataaatagccaaacaagcaaataaaaaaaatattaattggtctgtccggcattttcattaatttgtaaataaatctcagggattctagcccggcacacagaaaaccccttgaactcgtaacaaatgatggaccggtcaatgacggatcacagcggaaagggcaattctcaatttcctcatttctgttgcccggacacaaagtcaatggccacactgttgatacagtatctctgcccaccgtcggccggcggtccgtcatcttattgttaggttttgatgaatttgcaaatgtttaacggatagtttacaatttcgtagtaataaaactcaccgaatacatggcccaaatgtgcgtcgcatttggcactaaattatgggaaatttaaacgaaaaggaaatttagtaatttttagacatttaccatcgaacttcgattcgttgacggccgtacgaattgtcgggcagtcggacaatgttttgatcgtccccaatggacttggagaaggcgggccatctgcgaaagcacaaattttggaaattcaattcaatttttgacctcttacccgcaccccgagttgaacttctgctccgacacgaacagagcggcaccacagcacacgcaagtgtatttacccccggctacgaaatgtttgtcgaattttccggtgaatggtgcctgttttttatacatttcggctaatttaattaaatgcgatgatttttcacggtgcactcggctttgcttttaagttctggcaatggcatttctccccaccccccccccttttgttggcccacctccgtgccggactgccgcgtcacttcaaacgcctccggcgacaacactttgcgccattcgtcctccgtcactgcctttgggtcttttttagcaccttcaagccgatcaatggccggcgtttgtccatcccccgccttttggtggcactgcccaccggcggattgttcagaggacgaagccataaaacagggaaaagcaactgtagaaaaatgggaaagcaaataaaacaagagataacaaaggatggaatggaaactttaggaaacccgcaacagattaacaccaaaaacgccactcgtggattctgccgttttagataaatgatataacggtaaacctgagagtttgaaacgaatgaccccccccccccccgcccacgtccgacacataatttaatccaatagaaaagaattgacctgccggcggaacacgaaacgcacggccaaccaaatgggaaaacaccggacgaaaaatggtgaaaaagtcgctagaacggctcaaagatatacaggaaaacgtgactcaagcgacaaaagtacaagcaaaataaacaatgtaaaaagtccatatattaaaatctttttggtgtccatttttatacagagaaaattaattttctgggaataaatatagaaaaatagtgacaagaaatttatgtcaatcaaaattatgcactcaaaaaacgaaagaagaaatgggacaggcagagttggtcatcatcataatcaatcagtacgggcagtccttggttgcgaattcggttggccagcctcaagaaacaaaaataaaccaaatcatggcgtttggacttaccacgaagtttgcgggtcgccgatgttcc

SEQ ID NO: 4585 - DNA, 1319 bp, Heterodera glycines
agcggaaccatccgaagttgaggcagcaaaggtggaggacgtggaggaagacggacactgaatttcgccgttgtcattcagccgcttttgactggacggacacggcatgtcgccgttgccgtcccgaatcattgtcagttgctgttcctgaaattcaaatggaaatcaagcaattggaaacaaaacaaatttttgtgctttaaccataatttatgacacccagcagtggaaaaatcccgaaaacctcagaaaaataaaaaaaaccttcagttcctgaattttgttctcgagcgcttctattttgcgcagcatttttgcgtaggaaagttgagcccttgcccatttaaccattggtccacaagcgacagatgcccgattgaccttgaattgttggatttgttattttattaataatatattgtaataacggaccttctcaaattcccattcagggttgccttcatactgctccattttctccataatttccggtgttattgaatccgtgttgaattgaagaatgcgcgagatgaagtcgcctttaaacatcattgcgcggatggacttccattccgtttgcgtttcgcccaacaacaaacagatggcttccatggcaattttcaccgcatttggaggcgatgccattgagcgcacttctaccaattgagcttttctgattcccgcaatcgcgctcttcgctttctcaacttcaggtttaacctgaaaagaaattctaactaaattgccagatttttgcaatttttagccaggcgacgacttttttcttctttaaaaacgctttttttgcgacgcgcttttttaaaagaacttttttttggggggggggggggtccggcggtggcgataggcgccgccgggaaaaattttgtatttttagtgccatttgctaccagattttgactaaaaaacaaaccatggccaattcccgttccacttcgtccttttttcgatcaatgcattgtttttcctctcggatttgcttcagcaacgtttcggaggtgcgtttctcggtttccgcctcgagcattagttgcagcttcgcattcagatggatttgttcatccgcaagttcctaaacattgttgtttttatacaaatttgaacgaaaatgcataatcacatcacgcttctccttgctcagcacgaatgaattgaccaccgcgtcgcgataggcaatttcagtgggcaaacgatcgcaacaatgctccagcgcggtaggcgaagtgtagtcggactagtcgatctcgcacatgctggtcagttcatgtccgacctgaaatagtgccgagttggaccag

SEQ ID NO: 4586 - DNA, 2757 bp, Heterodera glycines
ttactttttctgattaatacagggtttctttatgttcttgttcctaagaaatgttctgatttgggggtaatgccttattttcatctaaaagaagaaaatttctgaaaaatttggctaagttctaacaaaattcatataaattcttaaaattttccccggtggcgcctatcggcaccgccggcccccaaaattcctatattttttcttaaaaattatcccaagctcgcgaattttgctcattttttgtacaaaatttgttaacaaattgcattcaaattttcaaaattttcccggcggtgcctatcgcaccgccggaactctcccctcgcacattcatcaagtttttttttgaaaaatgtgccgcaagaaaaaaaaatttaaaaaatctgagttccaattttgagtaaatcacgataatttaatatagttaaaaaacgaaaatttatcgaaaaagtcttcattttttggtgaatatctgttagaaataaatttaaaattcgcccctatcggcacgcccccccaaaaaaaaatttttttttcttaaaaaaaattacccaaaaatccctaaattttggttactttttagtcgaaatctgtgcaatttatgtcaaaagaaatagtatcgaggcgatcaacaaataaaggaatgtggagccaaagaaatcattcttaaaaaatatttttttgtgagatttttggacctaattcaaagcaaacccccgcccccgtccccgcgggggcggaattatcgtgcccccgccaccgcccccgtgactctgacccccgcatcccccgcccccgtgaaaagccacccccgccccacggggctcgaaccctagtcagaagcatttgggattttgaatgtgtcgatgattaaatttatttctccattttcaacaattatttattttttttttagtacatttatactaataattgatttttccgcaatttttctattttcttttttttaatttatgagtgtcaatggctcgtttggacgccttaagcacttccaaccgcttcaattatcctacaaaaatggggactgaatttggacttttcaaaattaaagtttaaaaatttgatgtaatttttaggggcgccaaaaatcctatcttctctttcttaaaattatttgataaatttaaaaatttataattaaaaaaattttttaattagagttttctatttttaaaaatataatttaaaaaacttttattatggattccataaatagaatttaatataaataacatattaattgaatttcttttattttccaatttttggatattcaaggtcgatcaatttagaattgattattttttcttcgtgtaattcaactgcgttttcattgaaaacggtaagtgtgagcactccggctgtgaatttagacgatgtttattaaattattttaaaataatttttcattttttgataaattaccttcattcacatccacatttgccattttaacagttaattcttgtccgattttgaatttgatgttgtttggaaaaatgaattgagctttgttttcattgtcaatggtcattgttccgtcctgttgttttgccaaattgataagacactgtttccttgaaacactgagacgaatgttacctaattcgaaaattatgactttcaaaactttttaaaattacattcacaaagtccttcagttaattctgccaatttcaatggaattttctctggtcgctgtttttcagcaaatccaattcgagaagtgttggtaaaaacaaaagaaatattctgaaccggaaagcctttcttcgtgagtaagccttggagttttaaaacatatcccttaattttaaaaaatattttaaaaaatatatattttaatacacctttttgtcttgtaaaatatattcaagaaaatccgcaagaatattccaagcagttaattgagttttgttatttccttcattaatcattgcatcaatgacacgtgcttcgtttccttttgccattacagttctcacgggctttaattcgaataattcgcattcaatttcacttaaattttatttttttgttttagctaaaatccctatttattaacttacacaaactgttcgcctgcgcgcatttttttgattggcgttggaaaaaaaccatcattatcgagtgcaaatttctcacgcaaaaatgtgaaataattggttgtttttatcgataaaatttgatattgttccgcggtgatcagggtaattgtcgatccttcctttgcaattaattcataatcaacattaccataattgaaattcggaataactttttgtactccccaagtattaaatacatatgttttttgcttaacaataaatataatttttaattaaattataaatttaactttaaattcttgtccgaattctcgtgccattttttcgtaattgctgccccacattgtgatgttgataaaatcgtaaccatcgctaccaaccaatgtccaaactgattttccattgacatttctaaccgcatcagcaattacaattgtcaatttgatatcactaaatattaaatttatttcaacaattattaaacatttattttaaatatattgttaaaataattataaaatataattaaatgaattatttttaaattaaacttacatcattgtttcgccgatttttagacgcttaattggtgttaatttgttaattgttttttgcagacgattattctccattaaaaaaaatccaaattggtttgaaatcttaa

SEQ ID NO: 4587 - DNA, 3016 bp, Heterodera glycines
  unsure (1)..(3016): unsure at all n locations
tggtcacgcaattcttgtacatctgcaacgcactctacacatgcttnctgctcatgtaaatgtgngncagatttacctatacgtccggaaagtcggcggtcgcctcgcgcacttgcgagaaaatgtcccgggcgtccatcatattccctttgtgggccaagacacagcctttacaacagaaagtgttcatgctatttggccattctttgtgaaatgtggcattttaccaattccatttgctgcccaaatgttatgcggacgcaatttcaatgctttggcataatacgcaatggcacgctccctgtacgaagcatccttaagtgttaaaaaacaaattagcaaaattgtcatcattagcctgacaagcatatccaaccagcaaaacaaccttttcgtgtgtctttgacgagaaaagcatttccagccaaatgtttcctaatgccacgaagctgtacgcgtcggtgttgttggtcagtttgagaatgtgctcgaacttcttctgtgccggcccccactcctccttggccatgtgcatgttgccgatcagagtccacgggtcgggattgctcgggttgaccgacatggactctttgaagagcagcgaagcgttgtgcaagtcgcctttgttgcgcaccaaacagcccaagcggagaatgccttggagggaaaaagcgggcgcattggcaaaatgccattcaaaatcaaaatccaactcacaatccatgtaattgggcctttgtcggatgagtgtccggtacaacttctccgcctcgtcgtacagacacaactgttcgttgacacgtcccaagttgtagctgaccgtcacaagcagtgcggcggcctcgtcgttcaaattttcggcaccctccgccaaaatacaacttcttgcctcttggaaatatttcttaaaagggtcaaaaattgttaatttcatgtcaatttgattgccttcgcctcatccaattgattgagcataaagtgcaaagatccgatgttattcagaatttctgctggaatgtcgacaccaatgtcatctttgagcaaatttgcgactcgagtgtacaaattcaaagaaacctgaaattaaatgataaaataatttaatttgatttcttaaaatgaactgtcatcaggaagtacccgagatccgaacagaattagtctctgtttattttttgaaattctcttacttgtgggtcttgttgctcgagcagttgtgccaattcgataagtgcttccaccggtgccctttccgtttggctgtccacgagtttggtcagatattcgcgtgccttttctcttctttccacaacaattttcgggtctttatgcggcacatttgtgtacagtgaaccgagcacggccaaagtgtcaatgtcattgggcaccattttgagcactttttcaaaggcgacaatcgcctaataaagtaaagtaaaaggaaataaattaaaaaagacaatatttcatttacattttcatattcttcacgataaatgtaaatttggccaagtccaaaataggggaggacaaatttcggatgcgaaagagttgtggcctggtaatagaactgaaaagaaaggacagattgtgatcgaaagaaagacgaggaaaaggaacacctgaaatgcgtggtgatagtcctgcttcttatggtaacaacgagccttaaaaaagaagtttagaaatcgtaacgattttaatatgaaattgttttagtgttatttaattcgtaggatttcccctctattgttttttctcttaaattttcgaaaatttatgaaattgcctctggaccgctgccccttaaatattagacatttcctcccctaatcatccccttcaaaattatttttttaaaaactgaaaatatctttggtttccctgttgatggttttctataaaacctaaaattttacaattatttgttgaaatgtaaaaataataacgaaaaaaattgttgaaaatttttttcagaagggggaatgttgagggaacgagttattccttgacctagtcattagttgcccatttaccaaatggtacatgctctccgctcgcattgcgtcgttgtccgccaattgatgtgctgcagaagcgagattgtgcgtcttttcaatgtcctgaggaaaatcagtgtttatacaaatgacttctaatgtagaatggtttcacctgtttgtagaagaaatgattcgccaaatggttcaaaaccattggattttccggctcgcgatggtacgcctgccccaacgcttggattccgtttcgaatgccctcgggaatgccagaattcagttccaaaacggcgagagcgatgatcgacgggacattgttcgggtcaatttggagggctcgttcgaaggccaatctgtaaaataaacaaataataacaactttgtacacccacccattattgtttgcaatggaccaacttcgccttgtccatgtgccccaaccgcgcaaaacaatggcccatcccaacgcgaacgtcggccggactgtttggattttgcttgagacaccgtttgtactgatggagtgccgccttgtaatccttgcggttgaacgcgatgcacgctttgcccatcattgccggaatcacacggccttcgttgccttgggacttaaaaaggacagagaatgaacagcaaaaaatgactggcaactcttacctgattaattacaaaattgaactgggcatcggcctgttccactttgttgccctccaacagacagaagtacgctcgtcccagcagatggttctggtcgtacatgagtattttgtctgctgccgtgtacagcaaagtggcacgagtaaaccaatccttgcgcttctctcggttccgctccttgttgccctttttgtaggaaaaggataaaacacattcattatcagaagaaaaaacaattgggcaaggggaacctgcagcacgtaataagctgccaacatgtccaacgcgcgcatttggtccttctcatattccgagtagtcgagcccagcttcgtcgccact

SEQ ID NO: 4588 - DNA, 1685 bp, Heterodera glycines
gcatgccgtgcagtgtcgagcaaaagcaaaacgaaggcaccgctaaatcaagccaccccgcacgccgctttctcgcccttcagaatttgcaggacttcctccccatcgggcaattctgtgaagtcaatctcgatgatttcctaaatggtcatcattgcgcccttttccctttgtttccgtctcccttcgttttacctcttctgcgctgttcttcagcggaattacaatggatgtttttggcacataacgataagacattgcaacaaaataaaacaaaactgagtgattttaaattatagtgaaacatttggatattcaaaaaggtatttttcaatgcccaaacaaataaataaataaatacacattaaaaaatctgagtttttaaaaatcaaaaacagacaatcaattcaaaaaggataaagcaacgaaacaattgcaggctcaatataaatgccatgtttccatgccgaaataatcgccgtgaaaagatccttatcatcgaaaactgccaaatcaaccactgagtcccgcttaaatgacagttcctgttcgtacatctccagaacaatgggaaaaaggtcgagcagttccttggctctgaattgtagcaattgatgagggtcatccggtgatgtagaagtgtcgttagatgaagtggatgagatgagatcactcagagcggctaattttggtccaaatttacgtagacgaagcaaaaatgaatcgaattttgcaattgatgtgcagagaagctcagaattacgaagaatgacatcagtgatgaacatttgccgatgtaaatccgcttcattgtcagcctttggttgggataacttcgtacaaataattgcaattccaatattttttatacctttccgttcgctttcatacggtccatcatttgaattcggcattggcatatgctttccaaaagttcacaacaattctggttctctttgtcccattgctgcaacaaattgaagatggaaacgtggagatcgttcagtcgacgaccaacacccttaacgaaacgaacaatcaaatttatagcaaatataaaacaccaaccgatgaatttttcagaacagaaaactcatccatcctttaaaaaagcattttgtgataatcaaagagaacaaataatctacaaaagcaatataaaatggtagtgatttacctatattagtcggtaccaataattgaatttaagcactgataaaaaaacccaattttattcgggaagtaggagatcaatgatgaattaacaaaaagggtaagatcacttctcaaagttccatgtcttcctgcacgccagaaaatttatcaaaagccaatttacgcgcttcgaaaaaagccgaaataagtgccaaactctgcaatttttcagaacatccgactgccaagcgttgttcaatttgagccaattggttgcacaacaaacaaaacacatcgtcaggaaggtccaatggcctcaacagctcaactaactcttcgagaaggtccgtaagtgctaagccatgtgcaagtcgaagttcggtcaattctgaaatgataataggtagtttatattatgtctatattaaaggatttgactttgcatacaaaaaatctaaacaatttagggtaaccttcgaattgatgtcccgacggaaaaaaaagattaaaattttctttacatttttcta

SEQ ID NO: 4589 - DNA, 3735 bp, Heterodera glycines
  unsure (1)..(3735): unsure at all n locations
ttcgcgcagtgcaaaatgatcagaaggcattttggaccgaatcggtgatttgagaacaaatgaaagatcgncgcacaacagaaaagaggaacggagccaatggcaaagaagggtaggtnttcagagagcgcggtgcgccacgtaatccgcgggtgggattgggactttgagggacttccaaaattgcgggaataatcccgcgggaatcagtcccgcaaaaattaagagttctaatctcgcaatggaattcgaaaagttacaatttctgggtttagtgattaataaacaaaaaaaaacattaattggttcggctcgcgccgtaaaacggtttttttgttaatcaatctttggctttttgtgaattctttgattgtttaagcattggtcgacgaacaattcgcgcagttgcaaaatggtcagaaggcaattttggagcggatcggtgaattagagaaaaggggacagccggacaattacggtaggtttacgataagtgcattttgaattttgaagaaacaaagtttacgcaatttcaatttctttcattttttcagcttcaacttccaaggcaaatgaccaccaattcgcacaatttcaaaatgatcagattttcttcaattgctgggatgacaactttcgtcaaaaacaactgcaaatcgacaacttaaaagtcgtccatatgggaactagtaatttttccgaaaaattactgtcaaatttaaattgctagaaaattttctataatgaatatacaaattgaacagttatgaccatttaataatgtttaaatctcaatctttcttcaaaggtggtgaccgcactgtctttgccaaacattccatattggcggccgttccttcttcatctgtccttttttattttgagatttccatcataaaaatgaaccggcaggcgtatttattcattatatttttatatattcgaatacaattcggatattttttactgtattgattatttatttccatcattttgctctttttcagtaccgcctgctttggatttgccataaaaaatacgagaaatcttgctgggtcatttttttctgaagcgactgcttacgcgtatggaagcaagggcaaattttatgtcgacggtaccaagaccttcgcaaatcccacaaatgccttcgcaactggtcacacggtcggatgtggtgtcctggcaaacagggaattgtttttcacgaggaatggactttgtttgggttggtaaacaaaaaaaaatggttatttgtaatcactgctttaaaatacattgaaacacagccgggaataactaaaaattctcaaacttagaaattttgtgcttaaataatacaattattttaattcttcatttgttaagattcaactgcattttcgatttctctatctgctgattgtgcgttcctctttccattcgttactttgcttgaatctggtgacgaaattgaggcgaactttggacccgaattcgtgttcgatttggcaactctgatgaaataacgtttggagcgtgaggagcagcgaaagatattcaatggaatctgtttatgagtggctgaaacagaacataaactaaaattgttattttctaattgcacgaaaaaaagttgtgaaattttcagttagggtggtcaaaaatcgaaatttcttttggtggttttgcctgtgtacacgttgcatggcacatgtacacataatgggttacatattgtacaaatatgtaacttatgaatgtgtacatgtctcatgcaacgtgtatatgggtaggttgctaaaaacatttttaaatctttttttgaccactttaactgaaaaatgcctttttgtttcactgcctgtttattttttgtttgaagtaaatctttctaaatctactttaaggaaggaattttttgaaaatgtttcaaaaataggtaaaagataaatctgcttgatttttggaaagaaaattcaaaaaaacttcactttttgtcttctttggctatggagttttgtcaattcccgcatcatccacatcttgtgaacgaatttttagccgtttttcaccgctggtttatgattatcgtcgtaatcgcttaaacgactttttcgtcgtttgaatttataacgacgttttttcgttaaaaaagtcgttttgtcgttcactaacctggatccaggcctggatttttcctgggtccaggtcatttttcggcaacctggatttttcctggacctggatttttgtccaggaaatccaggtccaggtcagtttggaaatccaggtccaggcatgaaaaacctggatttcctggataaatttttttcgtctttttatggcgaaatgtattaaaaatgggtgtaaatcaaaatttatatttttttaaattttcacatgtaattaaaatggcgctatgtaatttcgacactgggtaaattcgacactgagtattttcgacactaagtaatttcgacactacattttcgacatagagaaatttcgacactgaactatttcaaaaactttcactgttttcctgcattttcggcactggaccatttcgacattgagtaaattcgacactatagagaattttttagaaagtaatatggaaaatttgaaaatgttagtacatatttatgataaattttcctgttattttctaattcgtaatcttaaaaaggtagatggtataactattggttaaatcaatgttagacaaatcaaatccagtgttagaaaaaatgattcataatgccaaatagcataatttaggccctaattcaaaaaaaaatactgatcagtgatcactgccctttttgcattggttgttttgatcatccataactcgcagcatctccaactaaatctgagaatctagtgatgaatagtggcactaaaaacgaaaattttttgaaaaagaatgtgttttttgtgcatttctcatcaaaataaagccgcagaaaaaattgttaaaaaactagaaatcctcgccctatttatcataaatatgtactaacattttcaaattttccatattactttctaaaaaattctctatagtgtcgaatttactcaatgtcgatatggttcagtgtcgaaaatgcaggaaaacagtgaaagtttttgaaatagttcagtgtcgaaatttctctatgtcgaaaacgtagtgtcgaaattacttagtgtcgaaaatactcagtgtcgaatttacccaatgtcgaaattaccagccacgatctggcggtgccgatagcgccgccggaaaaaattggattttttgtgtgatttagtaatagtttttacatcaaattccaattcataaaaatattggaataaatctcagaaaattttagattattgaatgttttttaaaatgcttattttcaagtacaacttgaaaataagcaaatttcaatttaaaaaaagccaatcgcttaaacaaattttctttataaaaattttaaattttgtagattaaatttttatgaaaatttttcattttttatgtatctattttgaaaattttagggtcgaatcattttcgagctcaaaatgtgttttttttttgaaattttttctttaaattttttacaggcttgaaaatctttttgctttttgtaatgctaattgagcatgttaagagctttcgaatgattccaagattgttggatttggatgccaaagaaaaaagctttagtggaaaaacttgctggggccgaaacgccagcgccgaaacgcgtgggt

SEQ ID NO: 4590 - DNA, 517 bp, Heterodera glycines
tgcaattatttaaaatgatgattgattggtggtgaggaaggagcctgtggaatggaagcttgaaatggtcagccttcattaggcggtgatttgccataaacactgtgcatactagagaccggcgcggaaagttgtgtcatagagtgaaaattcgttcacagaggttttagaagcactgatcacgattttgacatcatttcaaccaattctgaaatccatttcacaggtttaaagattgggcccagaaaacccagagggaaacctttctttttcaaaattttagtccataattacaggggtttttgagtcggggcacctaaactgagggtgtaaaaaattcttttgggtcaataaattgcagacaatgattcgtcagtgacaggatcattcgaatttggtttggtccatatatccgtttttcgaacttttattcacatacaatatatcgacaatttacacatcacaatggtatcagcacgcatataaatatatcgaatatttggcatcgtagatatgt

SEQ ID NO: 4591 - DNA, 2675 bp, Heterodera glycines
cccgcattttttggaaaatgcgggatttgcgggattactttcgcgggatcccgtcccgcaaagaattttgagttccagtcccgcagcgggatccgcaaatttgaaatttccggtctctagtgcataccctctattctctctatctctctctatcactttatatctttctctctctccccgtccccttctctatccttctctctctctctatttccgtctctgttgtcccctaccggctccaaaaacgaaatgacacaaagaagtgcatacaaaatgccaaaaatggcgcaaaaaccgagtacaaaagaaaacatttaaattgtccaaggtgttgctggacgcgataggaggccaaccagaaagtccaaatggtcggttgttgttagccgttgttggtggcaccgttgccggagcattggtggtcgattgggtgtttgccaacggggaagaaaaggtgattattattttttattttttttttgaaattatatttcgttttagaaatgtgattttatattaattaattaactaattattatttttttatgagttgagaatttcttaatttaagaaatctattgtattactagagcccgtatttttcagcaccaaaaaatgataattaagcaattaggtaattttcaaatcaaaaaatgctaaatcaagcacgaattaagcatgaaaattgcaaaataagcaccaaaaagcgaaaaaggcataaaagtttggtgcttttttggcaaaattttttatcaaatattataaattctcatttttcattttcgcactgacaattctcattttttagaaaaaattgaatttttgaatcaaaaattttgtcaagaaaaaaaaattctggcgatgaatttttcagaaaactttccatttctttgggggtattttttgaactttttaggtccattattaggggtgtaattttcgtttttatttcggggagaaggtattttagtcaaaatttaaaaaaaaatgtcaattaagcacaaaaataagcactaaaatgctaaattaaccacaaaaattacatgctcacaatcagcattaagcaccaaaatatctatttaagcaaaaatcagaatgaaagaatctctggttttcaaaattggtattaaaaagcaaaaattttcgctgctatcggattagtccctaaatgagacctttgccagaaaaatgattaaaaaaattttagtttggatcaggcccttagccagcagaggaggaagtaacgaagaatcccccccccccccccgccccccgccctcccggaaatgaaaaattaaaaattttcatgaaaaagatgggcaaattttaaaaattcttactaattctaacaataaaaaattttctatatcccattataccatttttttttgaaaatttgaccccaaaaatcgccaaaatttttgcgccgaaatgcataaaaaaaatcttcggcttccccgccccctccttatttttttttctggcacaggcgttagtggaaattgcagttatattactgttattcaatctgtcgtataattaattttataaattcgatatattttatggccagactcttcattgggcccacaacacaacagcgggtgccggcaacattgccgacggcaattggcacgcggcaaaagtgcgtcgccgggggcgaactgtcagcctttccattgacggcaattggagtcactgtagggctgcttaattacgtaattaggaaggcttttaccctgtttatgatatttcgcggattttatcaatttgtcaattgaaatttttcaacaacgtacaattttctgtttaaaattgaaaaaaaaagttcataattttggctgacaagaaatttaagtttttaaagagaggcagatttttctaaaaaaaatttttgaggtaacaaaatgctttgaaattttattcgctgattgataatctttattccaatgtattttcctggaaaatttcaaatcattctgacaacaatagaaaaattttactaaacaaattgtttaaactctgtaaaatatttatgcccaaaaatccaggccctatttaattattatgcctagatcaactgaacaacatccaaaacactgttctgtccatcgacgatttggtgatcggtgtgccgttgggtccgcctcgtttaaaaagtagtttttttcaccgaggatttcttaaaaaattgtaaaattctcatttttttagaccaaatggagcattttttcaatttccatggcgatttgcgtcattttactatgaacggctttgacttgttgaagctgtttgggccaactgcaacagctgtcgattttggaagcactaaaaagggtgggccaaaatttgttaaaagccattccaaaaaatcttttttttcttttttggcattctgtttttaatttttccacccaaattggcccattacccgtcgctgaatggaaaatgccattttacctccttgtgccaaatcctggggccagagcagctactcatttaaatgcatatgaatggaaaaccgggggacgcccaatttatattttatggcttaaacaaaaagactttttggcatacttttgcctaagagcttatgtattatttttatttttaaaattatttatttttataaggggaggtttatatattttaatatgctgaatttaaaacggaaa

SEQ ID NO: 4592 - DNA, 4011 bp, Heterodera glycines
gatgcccaaagggcctcagcattctttcttcatacaaatctattaggagggccaacaaattgcattgcacaagttgttttttcttgttttttaaaatatttttgtgttcaatacaataataatattattacacaatatttatatatttaaatttctgaaatatttttttaagttaaattacaataataaaaacctttgtttttatttatttttttatttttattcttgggttaacttttggacagtcaaccatcggatatatagttaagatggggaataaatcaaatttcttttatcctcttgagacaaatgaatcaatggataaagctgggttaacggaattatttttttaggatctgattttatagaaattttcaatctaattgatttaaaatcagaatttcttcattttttctagctaaatatttttcgtttattttttattatttattaaattattctgctttaaataaaccaggatctggtgtccagcagcaaaattcagatcaactacattccgcaaaaaaaattctggattggaaccctgatttttatgagcctgatccggataaattttccagaaaatatccggggctctggatctgggaaaaaagattaatccaggcatgactccgcttgtccatattctaattattaaaatttattttacctaaacattcatctccatgattttgtctcgtccaaaattttctcaattttagtcccccgcccaattttccgaaatcattgccaccaaattttcacagcggccaataaatatttggcatccgtcaatatgaaacaaattttcgagtggacactgtgacgccaaaagtggccaaaactggcctctggccatccttctctacctcattattattcacctccccccccccccgccccccgctgacccccgaggcgaaatattttcctcaaaagtgccgggggcgctctgctgccgaaggcaacgaattttgccatatgtcgtccacccacttcaattcaaaattctctcaccacagggcatcaaaatgatgacgaagctgtcgatgatgatgatgatgttgttgtcggtcgaaactttggcacttattgagcaaagtgccatggaattgggacaaaattggaattaatattttgctataaaaccacatataccatgttcttatacaaaatcaaagtctctgctattatttaaattttttttttattattttagttcgacatttatttatttttttttaaattatatgcggtagaaatttgctacttgaaatttttcaccatgaattcctaaaacccactgccctgaaattttccaaacctatcccatttcgatgtacaaaatttttttaagcattggaattctgtttttcgatttgcctattttctgccaaagattttgtaagacacctggggttttcggccactccttacttataaatttttttcgcacagaatttgaaagctttaaatttaaactcgaaatttttaaatttattatgcccttttcgggtggtgccattttgctttggcattagctggcattattagttaataatgccaaaaataaaatgccgatctgctgtgcatcgttagctagaccatccatcttttttggcattttgcgagtgctgctttctcacaatggcacctttccaccaccgcagacaaaagaaatgtgtgtgcccgggggcataacatcaaaaagtcattgctcatcatcctcatcatcccctgaggggagctttatctgtgcttgctcatctctctgacaaacggcggaagggcatatgaagaaatgccaggggggaattttgtgtttgataatccctcctgtgccgtgctggccccggcactttttttaaaaccgttatttgtgctgccattttaaaaattttcatatgccattttcctggtgaatattttgtttatttacttctctgtttatcctgtctgaattttttttttattttattctttcttcattagaataataaaataattttaatcactttataattatcaattccaatttttgtgtaaaaattttagaaatttttaattaaattttaatttggcgtttttttaaattttagtttaataaataatttaaatttttctttaatctttttattttattttttaaatttcattaaaaacggcatattgcaaaaaccttaaaatttcataaattaattgcattttttaaaattaaattataatgtcttttggtgtttttctaaatttttagtttaataaataattatgattttttttataatctctttcttttttaaaaataatttcattaaaaattgtaattgcaaaaactaaaattgcataaattagttgttgcactttttttccgcccatcaaaagtcgatcaattcctaaatgggcttttagctgctcaacctttgtttttctcgtcttctccaatttcttttcaacatttggcacgcaaaattgtgccattgaggggattatccattatatgtgggtggggtgtgccaatgccgtcgggcgcccccggacgctcattgtgagaaaatgtcgcgcgcatttttaacggggtgtgcggccccggagggtgggaatgatggatgggcaatttcaggactaaaaaatacatattcccccgcctaaaaaaattagttaaattttatttatttatcaatttgaaatttatttttttttaaagatacacaacgccaaaacggcgttcagagcactgaaattattcacgacagcaccaccaccacacaaaagatgatcatgaccaccaagcagcatcgaattgctgacaaatatgaggtgggttaattaaattctattttgttaatcatattaattcctaaattaatccttacaaaattaaaaaaaaaattttttttaattcacagtaattaatgtcacttgttgcaatttaaattcattaacaacttaccaattcccgagaaacaattaacgaataacaaagaatggacattttcacatctttttaaattgttcattattcaaaagaagggattttggtatccaaaataatggaacataaatttttggaacttaacgaaattttatgacttaagcctattgaatgattacaagaattaaaaatatggttgcggttgttttttttttgcaaagatttataagcatagattttttattttaatttttttttgagcaacgcccattttgatggttttagagtgacgtcataacatcaagaatattaataagccgcctcctttccatatttggcacttttacgagaagtgccaatgccaatttgctttcctatcaatttcaaattcatcaacatgcttgcttcttctctgctttgctgggtcacacctcttcatttaggagggggcggggaggcgggtggcacccaaccgaaaaattgggtcccctctcaagacaaagtggtgacggcactgtttatgttttttttgccaacccatttttgttggcacaataaatgctcctcctccgcgggagggcgctgtgtgccgtcgccgtcgccacactggcaaaagtaattaggacaattcgtttcccgctcctccccgcacttgacaatgagggacgggacaccaccgcgtcacacgccgtgccgttgggggttggaaattgtggcacctgataattgtacatttgtcataaagttttaaatcacgctggagaggctttttttggggtgctagatcattccgtaaaatccgccattttagctatttttgcaacaaaatatggcataattttgtttaaaagtaacaaaatttttatacttggtattgttcgatagcccagtttttatctattataaaatttcaaataaaattatcaaatttaatataagttatggcagaaatagtacatgcttatacaattttttcgaaagttgaccaaatttttttgaaattttgcaggtaaatgaagggaaaaaaaaatctcgactatcgaagggtacaaagaatgttaaattttattacttttaag

SEQ ID NO: 4593 - DNA, 3194 bp, Heterodera glycines
aattgagaatttatttaaaaaattattagattttagctcgggagggggcctcccttggatttttatgagttcgtaattttcaaaataagcctcaattttgcttctttcttacccatagaatcttggggataaaccttcttttttttggttaaatcgcgattatttagatttatagttagaaatacgctttaataagcactgaaaatgagttagaacttccttaattttttgtgccgttttttctcattttttgccaaatgctggagttgatatacatttccaaaaaatgaacataagcaataaaatacaaaataaataaaaaactagtagttcaaaaaatatggccacatttttttgacaagaattttgatttaaaacatgtatcttaatacgatttgtcctaattttgttgctttttgaataaagttttgttaattagtccctaaatttataaattaatgtacatagtaatattctcttcttattctggtaggtgccttggccgtggcgcatttggccaagtgtttgtgtgtttgaatgttgacacgggcgagcagttggtggtcaaaaaagtgccattgggccacacaaattcccggcatcgccagcgtgtgctggccacattagagaatgaattgaacgcgctgggctcgttgcgtcacgcgcacattgtcaattatttgggcgttgtgcaacgcaaggattgtgtgcacattttcatggaattgatggcgggcggctcgttgaaggaccaggtggacaaaacattctattgccaaggggggaagcatccctcgtttttcgacaactttttatggcattttctacttagcgcttattcattaaaatgacatataatttgctattttttcattgggattttatactgcaaaattgatggcaataatacacacacatgcagttaattgttcattcaagcgattaatcctttatcaataatcctcaatcagatcagcgagtatggcgcgcttggagagccggttaccattcggtttaccgctcaaattcttgacggtctcgcgtatttgcacgcgcgtgacattgtgcaccgggacatcaagccggcaaacatcctacggcacacgcatgcgcacgtcaaaattgccgattttggcgctgcaaaatttttgcaggccatttgcagtgaccagggcatcgatattcaggcacaaaatgcgcaattaaataatttattaatttctttattttataacacaaaaaataacttttttttcctctttgactgaattccattaaaaacatggtgtcattcgatagctaataacagactctattagccctcggatttaatggagcctcccgttggcaactctctgctgaaaatttaatggacctaattaactcaatgtgtctactacaattttgtcgtacgttttcagggcaccccacactatacggcgcccgaaattttgcgtgccgacaattgtcgacaatttgaaccacggtcagacatctggagtgttggaataactgtaagcaaatgcaaaaaatgagcccatgagctatttctaaaaatattaaattttcggtggtggaaatgatgacaacaatgacaccatgggcaggcattgatccagcagcggtaaaaaaatacattaggaagggaaatgggaggggatattgtgtcgggacaattggtcaatggacaatccatcaatactggacaatctgatagaaaattatatttttaagaggctgaaataagggcaaaaaacagtaaaacagagataccaaaattaaaagaaaattcttttactaacaaattgattttcgagcagtttcttcatttgtctttcgaacgaaaaattttattttttgggatttttttattgaatttttagggtgcatttttcaaaatttttgatagttcgatagagggttcatatttttaaattttttgcattttgttcaaattaaaaaaagcggaaatgaggcacgtgctttcgcttgaaggaaaatcgtgtcattgaccgagagtctcgacaagcaataaacctttattataatcttatttgtgatttatgatcaggttcaccttcgcattgtctttgctcgacctgatctcagctcattgcccgatggtttatcaacggcactgcgtgcgtcaattgaggcaatgcttaatagtgagcctgatcaacgaccacaggctgtgaagctactgaaaatgccacctttctgcgattgagagaaatgccataatatgggacaaggaatctgaaattcacaagtcaaaatagttgttaaaaagtttcataagcagaaatagttgctaaaaagtcgatccaaatcgaaaagtgatcgaaaaaaatatgttttttgcgcttatctcagcttatgctacctgcaaaaaaaatagatgaaaacctaaaatccgttccctgtcaataaactattcacatgttaaatcaatggccaatttcactttgtcctcgtcgttgttgtaaaagaaaatgccacctttctgcgattgagagaactcaatcgcaatgccataatatgggacaaggaatgtgatttgatgcctttgtttttcgggttcaaaacaacagcagccggtgattcattcattgtctttttcatttggtttttaatgttaattcacttaaaattaaattatttgctatgtgtacaatttatacaaattcatttactcaagtgagggagacgtgttcggggatcctccagacgacttaccgtatttgctctttttatatgccatggtatattatttttcaacctcctcagaaaggggtagataattggagactggtagactaaaggagactgggagattatttttcggctgatttatttagtggaaaatttttgaacatgtcgccaaaaatgtcatcgcgtcaaaaaaaaataatttttattacatttttgttaaagaacttctgtaaattgaccccaaaatggcaaaaatgggtcattttcttgcttccggtatgcataaaaattagaaaaacgaatgagactcgacggagcaggtcgcccagttcaccgtccggacatcaacactaaacttgtggaaacggtttttatccctggcggctgcaccaaattaggtaatcctgcagaattgcggtcccgacgaaaaataaatttaaaaattttgttcttatctttcctggggtaaaagggggtac

SEQ ID NO: 4594 - DNA, 1212 bp, Heterodera glycines
attctctcttaaaatcctccacaccgctcttttgagagacaattcgaagtgttgccgaacatttgcggctccaatttccatcttaaagcaaattaaatgctaattaaatttatatatattttagcttatttcataacataaagaaccatgctcgcctaaatttatgggagtcgacgttcaaaagctttaataaaaaaatattagtgtttgttatcaattatcatgttaatctctccaagcgcatgtattgaaacattttaaaattctaaagcaaacctttttcagaagcgtcgcacaaaagaaaaaagctcaaccatttcgcagtgctttcattttaatttctgcccatattttccatggcattctctttatgtacacagttgatttcttgtgcaaatttcgataatttttcaatttccatcgaaagtgtgccgttggatttggatcggaattctccgtttttgcctcgtccacaatgacataaatgaccaatttcactttgtcctcgtctttgttgtaaaatcctttgctcggatccaacaattccttaatttttatgatttaatttggaaatgcaaagaagtaagaatttaattgtgaaaaataaatttgattgaattgtcactcactgcaaaactaatgaaatcatgaaatccaaaactgtttagttctttattataaatgcgatctcaaacaacgagtctaaaagccgaaaattttcgaatttctattttgtctaaaacttgtctatgaataaatgaatgtttaaaaaatgtatgtgaaaagtaccaggtaaacttaataaggaccttaaatattcattattaattatgagcagtggacaaaatttcaatattttttcaattaattcaatcaaatttaatttcgtaaataaataagaaaagatgctaaaaaattaaaaaaagaatttagtaaatgtaattcaacttaaaacaaaaaaagtaagtttttaatgaaattaattattttttatcatttaccatagtagttaacctacagctatcttcgtcatgattaattgcttttgaagtgacagctggcctttgaggcgtgccgccgcgcgcgggtttaccgcacgaaggcgtgcctgtggcacgggttcgtgcgggagggaggggtgcgtgcgagagtgaggggggaggcggcgcgcggttttaccgcgcgtgtggcacatgggtccgaaagtggggg

SEQ ID NO: 4595 - DNA, 3401 bp, Heterodera glycines
aaaagtttttgccaatggaattctgtgggggagggggtgggtgattaatgatttgttgtatgggaggggggggggcttggtggttcgcagcgcagcagcgaggaacggcgcgtgcacatgtgtgtctgtgtggtgtgtgtagggagggttagagaaatcattagagagtgaaggtaaaagtgagagagtgagacagcgagagtgaaatgaaaagtgcaagagggagagagtgaaagagagagtgagagaaacaaagagagggtagagtgatagagacaaactaaacgatgaccaacaagtgaacgcatagtggacattattagcgtcatttttcggaaaacggggggggggatgactgcaaatattttaattatttttctcgtttttttcaggtcaaaaaatttttactcaaaatgtccggcaatttggttgtggctgaaagtgacaccagttttgacgcaacaaatttgaacccgaggtgtggggggggaggaggtttaaattgtacaagtaataaaaaatttttttttcaaattaaagacgcaaattgccagtggcagtggtggtggtgtcacaacggagcgtgacaccgggtgtgacagtgtgttgcggagtgcaaccaagccagcattgattaaagtgcaggtacactttttgaaggagcttaaaaaaaagaaagccctaggattacctttgtcaactatcatttttttccaagcaggcacaacaatgtcgtcagatgggcaaaaggacgggtggcgcaccccgtggaccaaaaattgtgccaaatgcatgcacgtcacccgagcggaaaaaacgccaaaccaaacactacaataaactaaatcgacccaaagtaagaaaaaaaaggaaaaaattttcattttttttgaaattttgagatcactgtatccagcagcgccccgaatgtgccgccgatcattcgctctcttgaaggggagcgcagctaccgcgtgaaggctgttttggcgacctacacccatagcaacaatagaatcggatattacgtagactggcttcgtaagtggttgggatgaaaattaaaattttttttcatttcttctcatatttttgtctctatttgtttggttattgatgagttgtcactgaatagctcctccataatcaaacagtccggggtttgaatgtttgttgccgagttgtctttgaatagctccgcgcaagcgttttaagttccgttcctccttttcatctctctctcttctcgctgtctctctcaattttaaatttatcacagtcctaaacactgtttattattaattaggtgcgaggggccaagagagttgggtgcagagcgagtcgtgtgattgtatggaactcgctattgacttcacaaggaaggcgaatgtccacgatgtgttgcgtggactacttggcgagccaattcccgagagtattgccaaggaagtgatggcgagtccaaaattcgtagaaggtcatttttttttgaattttcaaaattattctttaagtttgtaatttgttgggccgggaccccgcaacagtgctgaaaattgacgacctgaacatttcatttgctccatcactcaatgtccaggacattccgtacaaaaaagtattttggaagcgccggcacccgaggaaagcgacagtgaagacgaatgaaaggaaaaggctaacacataacaaattcactcatttttaacatttctcacaaatttcctcttacaaaacatttctcaccaatgtgctcttacaaacatttttcaccaattttacaattttaaacagaaataaatttattcttacatatttataaaattagtcgaaaataatgacacaattaatgttccatgtaataattagttagagctttacaatatggacattttttggggtgttcagaaagggtcaaatgataaattaaacaatttcggcataggcctacatgtccacactgcccactgggcagtgtggacagtgcagaggcagagtcccccctcagatgggtaaaaaagttttggggggtaatggacggctcccaatgggtccccccatcgaaaaagagaccgcgtttctcgcccttcttgttgcgccgcctccaatggggttcgtgccgttgttgcttgacacatttgtaggcgcgtcatcggcccaaattccatgctgatgcgcccatggggtagtcccatacgcattctttctctgttcctctcccgtagactttcgcacggcctgcaccgaaccaaatggcactcgctgcatccttcaacagaacaatttggttcaaaaaattttttttcttttaaatctgcattacttgcaactccaaaccgtgatggagcaattgaagatttgcgacgggacatttatatttttagagggcttgtgtaataagacaataaatgacccttccactcgccttctccctctccaatcccatgtccccctccccccactcagtgtctttgccagattcaaattcggcaagccaattaatcatcaccccagatttcatctgaagcaaacacaaaagaatttgaggactgtctcaaaaaaaatgtttattatgcagaattaatattaattcaaattatggattgtatcatcaaaatccattattgtcttttggtcaaagttcactttttcttcaatggcgccaaaaggtcggttgcgcggcagttggcccacacgcattcctcacacatctcaaagccgaaggcaaaacggtccccctccagacgctttaccttctgctgattgttgtacagacgattccaatcatctcaaaatttttaatcaaaattaaaatttgcagaaattattagtaattattaccatgacacaaatatgtcgtcagcaaaaatttgcccttggccaatttccacaactctcggtcctccactttgcgtttcttcgttgccgactcgtcctttggctcaaaatttttgggggtctcttcatgtggcttgggcgccttgggaccgattatttgatgttgctcagtagaagcagcagtacccaggtgtccgtgggatttccgaatgaaactttgtgggtgaatagatcacctacgggttcttaagaaaaatggtgtcaatgtatcgcacataattcggtgtcaggagcaacgacattacttttggcatcgcggaccatgtatgacgcaatcagctggagtgattagctgccgtccaacagcagagacaaatgccctcgcgcctcgaccccctttccgtgtgggaagccgtgttcgtattgaaaagctacaagcacgtgttcaaaaagggctaccttcctcgcttcactgacgatctgttcacggtggcagaagtacgcacctcacgaactgccgatcacctacaagctacgggatgtcgtcggtgatgtgctcaccg

SEQ ID NO: 4596 - DNA, 4616 bp, Heterodera glycines
  unsure (1)..(4616): unsure at all n locations
cgtgccaactgactatttggccgagtcgttcagttggaattcgctgcgattgtcgtaagcctttttgacgcctttgtcgccccacagagcgatcagtgcgtttgccaccgcatcagtgaacggctgattctcctcgccattctcaatgacacggaaaatcacagctttatgattctaaaggaattgatcaaaggacgaacgaaaatgggggagaaaagcgatcggtagttcaatcagtcaataagccatcgataggtcaatcaatcaatcggatcacctctttgctggcgtcttccaacggaatgtgcagcaccgagtccatggccttgagaatggctgccattgaagtcactgaaacagaagtaaagcaaaaagaaaaacagagaaatgcaccggtgttggaatagacgacggaccttaattagcatcattataactgattaattaatttgtcatccatttgtcttctcaccttcgctcattaatttcctcctcagtgaatccattgctgtgcaaaatttgcatctgtttgagcactgtcgacttgccacattctccggcccctgaacaatgctaagattatccgtcaatcattgactgatcactttagtgttctgccatcactaagcgattactctgataacctttctatttaaatacactcagataatcaatcggtcgaaatgttcgatcatttttataaaatcatcctttttttatcacttattttgacaatagcccttttctgatcactatgatagtcaaactaatggtcctattcttgtcactctgctgatcgttcttcttctgatcattcccatcactttgtcgccccttttccttacccaacaacaacaatttgatgatattcgatgccatccttctgtcactgctcagttgcttctcaatggctttgcttttggagatctgatcgcgcacttcttcgctttgacaactcgccaacattccgcccattggaggaaaaaaaatgccaaaatgaaaaggaaacccgaagggggagaagaagcagaggagaaaagtgaatttgaaattaaaaagtcagtctgaggaaactgaaaaataaaggggaaaaaacttgaaattcaaattcaaatttgcatttctttggggaaaatggacgaggaaaaaacaaaagcactctgtgaggaaagccaaaggaaaagggccaattcggatgtaaagccgagaaaaagtgaatgagcaaaatgaaaatgagaagcggcggcgggggggggggaattaatgaaaaattggcgaaattggcaatcggagaacgattaacaaaacaacggacaatgggaggagtttaatttgggattagaatcaattgcagcgggggcggagaaactttaaaagaaaaatgccaaatttgttaccaaaaaaggggggggggaaagtgacagacggacgccctttgtcggtgtgacggtcagctgattggaaaccgaatgtctatattcttccagtgtgaaacgatcttagattagacaaaaaacccaaatggttttgaataatttcgagaccagggggatacttcgggattgaatttcggttattaaaaacctgagatcattgagagtttaagggccaaaagattggccaaaagatatgccgtaaaaatacaaaaagtgaaggaacatttaacacggagaacaaaagccaaagaaggaaaaggaaaagccaaatttgtagacggaaatcaaacttattaattaattagtaaaatgaaagcgaagtgcgcaattcgaaaaaggaaagaacacgcgaagaaaggcaaatggacgaaagtggcgaaaatggccaaaagtgacggagaaaagtcaaacgaatggccaaaaacgaatgggggggggtaatattggaggattgaaaataattacggaaataagcggaggaggggggggcgacggattaccgaagagagcgacggcagcggaagcgcacagcgaaagaaagagccaacggcaaaacaagcgaagaaaaagcactccggcactttattgttgggccaaatcgaagtaaatccttcccaattggcatcggcgtaccatttcatttttcattcagaggagcgccggtgtcagcggatggattccgccgccatcgatgacaccgcaagtaattaaagcccggagggaataaacggacaaatgggagggatcggatggaccaatgcagctcattagcatcccttttgtgagcaataaaagacggctaagaagcaagggcttttgggtgggaagagaaaaggggggaaagtaagggaattaatgggagaaaaaaggggaaacaaagtggcaaaaggagggacaaatgccgaaatcgactggtggggacggcaaaggatgggttcaacgaaaagcgattgatggaacaataagaccgaaagtataggcagggccaatgcggcaaaaggagtgatccgctaacattggaagatccgtcgcagttcggcacattccgtcggtctaatcgacacgcaatgagactgaaagcgattcccttcggcaccccgccccatcagtgccccccagggctttcacaccgcacaattacctcccccccctttctcccatcaattcttcccacattcgtcccaccccaacattttttatgtaataatcactcggcgtattgccagggcaacgtcagcagagaaaaggtaataaaatttaaataaaactgccgaaattcgaacaacaaaagataagtgggcaaatgcaattgacgcaatagaaaattaagtgaaattaaaaagaaatacgacgaaaagcgacgacagacaaagggaaaatgggccaaaaaagtgataagtgaatggcatttccatgctcacattttcatttctcagatatttttctttacttttttgcacattggtccgatttggtcggcttgatccaattgctgctgcaatttcgccaattttatcaacgatttgcagaatttgttatataaatataaaatttctgtccattcgtccaattgtgtctgatctgtctgcttcttttccgttctgatcactctctccncctttcttctttttcctctgcttctctgtgccctctctctccgcccttttccctccgtttcacttcctctccctcccttttgagttcctccgtctttgccttccttttctccctctctttctctgccctttcttcgtatttcctcttcagccgttcgaattgcgcctcataagaattttccccgttcaaatggcgatcgaccgcaaactcaaaaagtgaaagcaaaattaaatcgcaatagaaattggttttaatttaaaatgtatccgttgtaatgatttgtgtctttttcagtttagcccccctttctttgatctatttattgtccctaatttgtgcagcacatttttattcaaattcgctatgatcaaacccacttttaatcttttgtaggcaatttggatattttcatgcaaatttctcgactcgtggacctaaatttttgaaagtaaaataataaataataattttgtttaataattagttaaaaattgtatgcatttaaaatgacaaaatatgtgcataaaatatgcactaatatatttgaaaattaccaaaagtcgaccttcagggtgcatttttcggttttttgcctttttcctttcaaatttaccaaaaaataccaaaataagctctaaaattcaacttaatttaaatgcataaaaaattaaataataaaaattaattattaattcttataaaattaaaatgccattaaatgagtgcccactttgactacgcaattcgtccgcttgtgcttcaaaatcactgcgttccccgccgaatttacgtttgaccctccggggccccaccccctcacgtgtttttcttcgcattcttccggaattatctcgggcaatttgtaccctttgagacgtttttttgcgacagaagtgctggagaatctcacaaaaatgcgaattgaaaacatttaaaacaaaaaaaggaaataaattaaaattgaaaaaaggaaaaataaataaaaataaatagacggataattaacaattttaattttgattcaataaaatatcattggcattgcgttgattaattaattcaaaagttaaacaaacacccaaataaattgggagtagtggtgacttggcgattattctttgatacattttgtacaataatttttccgttggcatttgcccatttcgctttcatttctcatttattttgccattctttctccatttctttttccgattcgcttagtctcttttttcttcttcttctggcgttttgtccgttgtgccataaatttgaattcgccgtcctttccgacctcctttcaatggctctcttttcccttctgtttcttccaatttcgttatcatttcgctgtccgtcgttgtgtaattgttgtactcgtagtaaaatatggccaaaagtgccaagatggcactgaccaccaccattacgacggcatagaaaaggaattcgaccgcggcgtttggaaagcgatcaagagatcagcaaaatgatagtgtcgccaattgcggggttcatcaggctaaaaggtaacaaagaattgaaattgcaaatgaaaataaa

SEQ ID NO: 4597 - DNA, 945 bp, Heterodera glycines
accgcgtggaacacgcgcttttcagtccgtggagaatttggccgatcgccgccagtggacaaattccccgtcacagcgagctaaaaaatgattgatcggatgatataaatcatttgatcagtttggtttttgttggtcagttcttccaatcaccatgtaaactccgccttgcgtgcccacttccaattcaatgcccgtctcagtcaaactcattgtcagttgctcttctctgcccttcgtttcgtgcccaattacttttggccttttctccgttaaaaacagcttccatcgaaaatattattttttaattgccattaatttactgattatagtcaattaaattaattaattacctccccgatcgaacagatttgtaggcataaatgcttgcattgtgagtatttgttcgtccatcgtttggccatataaatggacttttgctcttcaaatcacctttatccacttcccatccgacaaaatccgccactctgcgcgggtcgcaaatgaccgcactttcgttgctctcacgcggattccaacggcacaatgccaaatttccgccgtactcgacgtcctccagtgccaaagttatcctgtcatttacatttattacacaaattctgctagcctgtccttcgaatttgggcatgaattggcacttccctcccgtcggcttttccctgtccatcccccctcgcaacgggcgacggaaggtaaattctaagggacgggcagaagacaaacgctaaattagcagcttaatgaacccaaacaaagcaattaactgagaatagcagatcaatgactttttaataaaaatggaaaaaacaaaaacaaagaaacgaaacgacggccgatgacccccgccccgccggtgagtacgagatacgccgcaacccccagttcaataccccctaattattggattggcttttcgtgtttttt

SEQ ID NO: 4598 - DNA, 2798 bp, Heterodera glycines
cacttccctcccgtcggcttttccctgtccatccccccttggggggcccccccccctccaatttcggcacttaccccactttgaattcgcccttccctcccgtcggctttagcgtgtccgtctcccaaacagaacgcccattcgactggccatcatccaataagtgcgtccggcactcaactcccggcccacctctcccccgaattgcttccccccgcagtctcccccctccccttcaaagtgccactttcgctgtcccccgtccaattcgaacatttccggcctttctctgttcgtatttgtcagtgtctaaatgggttttgtgaatgttgtcatcctttgtccgcttttgacttgatttggctccattattcgacacttttctggcccttttccattctctgcgcacactttcaaaatgcaattgtcaaatgcgttaattgcggaaacaaaggcacgcccatccattggaatgtccggcaaagtggtctaaatggacacaaatgtgaatttaaacggacggccatttaatcacattaatttggaattgaacgatggccgaaaggacaaaggcgagggcggcgaacagtccgccggccaccattttgcggaggggactaattaaaattaatgggccaattaggaagtgcaaaacaaaacaaaaaacaacgcacgtgattttggcaagaagagaaaccattgggtagacaatgacttggaacattggaatgaacagcagaatgagcactgagtttaaggtgagcatctgatcgggcaacagaagggtgtcgccccacaggcgacagtccatcatcacctaattagcaaattacaaacaatcattaaggagcaattagcatcatttgaaagagcaagcagccccaggcgatgaccgaccgattgaatgagccaacgcgacccctgctgatcgtacaatgcccagaaaacgggggcaggcaaataaacgacgagcacacggagaaggccccgcacgtcggagacgaggcgccgctaaaacaaaacaatcgaatggccaaaggaaaagcaaagaaaagaaatggccaaaaaacaatcggaagatttgctattcgccgctcactttgtgacattcgttcggattgtccttcaaagtgcgcaactcttcacattttgggtcggagtcgcacaaatgcgagtcaaagtaaaagtcaagccaatgcgaaccacgctttttgttgcctttgcttcgccatttattcacaagcgctttctgtaacactttgtttattttttagaaaataaatgaaacaaaatgccaatttacaaaagatttccccccgagggaatgccaaaaagaaatgactaaaaaatggcactcactcactttgccaacttggtacacctcgcggaaaatgttctccttcggaggcctcttaatgtaccaaaaagaggcggacatgaacagaactgaaagagagcacaaattgcttttgtaatgaaattttgattttggcatttcggccattaattaattaattgccccactgactcgtcgccaaaaccattaacgcggcgggaacaccaaaggacaatgggtagcacgagtcctggcccagacagggcattgctgcgaataggaggaatacggtaatttcactctcagaaaggggtacggtaacgaccacgaaacattggcgaaatgaaagtggagatcattgccccggcattgattgcgaagtaaaaggcggagaagaacacggacagcatcttctgctggtgcggctcaaactgatcgccgccaaaggaacaaacgcacggcttaatgccaccggtgccgacgccgattatgaccaagccgagaatgtcgagaaaagggtggagggaagaagtgccattcaaagtggaggcgaagcacagcacacattggccaacggcgtacagaagggacaggaaaaagatggtcctgagggaggggagggcagagcagacaaatgcgaaatgccaattcaaaaatgacaaatgccaatgcccacctgaattttccaagatatccgtccgcaagaattgatctgaatttggaaatgaaatgttgacatatagttatttacgttaagcttcgaaaattagaaaagatagcaattcctagttttgtgttttttcgtttttaagtgaataattaacgaaactgtattttgttactttatccacttggttcgttacaagaatattaataaaagttagtttatactacttgtatctgttgagctgtaataacgcttgaatcttgcccattcctttaataatttcccttctaagcacactcatttctatataagagtgtttggttttgaataactatataaatatcagttagtttttattatttgccgtaaatctctgtaactgattaacaatttttttaaatttaagtagtgagagggaattataaacattatattcgtaaggaatagttatttacgttaagcttcgaaaattagaaaagatagcaattcccctccataaatttgtaggtgttgttttgtgttttttcgtttttaagtgaataattaacgaaactgtattttgttactttatccacttggttcgttacaagaatattaataaaagttagtttatactacttgtatctgttgagctgtaataacgcttgaatcttgcccattcctttaataatttcccttctaagcacactcatttctatataagagtgtttggttttgagtaactatataaatatcagttagtttttattatttgccaaaagtctctgtaactgattaacaatttttttaaattta

SEQ ID NO: 4599 - DNA, 1840 bp, Heterodera glycines
tcggtggttgtagccgaacggtctcgaatgttgtcatccccgtgctttcgtccctcccgtacttccgatcatgttctccctcgtctcgagcatgccgtcgaatcgggtatgtctgacgctcccgatagtcgtcgttcacgtgagcctgctgcttttcgatttttggttgcatcagtgccggccgatgggctgttgctggggggaacgcccccatctcgtctcgatttcgattgatccattctcgcgctgtgttcgtcactctcatgctggcgacggacggcactttggcacgccgctgaaaaatcccgtccaaattcgacatgacgggtgtcgcgactcgtcccattggtcttcggttgtgttgctgtacaccttgtccgccgttttgccatcgtttggccgccacttggaaggatctctcacattcttctatgttccgattttcgagtggaggtgggtcgtcccccaccggatggctgttgttggtcccgaatgacccgctcaatcgagaccgcgcgattgcttcttcttcatcctcgagtgctcgtcgcatcgttcttaagtctccgatgtgctcgtccgcaatttgaagcagttcagctggtgttggatggtttcgcaactgcaactctttcgttgctgccggcagtggcgctgtcagtaggtcgtagaagaagtcctggtgacctgcgggttctgctcccgctgctgccattccaatctcgaaatgtccttggaagatttgagttgcctccttgagtcctctctccatggccaacagtcgcgccgcttggtagcctgcctccccttcggtaaggtcttggtcgatcacttctcgagcctccgcaattcgagcggcgagagtcccggatgctctctcgattctgtcccgcgctgtccgtaccgggatggatacactccgcaaattgcgtgatgggaagggtagcatcccttgctgatttgtcgccacgcctgtcgccatgttgcttcctctcgttgcttcgtttactctggcaattttttgttgctcttcgttcgttgaagcgacgggaccatccccgtcctgcacattttcgtcgtgctgtgcgccgttgcgatggccctcattcgctgggtccatgttgctttcgctcccgtcctcaaattcgagtcgttgcattttttcgtttccgcctgttctgttcgtcgaccgaaatgtttcgctggagaccccctgctaacggcaccagtttgtcgccaatctttttatttccgccgcgcgcttggggttggggtgggccaagctgaggcgggattggttcccgctcctcttcaccgctctcgtccctttctctctctgctcactccgttcgcttgtcgtaaagggaagcgcacccttttttgccgttcgttctgatgggtctgatgctgctgaccgatccgatcagcgccaaagggggacgagaatgggaggggggaggggtgacaaatttggattggtgcttgagagaattgtgcagcaaatcgctgcttgcttaacggcaccaccgactaggattggggaagggcttgtcggacccctttgactcgacgatcacgggttacgactcccgatccctgcgacagactatccggatgatgtgagaccgcttcaatcgatgcgcgcttctccggcttgtggtgagttgtgctgactaacggtcctgtccttttgccggataatttggcaccgctcgggtcttcctacctgcactgtgctgctcggaattgacgactacggtagtacaccccgtctcttcagttgctcctactggtgggaaactgaactgctcaaattttgccgctacttcgggtcactccc

SEQ ID NO: 4600 - DNA, 3093 bp, Heterodera glycines
acgggtttcgattcccgtctcctcctgtggatgctccggctggcgggagactgactccggcgatgcgcgcttctccggctggtgggattagcggcgacgaacgggcctgcccttcggtggacggtttggcaccgctcggctcttccttccttctctgccctgcttggtttcgtcgacgacgggaattcgccccgtccctacggctgctccggctggcgggagactgacaccgatccgcgagactccggctgcgggagtctgaactgcttgaaattcgctgacgctccgggccaactcccggattctccaatgccaaagggaaaggaactgggatcgggaggattgggggagaacgacgagggctgccaggaaaggaagggggtcaagaggtgaatgggcgcctccgtttggccccgcacgagaatttgccgaatgtgatggagtgtggagggtgcttttccctcctttccgagtcctccaagccgtttcagcacgaatttattaaagcaaaacgaataatgaataaaagcgacgaattgatcgaattgggcgatgggacgggggaattggaggaattggtcacaggcagaccgaatatgaagcggaggggagtggaaggaagagaagagaagagaagagaagagagcgaccccttggccgggggcgcttaaatagacaattttcgaagggggcgggcaaaaggccatgcacgtggacaaattgtgagagagacaaaaaatggacagaaaattctagaagcgaattgcgaacaaaggaaatgggcgcacaaaaattgaatgtgaattggcagatgtaaaaagtgagaaattgtgaaaggaaatctgagcacaaagttggccgaagatgagccaaccgatgagaaagatttgaattgtgaagggatgcgatggggcaaaaatgggacaaaggaacgggcaaaatgtgaatggtacgaaatggagaaatgcatatgagaaattagatggaaaaggggcaaaaattaggaatgatcaattttgaatgaattgatgaatcgggactcgccccgatcttctccaagaacatccctcattctttttgcttcgattgagtcccgtcccgttcatttgtgcaataggcggggattgacccgccttctcgtcgccaatgaaaaaattggcgacacacattctgtaaaaaataaaaattaaattaaattaacagctaaaatctaaacattgtcagaagatgccgtaaaagctaattcctatttctttagccaaaattaaataattgaaagaatttttagatattttaattttgttttgtataattacattttattaaatatgaattatttaatgtacttaagttttatatttaaacaatcttttaaaaatctttaattactttaattacaattttttttttgcctttttacatttatttgtaaataatttatgtgttttaaattaatattattaattcattctctttacttttatattttattgagtaatataaaatatgtacgtatatttgaatttaaaaattttagaaattatcattaaaaatttatgtgaaattttttatgaaataattatgattttaatacataattgaaattttttttaaagttggacaaatcaattaaatttgtttcatttctcgtattgcatcataattagaacatttatcatctgtaatattccttattaattttatttaatttttagtttatcaccaaaccaaaatttttatataagtcttaagtacaaaaattaaatgaatattttgtaaattttcaaaaactttgataaggcgaaatttaatataaaacgaaaaagtgcaagccttaaaacataaaataatactaaaattagccgcacaaaagaatatttaatctaccgtatttcctcgattataagccccggggcttctattgttcaacccccctccaaagggggcttatattcgagggggggcttccattcgagggggggcttttattgttcaacccttcatttctacaaattaatgcaattttttcagaaccttcttttattcaactttttacgaaaaactacgttgctttttaactttcaagtgccaaatacaaatcattttataattaattatggatgcaacaaaaaccttacctgaatcatcgactaaaaaagtacctacctattaaaaaattcttttcaaaattacctatcttaaggtttgctgctactgcagcaatccttgttctggtgcccaccaatgctggaagtgcaaaaaaccttgccatgcgatagcgccatgctcattttcacatgacggcgaagagggattcggctcaaaagtcacctgctgtctgtgctggctcgacgatgacgttgaccaaagtgcgagtgccgtcgtttcaacagaaccaagcagcaaacaaaacgacgaagaaagtcgagattctagacttcggcatgaagtcttcgattcatgccgctagccgccacttcggagtcgaccgaaaaatggtccgtgaatggaaaaaaacaagaggcgaatttgaggaaagtgtaagatgcctgtaatgtcacaatgttttaattcgtttaatttagggccgaatcgtcaaaacgaaaacgtttggaagggggcggaaggaaagttccaaacaggaacttcgaagaagctgtgttccagtgggtgtctgaattgcgagaaaagaaagtgcgggtgacacgaagtatgattgctgcacaagcaatcaaaatgagcgccgcctacgaagacatggaaaattttgcggtaaaatttcgaaaaatttttgaacatttttctcttaggctagtaagggatggctggaaaaattcatgcaccgtcataaattttccttacgtcgaccgacaacagtagcgcaaaaagaacccgatacatacaaaaacatcatcatcaacttcatattatatattcaacaactcatacacaaaaataagtaggtaaatgagaaatattttttcaaacgactaattttcagctacacacgtctacgcggcagacgaaacggcggtttggcttgacccgggtggcgggacatgtgttgctgagaagggctcaaagaccgttact

SEQ ID NO: 4601 - DNA, 2444 bp, Heterodera glycines
acttttattattttaattaaagaaaaacatagtgtttttaattttatgaacatttttactcattttttactggacctttttttacccagtaagtttaattttatttacatttctgaacataatcaaataaatgtaaatatttggtaaatagattcctatcattatatatttttataaatagtgaaaatttttaattttatttcaagattcaggagttggcacgccgttcggcctttactacatatgcatgtttgtattaaaataagtactgacaagattaatcaattttatgtttttaactatcgtaattaaatatttttaaattttaattggcgctaaaatttaaatttttaatatgtttttttgtttaatagcttccagcgttttacattaataaatttttaatattattttaaaatatttttgtcaatattttcaaatcagctggcacaacttgagtttaaataataaaaattcattaaatttattcaatacaattataagtttatttttaatgccttctagatttacatcgttaaatatgcctaggaataaaaattgaatccaatatttaatttaaattaagagatgccaattttttaaagttcttatttagtttcttaatatgttatattatttaattaataatttcaatattatttttcacatttattattcgaaataaattttcatttgttttattattacaaataagaaatttacatttcaatttcttgatcttgttgatctgttaaaaaaaacaactatcaaaattatttaaagcattttgtaatgttatttcattagctgtatattaaaaagtttaatcacattattaaagaattttactaatttgtttgatgttcatgatgattttcgtggtgtttatgttgttatttatattttattctaaaattttaattaaatattctattatattattatttttaaatgtatattcattttgtttacatcttaattgatcatattctgttttatattttcacatgtaaacttaggcgatatcttgccaaagtgtctcatccatctaaataataattttctcgttttatattctaatcgatagtttcaacttcttttctgcatttattgttattttttctattgtatattcgacaattcttatattttatttttctacttattttctatttttagaatttaataccattaatatttgaagcactttgatttctaatgatataataaattctgatgaattgttcatataatctatagtttataattttactttttctcgtcaaaatttgtttcctaattattataagaaaaatatatttatttttaatatttacatatttttcctggattttgtattatatcataaataacttattcagttagtgatattaaaatattacagaatattaattcgtttaattgaatttgttaatttaagttggcatatttatctctttgtttatcgcttgttgctagagttgaccgggaccgggtcgcgaattcccggttttttcaggtctcggtcccgatcccggtttttgaaaaaagaaatccgggtcactgttttgccagtcccggtcacggcgggactaaacaagcactggtgtcgctgacagaattgttaatttccatctttgatcatcataaatttttctgaaaattcttcttaccctctctaggcttaaattcaaaaattttatcccttttccttcttaggcccttttcccaacttttccaattcaaattttttccacaaggccaatttcccattccctaacccccccccccttaatcccgcacatatcccattttgccacctcatcggagccgccccctgcaccgcccacatggactgaagagcctataaaagaaaggacggtcttcgatgctcacctttaccggcctcttcgctttttctctcttctactgccttcgatcaattttcaaacgatcaactgatctttttgtgatcatttcacctgatcattttccttgttttttcacatttatttgtgctttggttttttaataaagttggtatttctaaccaacgcggttcgatcaactctttggcctccaaagccaattttctcagacccctcttccctgtccctaagggaattttgacccagggtctagtcaccggggatgggccgaggtttcgcttttcgcatttcgcctttcgcattattcgcattttttggcgtttcgcatttcacttttcgcatttcgctttttggcgcgaaaagcgacttttacacccctaagaattggattaaattcccataaaatttttcaaaattttacctataaattggctaattttcagtgaaaaactgtttataagtgatcaaaatttccaatttttttccccggcggcgcctatcggcaccgccgcgcaccgaaaactactattttttcttagaaaatggccccaaaat

SEQ ID NO: 4602 - DNA, 1126 bp, Heterodera glycines
aaatgaaagaaaaaaagttggaatattttttttaattacaatttcaattaaaataatggtaaagaaaatatgaagaatattctatcccagtggggaattgaacccaagcgagaaataataaaatcagaaggtttagccacttgaccacttatgcatatgaacaaatgctttaaatgaaaataaataatttaatttttttttctcaaaaaatttctccttcttcaccattccctactgttttctcacccagaccccctttcttaccagtgcaaatttttaccggcggtaccggtactagacaaaccggtaccgatactttgatttttgaaaaaaccggtaccggtaccggtaccaaaaaaaccggtaattaccggtcggtaccggtaccggtaccgctcaacccaaagtaaataacataagatatcttttcattattttccacctcaaagtatgatccgatgcccgccaatttgacaaattttgtcgcttttgccacttgggccggtgcgtcgatgtcacggaattgttgcgggttgctcagagtccaaccacggcctcaatttattaaaaataaataataaaaataaagtttttgtaattcgatttaaatttttgttaccatatgttgggattccgataataatctttaataataaaattaaattaaacatacaaaaaaataataaaatgggacctttgatttcggcatgcccttcttagcccaataattcgcagcaccagcctaaaactcgagcaaaattcaagttaaatttgtttttattcattggggaaaaccaaagaatattttgctaatcaattaaactctcaatcgcatttacatagaaaagaaaaacatatagcattttcaatatcgaaattctatggcaaatttcaaattttaatatctaaatcctaaaaacaaaatatttgataactgtaattaattgtaataaatcatttatcaattcgatatgacatttatgattttaaatttgactgaccacattccacaagcgcttctccggcacatctttggaccgtccgtacaatggcgcgttcatccccgtctgctgctccacgaggcatggaagtcgtagcccatcagaagcacaaagtcgagaagcct

SEQ ID NO: 4603 - DNA, 2645 bp, Heterodera glycines
  unsure (1)..(2645): unsure at all n locations
ttattttattatattttgctcgactttccgactgtcggaatgtcgtatccgttgtcaatgttttccgtccccgccgcaaccgcagcagtgatcagcagacgcggccttccgcttgaagacgcttctttccgaacggcgtctttcagttcctagtgaaatcaacttatgtttttttttaaatactttcttaaattaaaatatttttaataaaaaatatttttgattaattcataaaaatttgccttaaaaaatctgctgaagtttcgcttctgctctccgccctttgggtattctcttacgatgtcaatgccatcaaagccgtgctttcgcacaaatgcaattgccgaatcgatgaaactttttctgcttgcttttctgaaaattaaatatcaaaaaatttatttcatttgagaaactagggatgtaacctaaagcaaaaaggaaaaaaaataaagaatttaatcaaattaattgtccataaaataatcaaatatttcagataaaatttccattaaaagtttaaataaattgcgaaggaaaattgcacaattgaacacatttgaagcgcagcgggtgccccggtcagccaacacttcgagaacggttaattgatcaaaaatgtttgacccgaaatccgagaatatctttgggaaaagtcgcgcgcgcaacgaaactaacctaagtttgattgtgaaaattttcttataaaaatgctagagggttggaagaccgagaacaaaaaaaaaaatttcttcctgttccttggtgcattttgtaggacttcgaaattgaagcaatggtatactgtatttattcggatgcttagagattatctttgcccaaaactgaaaacatctgtttaactcatgctaaaagaaaacaaccgcaatttttggtcttactttgaagtcatttctcgaaaaagtcgggtgccaaatgaccaaccgccaaatgaaagaagcgttttcagcaccggatcaaaagccttaaaattaattaattaattaattttcgaaaaaggtttattactttaataaataaaagaattatgactattttgtaaagaatttccattttattataacctttagtccgttcactcgagcatacatcccatttggttgcttatcacttggcaaatcggccggattaatggccctaaaattccatttattccctatttaaatgatgaaatgccaaaaaaaaaacaataattttaataattccgcgatttgtcccacttggccgtgtagtcctcgttcatccacccaaatgcgtacagaatgtgcgtgcacagtcccgggatgtaatcctccggcatgaacttggcccggccctctctgtactgtgcccaattggtgaagtagcagggccgaaggtaagtgccactggcaccagaaaccgcggaggatgaagcattgtcaccggcttaaaaaggagccgatcgtttaaaatgaagcaaaaaatgctacattcgcaataatctcttaattgggcttttgttctctcccccattaccaatagttttagcactaattaaattaatcattaggcttcatttaaaaaatctcaccgacaaaacaaatgatgaataaaaccgtagataagctgagcaaatgtttggagagttgcaaagacattagggcgaattaattcgttttatttttaatataaatgccaaaaatcttttctcagttttataaaagaatttcttaaatttttaataaaaattacaattaatttagcccatccctacagtataaggactgcttaaaggattataaagcgactcgtgcagtcctccaaatgatcattaaattggcaatgttagctgagaatcaattcgctttttatatcggaaattctttttacaaatttatgcagttcaagcacaaaaatttacagaataaaaaagatgaaaatgaggaaaacatttgtaaattattcacagtttgcttcgttcggccgatcgcacattgacaactttttgctgaagtggagcccattgggacagtcgaaactgaacatttggaacagatatttgaaaagaatataaagtggatggaatgaaataaattatgaaatcattaaaaatattttaaaattattttaaatatttaaatattatcaatgtaataatagagaaaacggaccgataagccattggaccaacgcaacggtaaaagtgctgacagctggacgggtccgcgaagaagccatcagtcatacagacaaatgctgcaatttttaaactaataattcaaatggtcactataaaattgagtcgaagcaattgttagtaaaataggattgacaaaaaattataaaatttttccaaaataaaaataatattttgttgaaaaagtgtccaacgtttgttgctgccgttgttgctgttgttattcgatatttccagctcgtttttggcgatgggtgaagcttggctgctggtgtaggcattgttcagcgaaaaaacggcggcaaaataatggtgggacggagttttgcgctgaatccgaaagaaattgtgtttaaattttaagaataataaattaanattttanataattattttattttattttaaaatatttaaacggaaaacaatgtgtattctcaggcatgtagtcagacaaaatttctta

SEQ ID NO: 4604 - DNA, 1358 bp, Heterodera glycines
  unsure (1)..(1358): unsure at all n locations
tttctttctcttccgccccccccccttntggcccacatcatttaaatggccaagggcactgctaaattggaggcccgcgctgcattgcatacggaaagacttcccttaagaaaggaaattaaaattttattgaaatttgaaaaaatgtaaaaaaaaattttgctttacccgagagacagagcacaaatgcctctctgaacgatggggcggccatcgctttgaacccgtctttttgcccgtagcaaagcatcgattcggacacacttaatgggctgactcataaatttgaaaattcaattttttttatttaaaatataatttaaatgaaattcaatttttgacccatcctctcgccttatgccccccgccgtctgtccaaatggcggtgttttcgtcatcgactgaataactaacggaggtggcctagtgacagccggcaaaagtgcacccgtaaacggcgaaggcgactgtcaacaaaaatatatataatatttatttttaattaaataaaattctacattcgaaagtgccgagacgggtgtctgtgagagttggatgccgcccaattcttgggcaattgtgcggatcagcgggtaacggcctggacaaaacataatttaaattcaatttgaaccaaatattccgaattattgttgcaaataaaggtacggtaccgagttggctgccggggcattgtccgttgaaatcgtcaaagtccaaagtccacacgaaagcgccgccgaaagagttttggcgaatccaactgagctgaatgaggcaaaagcatttcaaattgaaattcgaaatgggctttcattcactttgtttctgatgctctccacgtcgtcgtagctgaaccactggtcgttgtccgccaccaaaaagggcaccagcgtttcccggtccacgtaacgctgcgcaccgtttgccagcatttcgcagaacttaaaacagacaaaaaaacaaattttaatttcaaataaaaataaaacaaattgaaaaaaataattttaaaaacactaattaatttttggattttttttattatcgtaagtcagcacataaatatttatttattaatacatatttcttgatgggatgngatttgaccggatttagaaattctggacatttgggcatcttttttcttgtncatctatggcttattttagaaaagccatanattctttaaaatttcctttaaagtgagtgacccatcaaatctgacctaaaatatgccaataaataataatatcaaagaagacgcggcataaatatatagttgaaatttgaacgggcgcttttttagaaatttttttttaattaaaattccaattggaatggaaattgaattaaaa

SEQ ID NO: 4605 - DNA, 3391 bp, Heterodera glycines
  unsure (1)..(3391): unsure at all n locations
acttaaaacagacaaaaaaacaaattttaatttcaaataaacataaaacaaattgaaaaaaataattttaaaaaccctaattaatttttggattatttttttttttattatcgtaagtctgcacaataaatatttattaattaatacatatttcttgatgggatgggatttgatcggatttagaaattttggacatttgggcatcttttttcttgtcaatctatggcttattttagaaaagccataaattctttaaaatttcctttaagtgagtgacccatcaaatctgacctaaaatatgccaataaataataatatcaaagtagacgcggcataaaatatatagttgaaatttgaacggacgctttttaagaatttttttaaaattaaaattcaatttgtaatgtaattgaattaaaatatttttaatacaataatagattaataatttccctcttcatcacctcaaaatacgctccagtgcccgccaattggacaaattttgtggcttttgccgcttggcccggtgcgtcgaggccacgaaattgttgagggttgctcagagtccaaccacggcctcaatttattaaaaataaataataaaaataatattttggtaattcgatttaaatttttgttaccatatgttgggattccgataataatctttaataataaaattatattaaacatacaaaaaaagaaaagaaatgggacctttgattttggcatgcccttttcagcccaataatttgcagcaccagcctaaaaagcagaaattagtagggaaggcagatgaaaattttcaaaaatttcatatggcttggctaaaacgacaactgtaaaaaatgagtaaaaaaaagttaaattattttttgatgagggaaaatttagttactgaaattttaatgaaatttgatttaaaaaattaacatattttactcaattattattgtaaaatgattacaataaaatataaaaataaattaatttaattaaaaaataattattaattaataattaaaatgtataggaatacactgactgaccacattccacaagcgcttctccggcacatctttggaccgtccgtacaatggcgcgttcatccccgtctgctgctcccacgagccatggaagtcgtagctcatcagaagcacaaagtcgagaagccttaagcataaaattaaataaaaacgaaaactaaattaaatcgaagaaataaaaactaagagacgaaaaattataaatattttttaagtaaatttggtaaattataaagtaataaatctgttcagatattttccaaatttttatgttataaaattgggggtgtacttaaccgtaagggggcccacatcaaaatttttaaaaaatgttaacaaagagcgcgctgaacatccaaaaaactgcgcttgcaaattagctaaaataatttgggccaaaatatcagagtaatttgcacagataagaacccaacatttctttgttaatattttttaaaatttgaatgtggggcctccaaacggaaaagcacctaaattggtatttagaatcctttcaaatttaatttataattaaaaaaaattattattttattatattttgctcgactttccgactgtcggaatgtcgtatccgttgtcaatgttttccgtccccgccgcaaccgcagcagtgatcagcagacgcggctttccgcttgaagacgcttctgccccaacggcgtctttcagttcctgcagaaaagcaattatataaattaattttttgtcattttatttagactgttttatagagtctgttaataaaaacaaaaatatttagatgaaaaaattcaagcattttttcgaaggaccaaaaaacattttaaaattaaagtgaaaagtggaaatgctttaatttttgcattaaatttcccttaattcgacattttattaaagatgttcaaataaaaatttatttctctacaaaaattaaattaaattaaaaatgttgtgccgatgtaaaagcgcaatttacacgagaataatttcatattttaaattaattgactaaaacaatttaatattttttgcatgttttaaattaataaaaatttgcactgtaaaattgaattaaaattttgtcacgacagtgacacttttaggctcggctgacaatgagcatgaaaattaacggtatgccaatccaaaaaaaaaaattaacggtatgccaatccaaaaaaaaaattaacggtatgccaatccaaaaaaaaattaacggtatgccaatccaaaaaaaaaattaacggtatgccaatccaaaaaaaaattaacggtatgccaatccaaaaaaaaattaacggtatgccaatccaaaaaaaaattaacggtatgccaatccaaaaaaaaaattaacggtatgccaatccaaaaaaaaattaacggtatgccaacccaaaaaaaaattaacggtatgccaatccaaaaaaaaaaaattaacggtatgccaatccaaaaaaaaattaaaggtatgccaatccaaaaaaaaaaaattaacggtatgccaatccaaaaaaaaattaacggtatgccaatccaaaaaaaaattaacggtatgccaatccaaaaaaaaaaaactttatttaaaaatcaaattcctttacctaatttcggctaaattttcaatttaattttgctattaattaatttgccttcaaaaatttgttgaagttttgcctctccgcttctccgtttgggtattcccagtcgatgtcaatgccatcgaagccgtactttcgcacaaataaaattgacgaatcgatgaaaacttttctgttcgcttcactgtgaatttaaaattaaaaatttaagaaaaaattcctttgtggcctcactttgaggacattccctgaaaaagtcgcgtgccaaatgaccaaccgccaaatgaaagcagcgttttcagcaccggatcaaaagcctaaaattaattaattaattaattttcaaaaaatatttatacttttaataataaaaagtatatataatttggtattgcatattaaaatatattttattcttttctctttctattataacctttagtgcgttcactcgagaatacattccttttggctgccaatcgctaggcaaatcggccgggtcataggccctgaaattttaatgcctttttatttgcttaaataaaaatttagaattctctttaataatttataaaattcgcccttttctgctagaacgtcaactcggtgtcaatttcaaaaatgggtggaaattcttttctggtaattatattcttagttattataatgcttatcacttggcaaatcggccggattaatggccaataaaattcccatttattccctnatttaaatgatgaaatgcca

SEQ ID NO: 4606 - DNA, 4392 bp, Heterodera glycines
  unsure (1)..(4392): unsure at all n locations
tctccgtcgtgggaaaacgcttgnaagacgatggcgacgtgccgccggaggaagtcattttcttgcgttacagtttttgttttctcgcataaattaactgctctgcttaatgagtggtcgcaatttcactccatggagttgggcccggggctctcaaaacactacaaacaaaagccttgtttttatcggcagcttaaaaatgtattctggcggtgggagacgttcgtcaatggtgcacaaagacggaaataatggcgacgacttcggcggtgggagacgtttttccatggcgaataaagacggaagttgtggcgaagacgacgcgcgactgtgcgctatcgtcggtcggtcgcatgtgctcggcacggaacccaacgcaaaagcagcggcagtgacggaggtcagcagaaatgggagggaaatgccgaaaattgctcaaaaataaaacattcgatttttttaaacagaataatgcctttgacctcgcgatgacgaaaactccgcgcaaatttccgaatgtggaggcggatgagtcgagcgtgttcccagcggacttcccttgcgaatttaagctggacgtaggggcattggccaaacttttggtaagcattcttacatttgacttttaataattattctaatgtataattcacggaaaatttttgcagttttgagcggaacaaaataaatttagagcgacttgccgcagtcgtattccgcgacattgccatcgccccaattggacgccgactttttcttcaccgcatacagcgacaacgacgtgttgcctccgtttgacgcgcttccgcccgcggtgcaatgtcgaaaattttttgccgaccttcgcccgttggaccgaattttggcacgggttgtgcgtccgggtgttgccgtccttcacgtggagttggtgtgcatgttgagccgctttcggcgcactttgctcacctttatgaagggccgattggtgcgtcctttttaaagggaaatgagttgacagaaaggagagagagagacgtcaaattaaataagagtccattttgcctaaagaaggagggagggacatgagagaaggaggaaaaggaagaagcaaaagggtgaatgaaccaataagggggaagaggcggaacggaggggttgacaaaggtggaggaagggggggagaaatgagagacgcgtggagagggagagaaagtgaggatgaagttgtccaaaaaacggaagggaaagagagggggggggataatctctgactgctgattgtgagtgattgttccaaaatgaacgaatttgcgaatctagagctcattattttgaaaattagagttgatcactttgggattgttttgtgttttcttatgaaacatacaaatttagaagatgcaagcacacgacagtgacgacagcggcattgaggaacctgacaacgtgcaaggagtcgtgcaagaagggcaagaagggcaaggagtcgtgcaagaagggcaaggagaggaattggtagaagtaagttttgcgaatttcctcattcttttggtgccccgacatttgcggcccccagccgaaaaccacttgcgtctccgacttttgcggccaatttcttaagggtcattttccgattcatttcacaaattgtgcttgctcaagaccccatcagagcctaagtttttttatttctaccaatcctggattcctatatcgatcagtcgatactgtagagctccgaggtgtcccaataatgtttcgttcctattttcacattgtcgtaatgcaaaatcaactttttgatccctcttcattttccacattttttttctttcttgtttcagttaggggaaaataatttgataaaaggtgaaaggaatatgtttgattattttttatcgagtaattgacttgaacttagtaaaatgtgctgaatttacacctgagtaagtctaattttggtttgggctgaaatttcggaatgacccttaagaaatggccgcaaaagtcggaggcgcaaatgtcgagacatgattcgtttttgggagcagcttcccccccccccatatcagtccccgttttgtttctcctcgaaaattgatttctcaaacccaaaaattatattgaaaagttgaagttttacaaaatttcaacaaaaaactgaaaatcttttgctacaaagtatgatgaattacaggtttttccaaaaatttgcctaaaactcatgtctttttgaaacttataaaattttcacgaatataaggatgggtaataaaatttctaatttattaatttctaaattttttgagactatcttttttacgtcacggtcaatgtttgcggcttgctttctttttcaaaatgaacgaaaaattaaattagccgtattatttatcctttttgggtcacttcagtcccgggtccgttcattccaaagtattctccgccaaaaattattctaatcgacaaattgcttcaattaaatctattgactgatttcccatttttatagcattaacttattttttatttcttgtattaagataataacaaatttgtttcctctaatgaaaaaagggcacaaacgttttttcaaaaaggttattttcggtttcattttttgatgaaatttatttcaggtcggacaaattgattttgatattggggagctagcggctcaagtcgacaatgtccaagatgatcatgccctgctccagaatcaagtcgtaaacttgaacaaccaagttgtcaacttgaacaaccaagtcgtcaacttgaacaaccatgttggagcactcttgaatctggctacacaacagcagggtcagattagccagttgcaggttttagttgcaagatataaattaaaaaagtagctgggggatttttcatgtttagtaaaaagattaaaaagcgtttcaattttcaggaggcgcttcagcagttggtcggaccggtatttgtttcaaaatattgtcaataaaaaggcatataatgattttaatgttttttgaaaaaaaaatttaaaaaagtcctgaattctaggcgattggacaagccgcagcgggcagccaacaacaagaggagaagagcggcaaggaaaagcccaaggaaggcgaggacgaagaggaggcggggggcataactgtggccgaggacaaagaggaggcggagggcgagaaaaatgtgcccgagggcgaggacgaagaggaggcggagggcgaaaaaactgtggccgagggcgaaggcgaggacgaagaggaggcggggggcgaaaaaactgtggctgagggcgaagatgagggaaccagcgatggagagccgaaaacgaagcacccccgtttgcaattttaagacgatctgtttcttgccatttcaaatgttttttgaacgcaagaaaataattgttgaattgcgaaactaacttaaaatttgttgattcagttacattgaaattcaaaatttaattttcaaaacttgtttacattggcagtctaaaaatgtattctggcgatgggagacgtttttccatggcgaataaagacggaaattgtggtaaagatgacttgcgactgtgcgctatcgtcggtcggtcgcatgtgctcggcacgaagcccactgcgaaaacagcggcagtgacagaggtcagcagaaatgggagggaaaatgccacggggaactgaaaaatttaaaaaaaaaaagaaaatttaattggtaaattaaaaaaataaaaagccttttcgagattttgaaaaagaaagcaagccgcaaacattgaccgtgacgtaaaaaagatagtctcaaaaaatttagaaattgataaattagaaattttattacccatccttatattcgtgaaaattttataagtttcaaaaagacatgagttttaggcaaatttttggaaaaacctgtaattcatcatactttgtagcaaaagattttcagttttttgttgaaattttgtaaaacttcaacttttcaatataatttttgggtttgagaaatcaattttcgaggagaaacaaaacggggactgatatgggggggggggggggggaagctgctcccaaaaacgaatcatgtctcgacatttgcgcctccgacttttgcggccatttcttaagggtcattccgaaatttcagcccaaaccaaaattagacttactcaggtgtaaattcagcacattttactaagttcaagtcaattactcgataaaaaataatcaaacatattcctttcaccttttatcaaattattttcccctaactgaaacaagaaagaaaaaaaatgtggaaaatgaagagggatcaaaaagttgattttgcattacgacaatgtgaaaataggaacgaaacattattgggacacctcggagctctacagtatcgactgatcgatataggaat

SEQ ID NO: 4607 - DNA, 3096 bp, Heterodera glycines
aaacggttgtgaagagccctcccaagcttaacaaaatttaaaaaacgggcgcgaagcttccatttgagctaaaaaaattttaaaaacgggcgcgaagcgcccgttcgagctcaacaaaatttgaaaaactggcgcgaagcgcccgttcaagcccaactaaacttaaaaacgggcgcgaagcgcccgtttgagctcaacaaaattttaaaaaacgtgcgcgaagcgcccgttcgaggccgcgaagcggccgaaaatgccaaacaaaatttaaaaacgggcgcgaagcgcccgtctgagctcaacaaaatttgaaaaactggcgcgaagcgcccgttcaagcccaactaaacttaaaaacgggcgcgaagcgcccgtttgagctcaacaaaattttaaaaaacgtgcgcgaagcgcccgttcgaggccgcgaagcggcctaaaaatcactgaaattctttaaaaattcaaaatctcttcacaaccagatagctaatctaggtagcgaagctcaagaagcgcgaagcgctttccccagcgccaccctcgacggttcacgcacccgctagttactatatatgttatattgacaaagagtttcgttgctaaaaccattttctcccggccgaaggccgggagcgccctgaaagtagtggaagggtcttacaactttttgaggagcatccgggaaaactatatagaaaaattcagcgcggacgactgagtcccggagaccgatttctcactttttcttgcagtttttcttctacgaaattttttctttggaccgggatcgcttagctcttgctggtaggattttaagtcagactatccccgacaactttgccagcaaaacctaagccctacgttgggcgcccaaggctgtagccttggctaattttttttacccaaaagtgtacacttcagtaccaggcgaataactcgccaggggttgctttgaccgaaaaaattgtttctgagcaaaaatgtgtagtatttgaaaggctatccaaccaagttttaaaatttcgaaaattttcaaaatttttcaagttaggcctaaaaaacggttttcgggtttttgaattttatgattttttaacgaattttcccgggaaaacgaagaccacttccaaaacatagtttttcgagctctatcgaatggtattttttttgaaaaaatttcgatttttttccggaaatagaaaaaatttttggcctaagcgggacatttgagtcccgggcccataactcgtcaggggtcggttttagccaaaaaatgccttagagcaaaattgtagagctttttaagctctatcgaacggtgtactacatgatgtaaaattttcaaaaattttcgagctaggccccctagaaattttcggaaattttttttcggacgaaaatgggggtgaaaaatatttttctggggtaaaataaggtgctgagtacgaatatgatgtctattttaagtttcataatttttggaattttttaaaaattctttattttttggcaattttttggccctcgggattttgggcgaatattgaaaaattcatatctagcctaagggttgaccaattttgagcaaataaagctttaaaaatagagaaaaatcaggagaattttatgggatttatttaggttttctaacatcaatatgaaaaaagttattccagaaattctggaaattttagatttttcaaaaaaaaattcataactcccttctgaaaagtcattctgtaaaagtaaaatactacaaaaatctgcaatttttttctctattatataaattttatttggcatttctatcacatttttaaaaaaagatacaaaaataaaagtgattttgggattcgggaccaaaggggtgagtataggatttttgagttgaaaaattttttcaccaaaaatcttcaaaaaacatgtcattagggctattttatgacgctgatcacgaatacgtgatcagattttacttttgacatcgttaagacctcagaatccctgtgtgattggggattctgaggcatcattttgaaggggggggggcaggttcggatccggacggtgtaacattatttttctttgtatttttggcttattttacaatgtttttaattaatttttgaagatttcttttaaattatttaaatttattttttttaaattaaagaatttcattatttatttttgaatttgtaaaaaaaaattcatttaatttcaaattaaataaatattcaattaataatttccaaggttgtttttaattaataaaagagtattttattattaaaaaatttttaaattaaaatgcactcgatttttaacctttaataaaaacgtttccttatttatttaattttaaacaatattgtacctctcctaacaatgttgtaccacttctaatcacagttgtacctcttctcatcactgttctacctcttctgatcactgtttacctcttctaatcactgttgtaccacttctaatctctgttgtacctcttctaatcactgttgtacctcttctaatcactgttgtaccacttctaatcacagttgtacctcttctaatctctgttgtacctcttctaatcactgttgtacctcttctaatcactgttgtacctcttctaatcacttttgtacctcttctaatcactgttgtacctcttctaatcacagttgtacctcttctaatctctgttgtacctcttctaatcaatgttgtacctcttctaatcactgttgtacctcttctaatcactgttgtaccacttctaaaacaaatttaaaaaaacgggcgcgaagcgcccgttcgaggcggcgaagcgtcctaaaagtcccagataattttttaaaaattcaaaatctccacaaccagagctaatctaggtagcgaagctcccaaagcgcgaagcgctttttcccagctaaatagccgacggttcacgcacccgctagttactatatatgttatattgacaaggagtttcgtttgcaaaaacaaaatctcccggacgaaggccgggagcgccctgaaagtagtgtaagggtcttacaactttttgaggcgcatccgggaaaactatag

SEQ ID NO: 4608 - DNA, 6597 bp, Heterodera glycines
  unsure (1)..(6597): unsure at all n locations
aaaaaaaaaaaaaattaagggatgattttttttcctttgaaatttttaaaccatgttaagggattcaaaaattcgcccatttgtctcaaccatttaaaacataattttttgaaattaaaaatggtgagtatcatggctatttgttggtgtaagctttaaataactaaagaagtttgttatcaaacaattctaaatttatggttcttggttgaaacagtcccaaaaaactttgctggtgcctaattttttttttattctgataggcgcgctcaaaccgagagtcaacattttttttcaggagtcgagaaatccgtgacttagaattaagaatggaaagagtttctcaagaaaaacaaatccaatttaatttttaaaggaattattttaattttttagagagctcaattcagtaataattatggtccgcaaatgtcggctaacctatggcatttcctgcgcacatccaattccaagattttgtctcttccattctctcgacccccgcaaattttctcgagtcataaaagcacgtccccctcccatttctcttgtcatgctccgatttggcaattccattctctccacaaacaattcccccccccccccaattcattcattcattcattggttttgtcctcctccatccgccgtcgtccaccccttccataataatgggggattattcgcccctccggggctttttcctaaaatgcacaaataatcccccccccccgagggcgctggtcactcattcactcccaatgcacaaaaaattcaacaaaattaatgtatctcaactgagactttgaaaaatttttttttgaggagtggaagggcagtaaatgcgaccatccatcaatatttgtttccattttttgaatttcactttaaaaattgtccatttctccacttcaaattggctagaataatagtggtctttttctttctctcaaaaatttaacattctgatattgttcgaaaacacttgagaaactctattaatctaaaaatttgaaattttttttcataaataaaatgcttaatttgattagcaacgaacaaagttatggtccaaaaagccttccggcgacattttggggtgcacccgttttgattctttcattcactcgatgccttaacctcaaccacattgtgtaatatgcctattttcttagtatgaaatgccaaaaatggccaccaacaacagatcaatcttcatcatcatcatttgcaacacttaacggcgcggcattgccctccggcaaagtgccggcggtgccatcctcctccgctgaacctctcccccgtccaccagcggcgatttgccccactaattccttgtgccaattttgaagtccaaaaacaacccgcggcacaccatccacaaacaatgcgacggcatagcgaaagagcacttcctcacagaggtacgattggatgccaaaaaatgcagttaaataaaaaactttcaatgtcgtacaaagagaaatgggcaaaatgaatttgatcaaatacattaataattacggcttacagtatacttctaattacagtatgctccataaggcccccattttccgggagccggtaaataccgtactgaataaaaaagatacggcttactgtatacttctactacagtagtcccattttccgaagccgtgcaattatcgtattgaatgaaaagtgtccgggctgtcttagaaatgctcacaaaggcattcattagttgcagaaagcggcatgtgccagtcgttcacctccgtgccacgcacatacattcggacagcggacgagttggagccgttgtcgttcagcgcacggcttgccagcttccccactctggtgccagccgcttgctcgcgtgccgagtcgcccatctgccagctgcagcgtcgtttcgcacaacaagacgatgcggccagccgacggatggccgaccatcggacgctgccgtcgcaaatgccaattctgccgccaaaagcgctgccagccggcctgcccaagtcgctgagaccgtccaaattaccacccagtgagcacagaagggcacacttttggggaatggaattgtaacattgtcaaagggagtggaaaattgagctaatgtcggacaaagtgtcaaaaaattaagcaatttgggcaaaaaaataaaatgccgaataattgatatgccaagaaacaaattaaattattttggcaattatagaaaaaatgtcagaatttttcttggaaatattaagtattatttgttatcatttgataccctaacatttttgttttaggctgcatatttcattcttaattcaaaaaatgttatacctagaaaaatgatttggaatttttgagactaaactttttcgaaaatttaatttaaaattttgcaaaataattgaattgagataaaaaatttggtgaaatataatattcaaataattctttctgaaaatttgctaacaaataaatgaaaatttaagccacttggaataaatgcncaaaaatagcagaagacaatttgtcaaaaatttcgcagaaaatttggacgagttggaccccctgcggcaaatggccaaagagccgggcaccggactgctcggcaaatgcgtgctgtgccttctgctcaacgccgtgttcgtgctcgccttgttcctcgcatttttaattggtcattttgcggccgacgctcatttcccccacagcaataaggtaagactcaacaacatcaaccaacaagcagagattggcatttgtttctcgaaattaacatttttgactatttttaaaaaattgtaagaaaaatttaggaaaatttctgtgcgtttccccctccacgtgaaacaacgcaaaattatgtttttaagtgaaaacctgttggcatcttattgaaaaattttcatggttttactaaaaattcaaattatggtgacctcccagtcgctcgaagaacgcggctctacaaaaggggtccattttttggctttccatcgggttttatataacccgaattatgatttatggaaattactatttcaaaaatcgaaaacttggccactttctgatgttatttttaacctgtaaaattttcaccgcccgcaaaaaatatctgcttattaattaacactaacaaaatgcgcaacagcttgtttaacattttttgcaagactaacaccagcaacactgctcatttattgcccggtgaggtgcctgtggctgacggcaccgatatccgcggcaaaacaacggcatttgacctacgcggaatggcaccaaagcactcggatggcactaacattggcactgatggcacgcaattatggagccagcgagaagaagagttccaaaaagttgggaatcagtgttttgctggtggaaagtgacttttgagagtcgaaattccctaaatttcgagggcctagacgaaaaaaactgagaattttgcgggaatttgagccgaaacactcgaacagccctgcctttaatggtgccgattattaatcctcacagccctttcttcaacccattccgtcaaatttcttatccaagcgaggatcacattaattgagttgatcactgagcctttcaccggtgatcacttttcgtttttcttaccatatgccaattgcgctaccgtattccaaaccatttacattacacgctcatcagagattgggcagcaattaaataattaagtatctctttttctgatctcagagcctggaacgacgacggcaacgtgtgccgtcgttgagcgaagtttacccgccgctgttggacggtggcgatccgatggcggacgaagcggacgacccgatgccgttgagtgccgcgacagccgcgcatcagttcggcaacgggccggtgatgcaccgatcggctggcattgccagtcaaaatgttccattgattccgttgcccaaaacggtgatgccaaggcattacaatgttgaggtgatcaggaaacaaaatatttgaaaaaatattccataaaatccattcatggattacataaattttaggagataaaaactgccgaaatatatctataaatgggaaaataggatctaaaatttgaaaagttaactgccgaaattagtttaaataaatgggcaaaaaagaaccaaaatttttaaataagataaaaagccaaatttaaatcgaattaaaatacgcatatgagaaaaaaaattgataaaaatatgtatacgaaaatgtacatcttcagaatgggatttaccatatgaagagacaattcaccagttaatgggtgctctttatcattctttttttatttttgttggaaattttggctttccgttagttaattcagcttttaactatgggcttctaaaatcacaatatctgcttgtgccaatcttcagttttcgcgggccttggcaaaacaaactatcgtttattaccggggcggatccgttatttaacaaccatcataaagggcggtagttatttaaaaaaccatcattatgaaatttttgtcgaaaaattatttataactttgctgaaagcaaccaaatttttaattcttgatttcatttgattgccctaagtgttctttatcagtcagcaaaatttcaaaaaatttcgttaaatttcaaaaaagttatagctcgaggaacgcaaaaaccttggtcttcgaacatttttagccataactttttttaaagttaataaaattttgaaattttaaaggctcataaagaacatttagttctatcgaatgatagcaaggtttaaaaatttggttgttttagagcaaagttataagaaatttttttttttttttgatggttttagaaataacgcgcataatgatggtttttaaataatgacaaagcacccaaaataccatcaaatgggaaatttttgacagaaataattcataaccttgctcgaggaacaaaattttgaatttttatattatttctaagaaaattttttgaactttggcatgaaatagagaacatttagggctatagaatgatattaagaaataaaaatatggttgctttttagaaaattataagcaaaaaaaattttaaaaaatttttgtacggtaattcaaaatttcaaaatttgtcgactgactgttaggccttatacaaatgtattttttctgaaaaattttacattattctgacaacagcattttaaaacttcgtgaattttaacctaaattcccagccctactaataatgtgataactgaaaaattaatatttgtacaagtaattcgaaccggtaaaagcttacaaaaattttggaaacaaatattttaatttttaaaaaaccgagcttatagcatattaaaaacccatttattcaataatcgtaataatataaaacattaaaaaaaaattattctgaatttgcactttatcatatggatatattatagtcaatgaaaataattcatacaaaaaattcatcatatgattcgggcatttctcagcaaatgtgtttctcttcaatcagaaaaaatccattcgaaatattttacaaaaagaaatgctttattttatttaaaaaattattattattattatatatctggcccaaattatatagaaaaatgaaaaaaaaaattaatatagaaaattttttggaaacctttaaacgctttttatctttttttaagttcttaatcattctaaacaattcacccattttttaaataatataacgattaaaccgttaaaggttaaaagcttttctttagaatgtgccgacccaaaaagcgtcaattattgcaattatttttgttattattttgttatttgattgatggacatcaattaggcccagtgcaagtaattgagaacaatttagaacaaactgaagaagtgaaagcgaaaaacattgaaatggcacaacaaattgttgaaatccgcgaaaaaaatgttaatgggaacattgaaaatgagctgttggaagtgtgcaatttgttgaaatgtcccagcgaaaatgttgacaaatttttgaaaaatcaacttaaaaaattacacccggacaaagtcggggctgaaaatgccaaattgggagcagaagcaacaataggtaaataaaatgtggcatttattttgcatattaattattttacaactttttttaaattttatttattttagtgattaataagttgcgacaatttgttatagagaacacgcgaaaaggtctttatcattacagacatagaattgttgagattttggcattttaaaaataataaaaaaaaattaaattttgtaattttacagttttaaattagtaatcaaataaaatatatcgtgataatttgattgtttcctttcttttagcaaatcaaattttgactaatgagcggcaactcatttcggagtcattaaaaagtaaatgtttgaaaataagaaaactttcaataaattttaaatgaggcttttatgatataagcacactttaatgccctcaaatgaaaatatgtttataatttttcatagggtagtacgtgaccgggaccgagccggcaattctcggtcctctcaggccaaaatattttttttaattgggagaaaataaaatttagaaaaatcaatgtttctttttt

SEQ ID NO: 4609 - DNA, 1449 bp, Heterodera glycines
  unsure (1)..(1449): unsure at all n locations
aaacatggtggcatcattggaagccattcatcatcagatttagtgaatttngtggcacaaaaaatgaccaattttaaacattttacatgaaaaaaaattccgcagtccaaattggccaaattcaaccgagagcatgagcaaatagcgaaaaaaattgatcaaaattttgatcaggaaaatcttttgatcaaagcgccaaagaacaacccaagcgaagtgtacaaaatgtggaaaaaatgggaaagtttggaatttacaacgaatttttacaaacaaattgagcagaattattgctggaacaacaaactgttctatggatgagccgcattaaaatttatttatttttgttttttgatttatttatttttgtagacatttttattttgttgtcgagcgatgatttttttagactatttttgttgattttggctgattttgttgttgcatttttttagatgtgagtaaattgtatcggattcaggcgcaacacacaccaattaggcttagttttgtctagagttgtacgggaccgggactggtactgaaaaaaacgtacaactgagtacctaagtccctgttttgaccgggggaccgggactagccccggttttttcccagccaaaaagtcccggtttttctacccgaaatgccccggtcccggtttttctcataattcccggtttcggggtctatgggaatacaaaatatatggatactgaatctgatcttggatttccccaattacgaaccccagacccgaattcgaacaaaagagttgaaattttttttcaaaaatacgcgttaaaatcgaccaaattttcgcgcaaattgcgtattttttattcaagtaataattgaagcattgttttgcattaaaataaatagttgttaaatgaattcgaagcttttccccttaaaaatgcatcttttgaaaaaaaattcaacttttttgttcgaattcggatccggggttcagaatttttgtctatttttagggtattgcccctttttgagaactctcccccattcacagtgcaattaagccaaacctttttttttggtatcattcaaaagcgcattcattttattaattaccttaaaatcttattaattttcgaaaaaagttagtgtcagttcttctggctataactttttttttgaagcatcattaaattttttgaaattttgccacgctaatagagaaggctttagagctatcgaaaaaatttatttactcttgaggcagattaagcgttatttttttgtcaaaaattttccatttgatggttttttaattaacgccttttagaagctttttgtgtaacgacccagcagctccccgacctttttggactgtaatttatttaaaaattctaagcagatgcctgagatatgaagcgcccttaggcatgtaataatcatgcgataaaaatgcccttttctcagaat

SEQ ID NO: 4610 - DNA, 2005 bp, Heterodera glycines
  unsure (1)..(2005): unsure at all n locations
tgattgatttattatgcaagatttcatgtttactaatttttattttcagaatattttcaaataagcgcaagtgttttttcaatccgattgggaaacttaaaaacgaaaatttggtcattttttggacaaaatatgttagcaaaaatttttcaaattttcaatttcttctcccggcggcgtctatcggcaaccattttttaatgtccttggatttcggaatttgcccgctatgttcttgtaaatcagtatacccgtccttgggaaaagagtttgtatgatacgagtccttgtcgcgtcccgaaaattaaaatcattttcgtccctcgagtggatcatccattcccccccccccttttctttgaatccccgcctatttttcctttgtattggccctaaggacaggtgcagacaaaacgaaccccttttctcacgacaattcccccctttcctctccttataatctcttctgccgcttcgcctttccacttcaccccttttccgccttttcacttcgccttttcatcgccccttttttccttttcgctgctaatcacaaataatcgcttgctttcaacttcgccttttggaaattaaacttttggtcttacatacttaattcgtggtcgaaacccaagctaatcctaagttcgggttccgcttcccatcccaaccacgacaccctgcttttatcccacttgagtcaatacttttgctaaaacttgaatttttgccaatatttatataatttatattttctgccattttcatctttattttgttactatatttacacccaaacgtaaatttcaattactttttgaaagatgatcaatttccttcgattccgtcaagcaaattaatgccaatcccatgagaacagctgctcaattaatgaatggtaaatgcattaattataaaagtccatatatgtaatatagataaatatttacttcaaagaaaacgttaatttttcatatgctgaatttcactaactagtgtaagtaaattaaaaattattttaattttacatttaataatagaatttaagtttccgcccttattgcgtgtcaaccactattttccttgttttaactaccaaatcagcttctccctttcataatcaatttcattcagcttcaaaaaaaacgagaaaatctgttacaaagaattttgtcggaaaaacttaggcgtttcgtttggattaattttgactaattaattaatgtcaagccaatttccaattcacagaacatttttgacaaggaatacgatcaaatgggaaattgacttattaactacaaaataataatatgagagaaggagacgggggaaagttataagcattttcccattcccacgataaaataaaacggctaactttttgaaacagagaaaagggcaaaaaaattaattgtcagttgccacttcgcaaagattaacttcaaattaaaagtttaaaaacaaaactcccaaagatataggaaaaaatttgtctaattcgtaattggaaatcggtttcccgattcgaaccggcaaatcggtagaaaaacgagaaatcccagtagaaattcggagccgggactaaccccgaaaaagccgggaatagtcccggttccgcgacctactaaaactttcatacatttgcttctctttttccgaccctcccatgggctttctcgagtggtccatctcagcgcgggactcttttctttacttggccatttgtctgagcattccttctgcgctgctttatcttgccgaaattgtcaccattctgcggcataaacaattccacaattcattctacacactgttcgtcatccgtgccgtgccggtgattaattgcactgattgtgcagtttcattcctttgactgtttcctctaggatttgctgtacttgctcgactctttctactgctaccgcttgccctctctgttcggctgcgtccttttttccattattctctngtccccatttggatgatcnggcggattgcccttttt

SEQ ID NO: 4611 - DNA, 2504 bp, Heterodera glycines
  unsure (1)..(2504): unsure at all n locations
accggcaaantcggtagaaaaacgagaaatcccagtagaaattcggagccgggactaaccccgaaaaagccgggaatagtcccggttccgcgacgccggtgattaattgcactgattgtgcagtttcaattcctttgactgtttcctcttaggatttgctgtacttgctcgactctttctactgctaccgcttgccctctctgttcggctgcgtcctttttcccatttattctctgttccccaattggatgatcggcggattgccttttttcctcaccggttacactttccaggcaaacaatttggccaccgctttcatccttctcaaccgattgaccgcaattgcagtcccattgaaacatgacaaagtacagggcttgccaactgctgagaatggcattattctttttcagttgtggaaacgcattctcccgctggttgcgatggtcgttttcggcttgccaatttgcactaattggccaatgttcaaaatgacaggttagggaagtgcacgattcccgggtttttggggattctgtctcggcctcaattcctaagctcatttggccattgcctggtctcatttcctattcacgatgaaatcttttgccccacaaaaggcaagctgcttgttgaagctaatgacagcagcccatcagcggcttcttctgctgcttctggtgttcgcattagcagtttcttgctatacgaagaagataatgttcgttgcacttttaatttcaaatcattttttccattttttctttagtcggccccatttatcaattttttgaattatttggacgcggttgtctctgtccttttcatggccatctgcattttgatcaatgttttcgctgtttccgcttacaaacggcaaatgaacaagctcaagtttaaccagcagcagaacactcccaccaactttgaacggaaactgttcatttacgcgttggccaccttttgtggacatgcgctaatcgcctgtctgttggtaatatcaattaattaattagcgttaattgtaatagaaattcaaacgtcaatttgcagatctgcatttacattgcgtcaaatgcgcttaacgttcaaatggttttggcattatacacccattacccgtgggtactcgacacgggcagtgtgattctgtccagctggctcctcctgtgggcgggcgactcattccgtgaccaattattgcgcgactaccgtataccacgaattcgtttcgaaattcgcgctaacaatcgcgtggtatcggtgaagagaccaattgagcaaaccaatggaataaagggccacgaaaagctgcgaaaaatgccaaccgttgcatgaacaaacttttggatgcttcaccagatcatgttccgtttgaagatcttgcagtgttgttagcctaattgtgtcaaaatttcttactcatttgtattctcaattttaaacactaatttttcaaccccacacacagcagaggtattttcttaattttttaattctcttttttggtctattttttaaatcaaaaaaatcatttcatcctgttttccattttttaattttaaattgtaaaataaaatgaaaaagatcgaaaaaataagaattattcgactcatcagttgtgcatttctgttttaattaaacacactatcggaccgatcgaagcagacaaaacaattaccaagacaccattgaattccaactaaagcgttgaagtcgaagggatcgaacggaaaattttttaaatgttgcgcatcatttgttgttatatttttgttgtgaaacacagaaaaacacttcaagtgaaaaagtgagaagattggagtgttaaataataaataatttgtttgctatttgctttaaatcattgaatattaaaattccgttgaattcctcagacaaatttataactgaaaatattttgaaaaaaaaatattttcaacaaggactgtccatttcaataaaattttgatatattcctttcatctcattattttctcttcaattattgagtcgtcatcttcaaattccaactttttgtcaattatcgccaattctcgccgtttcttgatagaaaccgggagtgaggtcctcgtcctcaaaatcattttctcttatttcgataataaattgagaacatggcaacgtctttctttataaccaaagttgatttctgagggtccttcattcgtaatttagagcgtaacatttcgcttaattttttgcgagttggacaattgagtcccgggggcagttggtcacgttcagcccctagtctataactcggctcagatttgttgcctcggccgatatactcgttctctcatcaaatgcaacgaaaacataaattagcactaaacttcaatttttcaaattatttaatcattgttgatgaattatttttaaattgaaaagaataattagtaatgcaatttttccttcaaatagaagtttgatctaccaaatttattcaattcaaattaactaaatgttctgtcgatttt

SEQ ID NO: 4612 - DNA, 1743 bp, Heterodera glycines
atgccaataatgcgtggaatacatccaagcttttttaggaatacagtaatcaaatagttttaacagaaaaccaattacaacccatctcacaatcagcagaagaaggagaggaggaggaggaagaggtggtggtggaagaagaagggcaccaaaatagtgaagaacatcagcaggaggaggatgagcagcagaaccgagtgattgtcaaccgaaggccatccgtccaaattggcactatgccaaatcaacaaatggcggacggacaacgcgaggagaagccgaccgcggaaaaaaaacaaacgcagaaaaaggcaatgaagccgaagaatacaaaatacccattcagggcaaaattattttcaaaaatcttaaataagtaaaaggaacctttggcacattgtagtatattttatttttcgattttttactataatattttttgtacgtttgccaaaagatgaaattcagcagaaaaaactgacagtgcggccaagttattcgacactgcggacaaacatcattcgtctgacccctgaaagcatgaagtgcaaattatattgcaagtaaatcccggcttagaaaaacattaaaaaatgatttacaaattaatggaaaaaattcgaaccatttgaaatatattttaaattcagagggccaaaatgcatttattgtggaccggagaattggacagaaaatcaacaagcaattaaaggcttatattcacattggttgcatcattttgttttttatttattttttattttttaggataaacaatgaaattttggcgatggcacggccgacaattcgaacctttgaggagtttgacctgatcaaacaatttaaaaagcaagcttaattaaaaaatattttgagctaagacaaatgcacaaaaaacagtaaaaaataaatatattccgattaatgacataaattcttaatatttttttccggcttttatataaattttcattactgttctttttaagtcagaattttcatataaattccacgttaagacaacacattcgaactgtcttgaaccttcaatgtgtgaaggagcacgacttttgtggtccgccattaattgaccacaccggcttcacctacaatcctgaactgttaatgcgtgaaaaatgtatttttttatttattaaaattgaaataagttaatttgtttttcagtgtattattttaattttgcggtccccgatttcggcacagtgtcagcaaaatcaattttggacatttgcaaagtcatttggttctcattgaaacatggtgggtttaatgtctattatatttaaaaagaagaatagattttaaagtaaataaataaaggacgcattggcattcattgccatgccggccttggtcgaactgggacaatgatcgcctgcttcttggtttggtcaaagggcatttcaagtccgaatgccattgaagcagtccgatcagcaaggcataaaacaaaaatatataattgtcgtgaaatattttagttttacagaccaaactcaatacaaagcattgaccaaatcaacgtcatcgaaggtcgtatttataagatatttatgcaaattttggaaagttgatttaagccttgacataatcccttcccgtaaacctttaaatccctaaattcaattataattaaattaacgaggaaaaaaatttaagaatttgaactttatgttcaaaaacatggcacagcattgccaagcatattctttgctcaccagt

SEQ ID NO: 4613 - DNA, 1905 bp, Heterodera glycines
aatattctgttaagtattttctcgcatttcattgctttttttctgattaagcagtgattgttcattgtaattgatctgtagcgctacatgttcatcattgatcctttattttaatgataactcttcctgcgattcgtcctcgcactccgtctcttccttttcttccgtctctatcatttcttccgtctcttctgttttcttcgtctcttccatctctttcgctctccacttcctccccctccttcctattggctctcttcctcttcctcctcccctcagtgctgtcccttcactgctatgaatgcttcgatcgctctggtccctgcactcgcttcagcaattgttccggctccgcgtgtattctctgtcagtctttgcccattttcaccctttccttcccaactgttgtatgattttgctctgatcagatgagaacctgcctaaacgaacttcgatcgccttttgtctgctgatcagtccggtggcgcggaaggacggcgctgagttggcgcagggatgttggagggacgacggcacttcgggagtcgaatgtgtgtgcactggccaattctgcaacataccgagagacccgagggcatccggtacggccgaacaacattatgatctcatcccttatggggtgcgtgtgcaaccactcttttttgccaacttaaaattctgtgccgccattccctgtcacttttccatcgttttcagatccgaattcttcaccagtgattggcctgaaaatgttacagagaaacccttttgtggattatggtaagtgaagcaccgttcgaatgtcaaaaagaacgatgttttagaatatttggacgatgaaaaagcggcgattttgggagacggaggaaagaaaacggaaggacgaggggaggaaagcagtgtggaggagacgcaactgccggagcagtatttggacgaagaagaagaaggcactgcaattgtttgttgtcctttcagtgtcaaacctaaacaacagatttgatgccattggcacttgccgattatttcgaatgggagaaaagatcccgaggcgcgagcaaaatgaccgaacccccgcaaaagtcacaggccgattcagcaccttactcccataccacggcatttccaccgacagaaattggcatttctatcggttttgatcaaaatgacacagccgttgtgcgtcagccaccgccagtcgacggcacaattcggacgggggacgatgacaattcgtcctcggcccatttgggaagtgtgccatggaagaagtttctgctgttgacgatgttcatttgtcttcttcatcttctttatgtacattgataccaatgcatttttatttattgaaggaattttttcaaatattatgaattcttttgttaaaaatatggccaattcgaatattcccccgtttctttggcttttccctgccaattcaaatattgccaacctttgtcttccccaggggatgaatttcactgagtgctctttgcaatcgcttcttcccaccctttcccttcccccccccccgccttggcactttcgcttttgtttcccactttcctttcccgactgtctccatccgcttcttctctctttccccccccccaaatgcccctctttccctcccttaatccctcccctctgtcaattcattcgatttcccattccaaagaactccaaatcagatggttcggttggactcttttgaccatttggctgttaacagtaatctgcatgactcgagagttttggcgtatcacaaacagcggaagaagaggctgaggaaagcaatcggaagaggaacaaaatgatggaagaggaaggaaatcaggaaatgatgaagaggaagaacaggagaggaaggaagaggaagaacaggagaggagggagaggaaggga

SEQ ID NO: 4614 - DNA, 5356 bp, Heterodera glycines
gcgaaaatcggccgtcggttggaaaaaagtggcggtgcatttctgttcgctgtttgccgtggaaaaagttcgccgcccttttctctgctggtcctttgacctatatttcagctgagtgagggcattgacttctccgactcgcactgtcgtgccgttgtcatcgttgacattccctttccgcccctttacgagccacggatcattctgaagaaggcgtgtttgacggaacagcgcaggaaaggccgaaatgtatatagagtatttcattggaaaataataatcgggtttctgtttcgctttcagtcgcttaatgcggacgaatggtggcgaattgagggcatcagagcggtcaaccaggcactgggccgaaacgaggtggacccagtataagcgagtaagagaagcagtgattaatgggccaaatgaatggaattaaaattcaaaaacataaactaaccaaatgtgccgtttctcttttcatttgttggcactttattttctctttagtcataaaaataaataataaaaatattttttgtcattttacactattttatacaaaagtaaaactccaaaattgcgaaggccaaactcagcagagaaagcacaatcggcggatgggggagaagagagtcagtgcatggcaattatccaacgcaattggcgagttttggtaaacgggccgaaaagtgcgggagaagtgagtgaggcggggggggggggcaaaaacggcgaatgtatcgcacgaattcttttgagtgcccactttaaatgccctacaatcaatcggacaaacacttcgtaatttgaacagcaaaacattcatctttcggaaaaatcctaacgaaatgccaaccgatcgcccctttcaaatcgcttcctttgacccaatgaatggcttttttgttgcgcttttcctctcgccctttttctccccggcgtttgcggtcggtctccccattgtgcccttttatgctgacctccccctaacagtgcattgcgttcggcggttgtctgctcgaataccctggcggctgtgctcagccggtgccaggatattttgccaattgttacggcggatattgccgaagaaacaaagcgaagggattacggacaatggcactgaacggaacggacggaagagggggagggagatggggaggaggcgcgggtagaaagggccacgggcggacggacgaacagcaaaagttgaggatgggcaatggcacaccgacaatcccacacaatcccacagaaaagagccaagcagcggggatcagttcactccgatggaggcgagtgcccgcgcgaatgccgcggcatttctgttgtccatccgttatttttaggtctccccggacgtgcttttcttggaatgttgccaaagttgggctttgcctccgccgtgtcttctcaaatgctcctactccaattacactgctgagatggttccttccatcgcttcttcgctccctcccattttcctcttttgtcagcttcgttcgatgttcttccgttctgatgattgtcccatcgaatcggcttccgtaattcatttctgtgccacacaaaatttggaccacagtctgtgctgccgacagaatggcattttgacaacacgttcaggggataaatgtctggtcttctgtgaacaggtttaatttgttgggccaaaaatgccaatcaaatgaaaccaaacgaccgatcagttgccaacaaatgagacgcgacttgatctgagttatgtgccgtgctttgaacgattttctgaaatgaaaaagtgtttttatgaaagtgcactaaggacaattgactatttggaggccgaatttgatcaaatgaagaaagaagacgacaaaatgaaaggtgagagagaggaggaggggaaagggaaaaagaaagagaatgagagagagaaagagaaagaggagacaaagaaagaagaggaagaagaggaagaggaggaggaggacggaggaagcactttcgcaatcgcaaagccaccaatcattttcgtgaatgatcttacaaagaaacacccgaacatcaacgacgaattcactccgacggacggagaacggaagagatggaagaaaaacggagggggagaaaaaggagtgcaaagaggaaaaaggagggagggcaaaaaagaatagagaaatcggaggagggcaaaaaggagttcagaggaggaagaaaagaaggaatggaggaagacagaagagtggggggagtgcgcattataaagaaaatgacgagcagcaaatgaacgtagttttacccaaattaccacttattccaattaaattttaaaattgaaatttgtatgtgtaaatccctttttttcttcgacgcctttctcccgtcctccgcgctcttttctctccctaagcgcccgcttcggtcagatacgcgtgaggatggaccggtttctcggctcgtagcagcagccagttttggttgtcgtcgtcgatgaattgcaatttgtccatccatccctccagcaatttgtcgtacaatgtcttcccgaatctcttaatcgtttcggcatttgtctctcccttcccaattcgttcttccccccccccaccttcacaaattcgtctccattagcaatcgctcggcttcgctccatctccaaaatctcccttagacgtggtgtcatgttctaaggtcgcagagcaaagaatacgaaaagagtgtcccttttccaaacctccgtgaaaatgttggtgaaaccggcgccgtgggcagtctgaggagaaacgtaaataaaaagcaaaggatggcataatatgaaggggtctttcataatcagcagatggccggcgacaactcttttctttgtttttccttttcttttattattcttttctcttttttcccttttcttttgcttttctttgctttgcttcacctctctgtactcatccaaagtcttcaacatgtactgcctttttcgcacatattcatggaacttcggttgcaaaactccatggccctttccatacattgtgagaagcaattgccctcccggctttagccaagtctaaaagcgaacgaatgtcaagccaattccggcaaaacagacgtaaatgtgacggaagagggcctttgtgtcctaaaataatcaaaaatttattgttgcaataaaataggaagtgaagcgaatgagcgaagagcggcgcctaaggcactgccgaacaatcgcggcattgatcgcggagaaaaggaattgcatcgattgggaggggtgatggcatttatcgcggagaaaaggaattgcatcgattgggaggggtgatggcattgatcgcggagaaaaggaattgcatcgattgggaggggtgatggcatttatcgcggagaaaaggaattgcatcgattgggaggggtgatggcatttatcgcggagaaaaggaattgcatcgattgggaggggtgatggcatttatcgcggagaaaaggaattgcatcgattgggaggggggcgggaatggaattgatcgtggagaaaaggaattgaccgattgggaggggggatggcattgatcgcggagaaaaggaattgcatcgattgggaggggggcgggaatggaattgatcgtggagaaaaggaattgaccgattgggaggggggatggcattgatcgcggagaaaaggaattgcatcgattgggagggtgatggcattgatcgcggagaaaaggaattgaccgattgggaggggggacggcatgatttcggggaaagcatcgatcgtggggaagggaatggcatagatcgcggggaaagtcggcatcgctccgtcacctgaatgtgctggatacaatcgcgactgaatacaatgtcgtaagagttcggctcatagcggtagaccattgcgtctgcgatttgatactccactcgatggtcctaaaagtgtgcttatcgccttttctcatctgtttgggttgccttgtcgcgctgattccgttcgaatgcatgttggatcatattggacgacagatcacagccgagcacttgcaagccgaactcctgtcaatcggtgggtcattcggcgaaggaatgcgactgttggcccacccgtgccgcctgtcgtgcccctcctccgatgcccaccccaatgtccaacattttttggcccggccgaaggcgacggaaacggcgcagcacgcgtcggttttcctcaatgccacctcaaccgatcaaagattggttccattatgcttctgttcgtccgtctcccacctgggcttatgaaatccttgccgaaaatccattcgtagcttgccacattgtcctcagtgtactgagttttgtcgagaaattcccggaaagtggccaatttgtcatcgtacaaacgattttcttcggattttgtcaacgtccaatggacgtcgaggaaatttgaatgcgaaaaaatcgaattctgcacttggcacatcccatagagacggaagccaaaagtgtgattttgccatttggcggcgaacacatcgacgaatttggtgaggtcggcgattaatttggcagaaaaatcttctaaagaaactgccaaattagggagagattgcggaaaatttgaccaagattctcgcgaaggattagaacggcgccttcgccccgaagcattcgcaggaaaacgcccaaaacggccgccatttttcgtcggttttccaccatatgaaagagacaaatttatttatttttattatttttgaaattcgcttttcccccgagggaatgccaactttttgcccagtgaaaacatttgagcaaataattccatcaaattgctgctgacaatttgccgctttagcctccttttccgcttcctcaattaactcttccgctcccatttcttcaattttcaaatttccatcaaaaaaatcgtccaaattcgctctgacaaatgagagaacattcaaaaataaattatgaatgtcggaaaaagaactgacttcaaatcctttttggttacatcactctcagaaaggcacaacaaaattcgaccgcccggcggcggagcgttcggattattgtgaagggcattggccaattcgcgggaaatggcactcattaggagcgtgaatatgaggaggaataattaagcaaaagtcagttcagtaaaattaataataaaacgaggacaaattaattgaacggggagaatgataagataaaatgataacgaacagagagagagagagagagcgaaagccaaacacaaaatggccgacccatgggacggtttgatcacgattttccaattggggaaatttaattgcaaataaataaataaaaacgatattgtttgttgtttaagcaattggaaagggagacaaggagagga

SEQ ID NO: 4615 - DNA, 1259 bp, Heterodera glycines
gagagagagagagggatagacagacacaggaaggagagagcgtgaggagggagaatctgtcagagtggaagagaggggtagagagatacatgaatgagtgagggagatgaaggagaaagtgtcagagtggaagagaggggtagagagatgcaggaaagagagagggagaggaaggagaaagtgccagagtggaagagaggggtagagagatacaggaaagagagagggagaggaaggagaaagtgacagagtggaagagaggggtagagagatacaggaaagagagagggagaggaaggagaaagtgacagagtggaagagaggggtagagagatacaggaaagagagagggagaggaaggagaaagtgacagagtggaagagaggggtagagagatacaggaaagagagagggagaggaaggagaaagtgacagagtggaagagaggggtagagagatacaggaaagagagagggagaggaaggagaaagtgacagagtggaagagaggggtagagagtgggtggacaagaagggaaaggaagggaagagaaggtgaaggggaggttgggacagtgatttgttaacagaaaaacaatcatgcattcgaagtgatcagaataataaagagtgtcgtgggctgaataagttttgcgcctctttggatgatgtaaatgagcccaaaattagataataagcattcattggctgttgtgctccttgatcgatccttaaaacgtgtttttcccctttgaatcgtcattttcttcccgcgatcaattaaccaattaataattactaaaacacttcattaaccaatcaatcaatcaatcaatcaatcaatcaatctgtcggtgcgccttttccctccattcgctttggtttgccaatttattggccaatttgcgccttccccttccaaatgccattcgaacatttgcttgtctccacccaaattcgctgtgagacggggcccactgttgttggtgacgcgaactccgaccaaaaactgatggcactgcttgaagctcaacaggtgcaccgtttcggcaacactttccccgtttgttcgcagttcttcgacttcgttttcttacctctcttccataggaattcctcacagaatggccgcctcgtaaagttttggaccgtctctcggatttgggcttttcaatttgcggtaattgccgagagaacttttggctaattagtgagtgattggcagagagtgctggggcaggacaaacggtgattggacga

SEQ ID NO: 4616 - DNA, 1958 bp, Heterodera glycines
tttcaactttagctaccgcgcgaggacgtgacggagttgctgccgaacgacggggacttcctggtgcgcacgacagaagaaacttcgggcacagagcgcgtctttgcattgtctgtgaacgtcggaggcctggtcaaccacgtcatcttccgccgacacaacgggatgtacaccgtggacaacaactccgacaagggcttccgaacaatcgaacgattcgtcgaccactaccttcgcaccggaacatcagtcacaagcgtaagtcaaaaatttaaattataaatttagtgattttcctttgtttgcaggagcgattcgtcactctcaggaatgccgtgcaccgggcgaattgggagctgtcgcactcatccatcaccatcagcgcagagttggggagaggggcattcggcactgtttacagagcaaagctcaccgaacgcaatgggaacaactcgcaggtcgccgtcaaggaggtgtctcagacgagcaccaaggagcaggtaaaggcggagtttgaagcattgagatcgcaaattacacatttttccttttcagatcaaagagttcatgaacgaggcgcgcatcatgcggcagctggaccatcccaacgtcatccgcttccatggcgtcgccgtcggacaggagcccctgatgatcgtcatcgaactcgcatctgacggcagcctcatcgactacttgaagactcaacggagaagtgcgcgcaccagactcttcatgtgcgtcggagcagctgccggactggcccacatccactccaagggcatcatccattgcgacatcgccgccagaaattgtctctactcgaacggcgtggtgagtcaaaacttttgttgttttagtaactaatttcgctctgttcccacaggtaaaaatctcggacttcggcatggcgcacagaggaccagtgaagaaaatggagcccaacgcgcgcgtccccgtcaaatggctgtcaccggaagcactcgccgagcgctgcttcaccgcgaagagcgacacgtgggcctacggagtgatgtgctgggagatcttcaccaacggagaagtgccgtactcacaaatggcgggatcagacgtggcggtatcggtgggtgaacacacttttgtttgcttttttcaacttttccttccttttcagctgatcaacggacagaggctcaacttcccgagagatgcgccgtcaaaattggtcgagttcatcttgcagcacatttgggatgcggagacgagcggcagatactcaatggcagcggtctacgactggctgaagcgacacacgtaaggaacctagcggtgaacggattcaatgccatcagaagatatatgtgataaccctatgcttgttgtatttttacatattgctgactcattgttgtataactactattatgatatgtataaatgactgatgtccgatgtttgctgattggcactttgcctgaaagaaaaactgaattttatgactaaaatagaaatcaaaaatgaccaattttcgattaagcttattttgctcaagaaaataaaatttggtccggcggtgccgccgggattttggaatttttaatgaatttgttaagaaaattgctgcaaatttttcctcttttctcccctcgccggtgattctttttctctccttaatttcttgaccgcgcttgattacgctttttggtacttatgtatatggtttgtacgccacaaatttaaaatacggtatgttagttgcagtattatatgaatgcgaaaattgattccccattattgttgtttctttgcatttggttatattgttgaaaaaaatttttgagtgattttctaagcaacctaagatgatttaaaaaattttaaatttgtggcgtacgaaccatatacagtaataatttccttatttttcttgtttttcttcgttctctctttctcttcccctcgtcgaccctcactga

SEQ ID NO: 4617 - DNA, 4609 bp, Heterodera glycines
ccgggcccgaattcgaacaaaaggagaaagttaattttcaccaaaattcacatttgttttcccaaatatattcaaatgaacggaatataatagaaaagaaaattcacggccatttagtgcatttgaatcgattttggccaatacatatggattttggtgtaaaattaattttctccttttgtgcgaattcgggttcgggattctaaataagttgaaatggatgtcatattcgtgatcagcgctcccgaaaacccccgagtgccactcagaatcgcaaaaaaccctctatttttttttctttttttagggaccaataaagtaaaggattaccgtgtttttttcttttcttccgctattttaaatttaattccagctttccaatgcgtatttgcccgttcaaaaacctgagtttattaatgtttctcttccggtggacacaatgatgccgaaggtgggcaattcccaggacagcggagaaacggagagcaaaaacatcgaaatggactcaaattatcaggtggcttatattgtaatttctaataccaaacagtcgaatataaaaatgcgtaacttttttaattgctccaattcccttttaagccaataacacaacgtgaggaggccgattttcgacgacttcttagcaaatcaaacctccaaattggacaagcaaaacaatttgcaactgttctcagcgaacagttggcccaattggacactgcaaatttatcgaccatcatggagaacaagcaaaatgtgggcggactaatcgaattggttgacaccgcaattgaattggcggaatgcattgaacgacaattggacgaatacgacactttgctttccgtaatatttgttttgtttatctcccaaaacacggagcaaaacgtcgccaagaaaaaagaagaaaaaatataaattttctgcaaaaaatttaaatctttacaaactgttacaaaattcaaaaatttattttcttgaattttaagaagaatattaaagaattaggcttgtatgtgaagctttttcttttttcggcgccgttatgtctcgtgacgttttgtcctgctttgccattaacatttcccttttcagtttgtacgtgacagtgttgaactgatagaggaaaaaggtaaacattcctttcgctattttttcccaattttagccctttttaagacagtctgagacacattgagcaacagaacaacaagcgactcttcgacgagctcaaagacttcgtcttccttatggaaatggtccatgatcagcacatcgatgccctcaaaagtgccaatttgtccgatcccactgggtatttactttcattgttttcatgtgcaattacaatatctcagaatcaactcgtgttgtcaagctgctcgcgtggtagaccattttctgagcaaaaaaacgccactcaatgggatgagagcgtatcagacaaaagtggaattgctgaacaaattgacggtggatttcatcgacaagttttacgcacacatttgcgcaatattcgggaacatggtcggccatttatttattcattccatcgccgacagaatgggatgggtttccatttttatgattagtttttcatgaaagggttcaatgttggagtgccagcacatcggcgacattatcatacaaaagcactcgcaaaggcatcgcgcccttttgcccttctccgatctgatcgcttggctgaaacaggcacggcccgcagtttatgccaaagcgatggagcggtacaaaaaggaagcacgcaaattatacaaaaatgaattcgaccgttttttctccgaactttcccgacgagccttgcaaactgttcaaaatgaaagtaaaacaatcgattggcactaaaactgaaattttaatcagggaaggaaatgaaatggcctcagcagaatttgggaataaaaaccattcattttaagatttaccgaatttaattgtaacttttaaggtggaagtcattctttgagtgcagacaatgcgatctcttcgttaaagccatacactgacgtgagatgagactgtctatttttggatgcattttcaatttttacagttaactgaaacggcggttgccgagtgtcgtacggtggtggaaagtgaacagaaattttctattcgttttttccacctaaacattgacattctatcgcaggttggagttgagatgaacaaaaaccgtatgtcatttttataaaaaaaatcaaaatgtttattaaaaaactttttttagaaaatgacggtagaaaaacagtagagaaacaattgaacgaccaaattaaatttgcaattggcgacattttcgactcattgcccacttacttttatgcccttgtctcaacattcaaagaccacaacctcgtgtaatcaatcattcattgtccctattttttttcgaatttctcattctgtccgaatcattcccttttccccctttatttgttagtgttgtgatgtctctttacgtcgccttaacaaaacgattggctgccttcactgattccacttcctttttctcttctctctacggctcttttctcatttcgcttaagcgccttttcgatgaacaaatggtctttgttttttaaatttgcttccttttgaaaattcccagagcttttaggctcaaattgaagactcctatgctaatgccaaattgttgaagaagtcgagagtgggcattctcgactcaatttcccatttcaaatcggtttctgtgatggcagtttcgatatttggcgaattcgaacgtcgcactgacttggacaaatggctggagaaattggctgatgccattctccgaggcattgacggggcggccgaagcgccgacttcgaagtatccgtcggccattgtcaaagtcgagaatttacacttcttttattgtattttgaccaaataaataattagatttatgctcttttcttaagccacattgtccgagatgaaaattccctgcttggacacgagacgaaagaatgttcgacttttgtatcaagaaaatctcggaatttatgtgagggaatcgatgggccgtccattggacaaaattcatgtgaatgaatgggcagggaaaaataaatcaaaaaatgaaattcagacatttttcgagaggatagaaaaacacttggaaaatggcgcaaagccggaagagttgagctacgagcagcaattctcccggatggaactgaaacgggccatttcgtcatacccggccaaagaagtgaagaagggacttgacaatctgtacaagaaagtggagaaacacctctgcccgggctcgcctcttctggtcgttgtgtggcgacaaatgcaggcaaaaaaaaccacggatttctttcacatttgacaaagttcaggaagaattcttgaaccaggtgaaacattaccaagagctgatctcgcggtgttacggcgcctcaaaaatcgaattggatttctccattggggatgtgcttcaattcttctctgaaatcgctcaacagcactaaccaactcatgtcaaccacatcagtcactcttgttttgttttcgttaatctctggcaaatccaatcatttaattatatggttaatgtaagtgattaaatcccctgtgtaccattgccatggccagcggttagggggagctaaagacccattgtccaaggaacgaaaataaaaacccgaaatttttttcagtatctggagattgttttttgccagttgttgaacatgttatccattcttcctctccaaatgcttgccaatttaatttttgaatgcgtatcccttacaagtttttgaatgtgatatgtccgtaacaaatcctcaaaaaactttcgagtttcttaacagaatggacattgtccttctcgaccaccaatcaaaacaaggcatttgtaaatgtgatttataataaagttatatttgatacaaggtggagaattcgaatccgattttcatttgtttggtgatcaattgaaatccctgtcggggaaaaggacgggcgccagcaaagtccaaaggtaaagcgcagcgcaaagccaagaagagatgacgcgcacccaaagagatgccatgttgtcgttcaaatagcgcaaatcatcgctcgggctgaaggcagcgatatgttttagcacggaaacgttcgcatttcgtcacttacgtgtaccacgaagtgagggtcatcatcacatagagagaagcaagcgcaaaaatgaagtggaagaacgagtaggaataggccacggaccccttttcgttgtcgtaaacattgcgccccgtcgtcccacggtcgccctcctcgacggacattgaagcttcgcctgaacaaatggaattgttcgctcaaatggaccataagtcttccgccccccccccttcggttgctaatgtcctttctcttcctcctcctttcccgccaccgttcactttcgccttactcagagggatgtcctgaccttcggcatttccttcactgatcgccccaccaattttgcccagtgccgtgtatgaagaagtgcgaatggaagcgtagagaaggcaacaaaaccaaatgaccaaagagacgagcgaattgacgggcagcgaagtggtgatcaccttggggg

SEQ ID NO: 4618 - DNA, 1869 bp, Heterodera glycines
  unsure (1)..(1869): unsure at all n locations
ggggactgacttggaattccctcccgcgtcgccggtggaattgtgccgaggaataagcgacgggttgcactccttgtctgaacaattggaacagtttgtggatgatctcgattcgaacagataaccaacccgggttattggtgagcgcactccaagtcaggtaacaaacgtacagtgacatcatactggcctggatgagccccgaattgggcattcgttcctgcactttgggcagaagagaaacgacggaaatgacgaaacagaggacgaaattgaaggaaataacgaatttcggaagggcacaagaggcacccttaagcaaaaaaggaaattgccaaaaacaaaataggaatgaaagacaaaccgaagtgtaataaaggaacatgaaaacggtgctggcgatggacagggcgtaagtgagcagcgagaaaaagatcattccggcaaagcaccagcgcgactcattctcctcgtaagtgctcacccaattttcggccaatccatgcgcaaaatcgacgataataacctaaaaaatataacaaaaatatatgaatatgatgtaaaaactaatattaataagccatgtcgtacgcaattctcataatttaaaaaatgtttttgaaaaatctttcagattcgccgtttaggaatttcgcgggtcgaattagaaaagcaaaaattcactgaaataaattaccagttggatgagaatgaatatgaaagcgccaagcattccaatccacatctgaaaaaataaaaaattgtattcataaaaaggttttttgaaatgcaatttttaaatttaccatcggagtcgcccatccgccgtccctcagatagaaaaagccgaaaatgagcaatccgagaagcaaatatttgaaaaaccaaaagccattttgaatcggggcacggccgtcacgactcgacttgacaccgagcattagcaacatgaacaggaggaagaaggaggtcatgcccatgcaaatgctgaagaggaagaaggccaatcacaacaacaaaagggggtattaggaaataagaggggaattaaggctttaaacccccaaaaagtcattcctgctggaagggttagtcccatggcaaaacgcatttggcgtcaccgacccaccggtaaactgcttggtaccccgtgaccatgtcacacacgggaatgcccgcactgcccgtcgccgaacagaaccatccgccctgataaaatggtttacaaaggaggcaaagtaaatgttgaccaagaccttggccaacattttttggacccattcggagagcatcacgcaggaggtgagagtgccgaccaacaacatcaaagcgtacatcacacgagtggaggtcgaattcttagaagtgggacagaaggaacagcacagggaacaagcagtgctgccgaaacagcaggccaactggaaaacggaacagttattcgaatgccctttttgttttgaacatttaccgaagcggcacatgccggcgcagccaaaagagcgcccatttgaagtagcaataaaatcaaaaaaatgaactggaaataccaactaaaaaatacacgtaaaaataaaataaaataaatttgctaatcatcgataaaatcgctaaaaatcctcaaaataagaccgtaagaaattaaataggaaaatacccaaattaaataggatctttctaaattttttagttttagttttaaaaatgcattgaaaatagttcataaaattcgaataaaatttttatttttcgttcttttcttatcaaatgagtacatttaattaagcaaattttgaggagaaaccgttttttacttccaaaaatacgaatgaacaaaggcaaagnnaaagggaaggnnttaaattacaa

SEQ ID NO: 4619 - DNA, 1769 bp, Heterodera glycines
tttttttactgtttttctatgtttgccaaatgaatattaattaaaccatgttttggtctgaaaaaaggttaattgaaacaaaatatattttgacaaattagcaaatgtgtgccatcataacggaaaaagtgccaaaaaatttttgataatttccgacaatattaatttaattctttgtcattacactttttcctgctgatcatttattcaaaatttgtcttcatttttttttcttataatgttgcaatacataaacaaacatatttaaaattccagcaattgttacggaaaaatggagacattttttcttatattttcaaatgatgtgcttaatggggaaaataaaaaatcacagaaaatacaacacagaagagatgaagaaacggctctgctgctgctggtggcagaagagatttttatcatcccatccttaagaagaagggtgtggatgggagagaaaaagtggtggtggaaaaaggtgcgacaaattgttacgggaggggggggggggtgactcatcacggacagaagcaccgatcgacgtttggcatttagcggacagacaaatgatcatagttttgtatgtacattattccgccttcctccgctttcatccaaccgtcattttttaaattaaaacaatttacctcctgtttttatttaaaaaaaaaaattaattttttgagtttttacatttgtataatatgtatttgtagctaattttcgacacttattttttgttttgtatttttttaattgttaattttttcgttttattaaattatgaaaggggaacagaggaagagagacagttgtagaagaggaagagaaagtggaagacaaagagggacaggagtgacagaggaagaggagtggaagagaaaagggaaagagaaaggggaagagggacctgaggagaggaggaagagaaaagggaaaagaggaagagaaaggggaagagggacctgaggagaggaggaagagaaaagggaaaagaggaagagaaaggggaagaggggcatgagagaggaggaagagaaagagggatagttgagaaggggaagataaaagtagaagactaagagggataggagtgacagaggaagaagagtggaaggggaagagaaaagggaaaagaggaagagaaaggggaagagggacctgaggagaaaggagtgaccgtagggcactgattttacatgtgtatacctaatatgtatttttaaagctattttttatccttactgttttttttttgcctttcttattcatcttcaactactcatcacaatggctctcaatttgcaggaaatggtacgtccttttaacatttacaagggtttctgccatatttgatggatttgtcctggaaaaacagggcaaatggctgaaaatattttacaatttggtgcttaaaatattaaaaataattatttaaagaaataatttaggtcaaggagttcgacggccgattgaacacgcttttggcccaggcaaaccattattcagtgccgactctgcacggaatcatgtccagtaagttgcattacatttcgggacatttcacttttatagggttttgcggggatccggattctggccgggattggtctcggattcccggctttttcaggtcaaggccccggtttttaaagtgccaaaagccgatagggtccgggacaacccgggaataatacggactggtacaggcccgtaaccaggggggggggcaaggggggataagaactggatttgaaaaaagaacaaaa

SEQ ID NO: 4620 - DNA, 3564 bp, Heterodera glycines
accccttctttcccaaaagttttttgaaaaagcgctccgaaaaaaagtgatgtgaaaatcaaatctgaatttctattaatattcgatgatttagtccaaaaaatgatttttgaaataattgaagaaaatttgtttgaaaattttcattaatttaatttgctttattttgggttttattaaataaaaaaccaaataattttgtattattttcacttgaaataaattaaaatttgaattttttttaaaatttttaaaatttttttgaatttttaaaatttcccggttggtcccggttcccggtttttcttgcggtcccggtcccgaagaaaaatcgaggtcccggtcccggtcccggcttctcaggtcccggcaagtcccggtcccggttttggcaaaaattcccggtcccgtggcactctagtttcaagcgccatttgtacatttaatttgcttttcttacgtctgttactacaatttttgagaatattttatagtaatttttgttaattgttaattcttaattatgctaaattttgaatgaataaataattatgccgaattaactaacattgtcaaacaattaccaaaataatgtcacttttgcgcaaattattgccttttgacatttattaatgccgtttttacattaattagtgacattgagtgagttaattaattcgttttgtgccattggtaacatttttttttgccgcttttagagtccttattttaaggacgcccttatgcaaatcggatcagcaaaacaagggcttcggttttttgagtatttttatcaagagtggatttaacattagggcttggataaaaattttctttgtctttcttctaaaacttgaacatgacttttctttatataaggacgtccttgaaacaagaatttgtcatattgaacattgaatttaaaataattaattaattaaattatttttgactgcttcttgacaatgtgccgagttggacaattgcgacagctaatgaagggcctaaagtgccaaaagccgataggacccgggaataatacggactggtataaatggggtataaatattaaatgaaaataccggaccctttccttacaatgaaaaatgttttgaatttaagccaaaaaaaaaatttgtcaaattttcctcagaatgtgacacattttgacactttttaggattggcggcctattttcgcaatgatggcgtggtcttggtcttgcctgatgccaacaattatggcattgccaaatttaacacgcattttgccaatgttgtgcgatgttttgagttttttctaaatttgtcgattatttactcttctgtcaatatatttatttcgtattttgtctcaatgttttttcttcttcacttagaaattcgtacttgttaatgaacaaagctttccagtgccatacatttgatttacttttcttacgtctgttactacatgagaatatgggtaagaaattttcataaaatcgacaaagtgggaaaatttcaaagacaaaattttaagtcccagaagagggcgaccattggccattctgtttgtgttctccatcatgagaatggggttgctttagtgatgaatttttctttgaatcggttggaattttttatggtcagtgttctgaaatttgtggagctaatcgattatacactcctaaatttgaggcttatcagagatcggaattccgagggtcaaaaacttttcggaaatcggaaattcttgaaaaaaatataaaatataataaaaatttttaaatattttaaggctaaatttaaaattcttaaccagccaaaaggtgatttcaaaaatgtttttgatatatttctttatgtattttgctaaaaaaaataattcaatggattttcattcaaatttttttttcttttcattttacattttttttagaaaaatttttgggtaaggggactattacacattttttccggcacacttgtttcaaaaaatctttgagaacatggggagggggcgggggtccgtcggtgccgaaaggcgccgcggggaaatttttttgaaaattttagttcaatttattaacagaaattggtcaaaaatttctgaaaccggaaatcggaattccgaccccaaaaatgtcggaaatcggaattccgtgacatccctggtacacaccactgtcagacaaaatgcaccgtaacgccagaattgaaagaattttacgcaaaaggcactaaatttaaaaatcaaaagaccattcgttatttggaacggacgggacacttgagttccaccagccaaatttatatttaaaaattaatttttggtattttttagaagtacattttcaaaaaatttttttattttttcatttgaatttttataatttccaaaaattctcaaacttttaatttttggcactattatttaatttctgcatttgtctgtcctcatgttttgcaaaattgaataaagcggtacgtcctttgatcattatttatcactaaaaaagcttatcaatggacaaattgggcacttttatttatttggtgataaaaatgccctccttcctcacattaataaccaaatattacttttttttatttttaaaatgaaactaattaaacgaaaatatttgccacccgaattactttttgagttaattcattttttgcctttcaaatgccgttgggctaataaaagggtttctgccatattcgatggatttgtcctggaaaaacagggcaaatggctgaaaacgttaggcaatttggtgcttaaaatattaaaaaaaataattatttaatgaaattaatttaggtcgaagcgttggatgacaaattgggcactcttttggcgaaggtggcacatgaacgtagaaatactttgtactgtgccattatacgtaagtttccgacatttcgatcacatcataattttcttatcgtatattctctaattatcgctccgtctccattaatccccccgtctccaattatcccccccccctttctgaggaggttgaaaaataatccccccggggcgataattagagaatatacggtatatatattgtcttatctatgaatatttttcaaaaatattttagggttcgagcccgtgggcggggatggcttttttgcgtgggcggggctcgaaccctaaaatatttccacaataagtttttaattgttttgttgttcccagaaatgccattttttatgaaaatctgttaagaaatagagccaaaatttctcaaaaatttcccgacgttaactccctaaaacccttttttccccggcagcgcctatcggcaccgctggaccccgtcccccaccccagttctccaaaagttttatgaaaaatgcgccgtaaaaaagtgccatgaaaagtcaagtctaccgaaaaaccgaaaactggtgggtccaaaaacttcaaaactgaaaagcggaagtaccggttaataacaggtcgtgaacaaccctagtaaatacctaaaacgctattttcgcctaatttatatcctttttatggcatttcttttttggaatattcatgcttttctaagatttttgc

SEQ ID NO: 4621 - DNA, 2624 bp, Heterodera glycines
  unsure (1)..(2624): unsure at all n locations
ttggtgacctttcataaatgcaattagcatattatcctccccccaaataattaaaatggattgctaaattaattacccctcttaattaactcaccgatggatttgcatttgtaaatggaaataaaaataaaaatggattggaaataataataaaaaaaggaataaagtaattaaacattattaagtttttcttcttgaataaaatataaattatcaataaaaatgaaaaagagtaagtcgtgaacttttataaaatggatgattgattccattaaaattacataaaatataaaaaaaaagattattctcagccatcctcaatttcataatccaaaaagaatggaacgcattattacatttttattacctattgttgcaatataaccagtttatgcaaaaaaatctttgtttaaatataaaaatgtgaatttttgaatgcataataaattaaaatttttaaagaaattgaattgcggtaaaaaatccttttagaaagtttttaacagctcctccaaaattaagggttttggtaaaagtttaacatttaaaggaaaattaaattcacaatttcatataagaaattttcggaactttgaaaattttcactcagacctaaaaatttttggacccataattacgacttccggaaatatttacctattaaaatgaaaaatggaaaatcacacagccttataaagacttgaattagtgacatccgtagaattataaaaaaaaaaattctcttatttatttatgtcatttattattttatctactgaatgacgcaattataaaaaaataaaaatattatgattcaatttataatggtgacgtagaattatccaaatcccttactcatttaatatctaaataataatgttattatttaaaatgttgattgatcataagtagaattaaccaaaacccttattttttgacacataaaaatattattttatatttaaaattcaagcaataatgaaggaattaaaataaaatttcaaaaataaatggaaaacaataatcagttggccaagaattttgaactctagtttaaattgaaattcaaattctcaataattcaaggctctaagaattgacaattgcttaaaattccaaagcgaaaaatttattcgccatttttaaaatttttctctttttcagtgtgtgactcttaaaaacctgacatttatttatcctactacctctgtgaaaggaaatatttggtttataatttaattaaaagaattttcaaattaaattattttattttttatatttttgtgcctagatgatttttcgtaccctatgagcttagtttttcgtaataaaatcaataataatttaaatttacatattaatatatgtaaataatgggaaattaaattaaattttatattataaaatttatttattttatttttagcaatttttatatttttatatattttttttaggatttgcccattgatcattttttgcgcttctacctagcaacatttaaatgcaattagtttcgcaaaatgttaaaaaaattgtaattcaactttattttgtgcgtcctttcttccacgccgcagcaccaaatttttttttttggcacattgacaaaatgaaaatttcgaaagagcatatataaactttgaaaatcaattttagtgcctgcaacttctaatcctgttgatcagtaagaagaattcaattttttgtgatgaaaaagtcaaaaattttgcatccaactttatttggtgcgtccttctgccaaaaagcagtacaaaaaccgttttggcatatagacaaaatgaaaatttggcattggggccggcaatggatggtgtggaatatgccttaaaaactaccaaaatgacttttaatgctcaaaaaaaaatgccaaaaattgtgtaaaaattcagaatgactttaaaaacaccaaagcaattgctaaggagcgttttttagacaattggaaaaaattttgattttcaaagtttatatatgctctttcgaattttttttatttttcactaaataaaacaaaagttaatgaaaatggaaaatttttaatctattgttgcttaattttctaaaagtctctcattaacaatttttgcaaattctttgatgctgctgaccaccgcccatttccggacacaatgccaaattttcattttgtcaatgtgccaaaaaaaaaaaatttggtgctgcggcgtggaagaaaggacgcacaaaataaagttgaattacaattttttttaacattttgcgaaactaattgcatttaaatgttgctaggtagaagcgcaaaaaatgatcaatgggcaaatcctaaaaaaattatataaaaaatataaaaattgctaaaaataaaataaataaattttataatataaaatttaatttaatttcccattatttacatatattaatatgtaaatttaaattattattgattttattacgaaaaactaagctcatagggtacgaaaaaatcatctaggcacaaaaatataaaaaataaaataatttaatttgaaaattcttttaattaaattataaaccaaantatttcctttcacagaggtagtaggataaataaatgtcaggtttttaagagtcacacactg

SEQ ID NO: 4622 - DNA, 959 bp, Heterodera glycines
aagggaaacgtaagttttcggcaataatttataaaataattcatttactgagcaaattcttccacgaatggaagaaagaccagaaacaatccaacaaattctgctggggttgtctcgtcggtagcaaaagttgtcaccagtgttttggttggtagtgagtgccatggaactaccgggtgccaactgtgcaccacgaccgtttgggcatggcacaccggcggagacggcggtgaattttaatgatgctgctgatcacccgttgggctaaacaaacatcagcaccaactcaaagcttttcatctggtcttttacggttccgtgtgccatataaaactacaaaaatggcaggatttcatgaaactaaaatcaatcttatataaattttttaagtttgatatttacgttaatggaataaaataccttggtaataaaaaatattaatttttgaaaatatttttctagcacttaaattgttaagcatcgatttaattaaatgttattcaataaaaaatactaataaatgttctacttttatgctatgaaatataattaaaaaccttcaatgctaaatattgtaaaaaaaaatgccaaaaatatcgtaaaaaacgactcgtcgccaaccccggtggtatggcatgggcttaattggagtttgaaaaatttatgcattaaacgaaaataaaaataaaaatatgactcaattaattgcttcatagttttctgaaaacttaaaaatgggaaaggaaggaaagaacaatttcattggaaataagaaagattccgaagaatagccgaattttgtggaaacaaaaaaatttatgaaagaggcgacgaattgaaagtgccaaatttgtcattatattcttcttcctaaagcgtctttttcttcatcattttctgtttctgatatcccggggacgtttttgccttttcttcaatgaccatttttatatatttgt

SEQ ID NO: 4623 - DNA, 3310 bp, Heterodera glycines
  unsure (1)..(3310): unsure at all n locations
ccttgcgccatttgaattttcattttctcaaatcttttacggcacaagagatcatttgttcatcatacccataaatttttcttttttctataatccgacagaaataatntgaatattctttagccatcttaaaaaatttctttggatttgtcgctaaccctttgacaaattctgaaaatagcgcatcctcaatcttaatttgactaatttaataataaaaaatattttaattgaaggacttcacccattttgtttgctcttcaaatttcggaatggaaattatcaaatttcgctcattatcattcatttcatcatcatccgcatcatagccatcttcctcttgttttttcctttttccgcttttttaagcatttcctccaattttttgccaaaattttctcttaatattccgtctaaactttcatttgtttgccattcattcgctgtgtcaattgccaattgcaaaatcatttcattaattggcaattttggttcatttaccaatttcacttcataattcaatctctccacatccaacaattttagttcaaaattatcatcgaaaaattcgtttaatttatatccataattttgtcccacccattttttaaaataaaattgcgaaatagtggccaagcaattcgccgcataaatcagtggtccttcaatttcaatttctttcttaaatataaattttggcttcactgttggaattccggcatattctctgtacatacattcgtacaaaatgttaaaatatttgcgatatttttggcattctgtccgttcatattcttcaaatttctcctcaattttgtcacattgccaatttttccgcataaaatgcacaatgccaaggtgtgcctcatatttttgctttgaatattcactgatttgcattttctgatcgcttttcacaaacgaaattagcattttttcttctctctgataaaaaaaagattagacaaattaattgccaaatttatttaactcacgaatggaattgcatttgtaaatggaaataaaaattgatgaggaatgataataaaaaaaggaactaagtaattaaatagcattatgtctttctttattcaaatataaattaataaaacaatttgtcccttatttaataccatttttgtttacattaaataatgaagtaattatttataaaaagcaattagcaaagtttgcatattaaattttaaaaaattaattataaaaattggtagaatcgctatgccttatgaaccattaagaaatttttacaattgtccataatttttttttgattttaaaaagattgaaattcattattataattttatttcgcatttttggaatatttctattttctgaaaattgtttgtttaaatataaaacaatttaatttgatattttgaaatgaaaaaataaataaattttaaatatgaaactgaaagaccttttaaatcctgctttttagtaaacccaaaaaataaaattaatctgtataaaaaagatattaaatttttgaacattactaattctattggattataataaaatgcattaattaattcaatttgatttttttcaaagggtattgtaaaattgagaaaatttaattattaaaatgaaaaaatggaaataacactgccttttaaacggagtaaaaatggatttgaaaattgttaatgatcacagcaggataattcaattcaattttttacttatataatttatatattattattaaataataatgtaattattaaaatggtgattgaccataagtaggattaaccaaatctatgttttacttatataatttatatattattattaaataataatgcaattattaaaaaggtgattgagcataagtaggattaaccagaaggcaaggagaggggattcttctctctgcggtgccttttggcttggccaaaaacaacacaataagcgaacgagcagggtgaagagatgctgtaggatccaaaacatggtgacgtggcacatcagtggcagaatccagaaaaggaagaggaaagtgaagaagctcgctccgccaatgagtccgaatgtcacgtcaggtcgacaatcgggatttgccagtcgttcaaggcatatccaacaatcgatgagctcgcaagcatctcggcctggacattggatgcttccaatttcttgttgccccgtttcgtccagtacattgcttcgcaatcgtagtcgaaaagaagatgttccttgggcaaacgatgaaaggatttccgaacgcctgattgagtgatgcactgagtcccatcggcacaacacagcaagaatttggcaatcccatttgggatcaaaatgtccacgccggtttttgtgcaggtcagttcgcatccacgacaacgaattggaaggccattcccacgttttggcttagtcgtgctactggcgtttgtttgggaagcgccaaaaaataggcacatcagaatggacagaacggaggccagtgctttggtttttgagcgagtgaccatagaatgagtcgggccaggtgaattgcgccggtcacgcagctggcaaattggacttgagtccgctgtttgggttctgttgtgatgttcctcaagcggcgggtttgtcagctgctggtggctctcatcttgttcggcagaggaagtcacttccaagggataaagacgatttaggggccggcttagcacctttcctgtggccaatcgaattttggcgtttcgaatctccccgtgtgagcgttgtaactcgacaattcgtcccattggccaacagttgcgaggaagtttttcttccgagattagcacaacttctccttccgtgggctctcgcgcatgaagcaattagcttatttattttatcgatgtagccaaatatcatttttgtgttaattttgaaagtttttgagatttttatcagtttttccgaaacataaaaaatattttttataaatttcatttcctttaaaataattttttttccgttcaaaataggtgaacatagaaatataattgtactcctccaatagaaccacctgctgtcttgaatagagtataaaattcaattttccattttggtttttttctattttttctgcagctttatttcgacgagaaatgcatgaaaaacacatttttagctcggaaattcttcggtttaacgccactatttatccctaggaattcactattttggagctttgccactaaaaaaactattttggaagttggccactaaaatagttttttgccactattttggcgtttcgtcactattttggccacttggcattttttggaaaatttcc

SEQ ID NO: 4624 - DNA, 2013 bp, Heterodera glycines
  unsure (1)..(2013): unsure at all n locations
ctaaactaacatgtaaataaaantctgggtaggcgtttcagacacttctttctgaaaaaatatttaagaattaattttgcaaaaaataaataaaaacgaaagactcagattttcgaaaatttttttgagccagctagctcggcgctcatttcagtgtaagttagtcctttaccggggagtatccctgcaaagtttggtacgcttctgctcaattagcaaaaaatatgagtgatcgaattttcactaaaaaagttaagcctacattttttggcatatttaaaaagcaattaaaaaatttttaaaatttaataattttcctgcaccgaaggtactcactcggcctcttcgcggcctcgtgatcagcacgaataacacaggtaacggtagcccaagtacagaaaaccacagcgttcccatgttttgtacgtgccgcaaggacatcccaaatatttttcgctgttcaaaacggtgccacaactgctccaaaatgggctggaaatgggtgaaacattaataaccatatttggaactttttattttttacaagaaatccgtttagtcccagcaaaaatgccataaaaatgtaaggctatagctccccttcctgattggctctgactgactccgtcatagccttgttggaccaacacttaactatctaacacctaactctactatctcccaattgtaaattaattgcctctaattaatgaatgaacacttacggagccgctgcgcggtaggctgattctccgtataagcggtagtgacgacagaagcctggcccctcccaaattgagcaacgttttttgccagcagtggccctctaaaatttagttgttattttaaaattaatttattttaatttattaaaaaaattaatttacctccatacattcacaaaattggttgtcgcagctcttttgtcctatttgcttgttgtagcatctgtaattgaaagattatattttaaagtttatacaaaaattgatgaagattagggggaccagcaccatatttgccattgtgctcgtccgacttatcgtatttgccagaaatgccaatatgaacaaatgccaagcaaaaaattgccaaaattgtcagtaccatttttcaattttcttaaattatggacaatttattttaattgcccaattcaaaatgttccctatcatctgatgagtgaaagactttgaaattgaaaattatcattttatttaaattgagtataatttcaattaagaaatattttttatatataaaggttattttgagtttaaataaatgagtgaattcatttgaattgttcatttctttaaatgcatttcttttctgcaattagtttgtaaactcaataacgctaatcactcattagttaatcaaagcatcataacgctactaattaacgaccaattaatttcaatcaagttttgcggaggaagtcattttgcaattaggaaaaatttgaaaagtgtaaattgtgcgcagcagtgcaaatgtatagcgaatggactaaaaaacaaaattgttcaacccaaaaaataggaaaaaataattgaaaaaaacaagttaggtgagcaaatattctcgacgtaactctcccctatctcaaaatgagtaattaatgaattaataaactaataaaataattaggaaaaattaattaattttaaaagagatttaaaaaacgaattaatgaaattatttgatataaggtcaaaaaaacaataatgattacacatagcctagatgatgagctaacaaataaattaagaatttttataaatatgtcgaattaaattaaaggcgcaatgactaagtacgaaaagtgcaagattgggcgaaaaatacgaaaaggtgcaaaataggcgaagtgcgaaaaagtggaagtgatcaaattaaaagcaaaataataaattattttaaaaattaaaacaaaaattattttatattaattaaatttatcgtttttagtttttggaggtaaaaattattagcgaaaaatgtgaaaaa

SEQ ID NO: 4625 - DNA, 2348 bp, Heterodera glycines
aagattccatttttttttaaatgacaatttaaaaactcattttgaaagaaatgaacagaagtacattgggttcatccacattttccattgtacctccaagaaattgttgcatctctgtttccgtccggtcaaaaacaatttgtcaaaaagaatgtccgtagaacgggcaaaatttttttcatcaaaaaatgcgcgcgcaacacgaaaataggctttgtaatggggaaatcggagcagaataatgtcgaaagcagtgcgacacattcgcacaatttcatgttgcaattcggacgcacaacacaatgaatggacctgaaaaagaaaggcattttggaatataattattgtacaacaagggttatacaagcaattaaaatttagtcattttaccctatgcctaaaattaggctcaatccaagggagaaggtggaaaaatttcaagaaaaattagcaattttttttgtggatcccaaaaaaatggcggaaaatgggcattttttttgaaaattttaacctcttttattaaaattcccggcggcacttatcagcagcacctgaccccccccccttttaatcatatattttgaaaatttgtgaattgtttgaataattattttattttacttactttttattttaaaaaattcattatttttttggtaaaaattaatttattaaaaaattgtcttatagtacgatgtcatgacacaccgggagagagaggattggggttattttggttatgactgtgccctttaattgtatgtgatgagtgagtttcttactcaccacatcttcaatttctccattatccatttctgcagtcagctggcggccatcaatgctctttggttgttcactaatctgtcggttgttcttgtccaatgcacttttgtccagaatggattgcttatcataaaattccgagacggaccaatgactgtcctccaagcagcgacgctgtacaccatgataacggaacaatgtcaaataggcgtgaatgttggccaaatcggttgcacattgagcggatgtgcggggaggaaatgacgatgaattgagtgccttgagataacgcagggcataggcatgcactttgtaatgaatctccaacggttcaaagtacgtctgaaaaggggggattgggtgaaatgtcattaataaactaaatttaattagccgaaaaaattgggaaaggttagggggtgcaaaatgtcattaataaataaagttgagttaaacaacaaaaaatggtatagtttccagaaaatccatgatatcgggtacatcttggtttcgttttgcgcctttcggtagaaattcctcatttcgatatagaatttatggtttacaatgccatttcaaattcaatctaattttttttctttttatctaaaataaccaattttacaatattgtgccatcaagaaatgccgtcgatagacgtagttgggaaatgaaaaaattttggaagaaattcaaaaagaattacttacttcttgacaaatgactgtatcgaaataaccaaaatgtcgcaaaccgaaacggacagggctatcgtccatgattacctgtttgactcggttaattttggtcaaatattgaatgccttcctcctccaacgcgagagcacaatggtagtacaagtccaaaacctggaaaattgtcgtaaaatttttcatttaaaattttaaacaaccttttcgggctgttccccaagtttttcgccaatttttgcaagaaaataattggacagccaagcgacatcctttggcgaatcgttgaaacggagggccaggcaaaagtgcactttgcatttgagcaacattccctcaattttggtctgcgctttgcaccgcaattctttgctcacttccttctgaacggagttgaaaacagaattctttttaaactaaaatttatcaatgataggtttgattaaaagttttttttttgaaatttcccaaaccttttcgtcaaagaatcatttcgaactaataaaaaaataaaagaaatttcttaaacaaacctgcactttaaagcgcgcaaaacgtgtcctcagctggtaaatgattgtgccaacatccaggtgtgattcagcaaactcccagtgcaaaaacagtgccattttgaacgggaacacataggcctccacttggtcaagcaattccgtgtcacttttcttcaaaaaatcatatcattgtttaaaaaatggcattaaaacaaagaaaacaaagtgtatagagtgctatttaaaattccaaattgaagggtttgtcgtggaagaaaagaaagacgaaaagcattgaaaatttgaataaatttagaaatagtctaattttttcaaa

SEQ ID NO: 4626 - DNA, 2692 bp, Heterodera glycines
accgattgcccaacatttactccaccattctccctcagccgtcatgccagtccgataatggtagtgggcaagcaaataaatacatttggcacaaaattcggagtgtgcgtcttcttggttttgctcctgtttttgttggtcaccaatttcatttacagctcctgacattgggattgtcaataattgatcaaagccgagtctggccctcttcgcttatttgcaatcgctcttcatagccgcaacagagaccgtcggagtcaaatttctcctccaattccaatcggaacgggcaatggagcagttcatcgagggcatggagttgtgccggatcaaccgtcaacaacgggtcaaatgccttggtaagcagctcggccaaatcgcttggcacacgtcgatcggaacaaatgtccggcaatttttggggcaggatcagttcaagaactttggccgcaaacgcccaatccactgtccattgcagttttgagccatggtcaacaacacggttggaacggaaccgagactggccaaatttatcactgaaataaattaagtattattatttttataatgatagctgatggacaatcagaattttgtatttactgaaatattccggtaatttttttttaataattttcatcccatttattttaagggtgtccagcggtgccgcgcgtgataaaattttagaattcatttaaatgtaaatattaattaacatattttgtcaaaaaacaatcattttaaagaaagtaacaaatcttttgggtccgctaaattttttttgattcgatttggtatttattattacatatgaactttttttttggtatgaatgtccactaatattgctatttattgtttaaatgactgacctaagacagcaccgtaaacattgcataatttccaaggcgatgttgtcccgaatatctttgtacgcatctgaggcaataacactacggacggatggttctctgctcgcactcagaaattcctcaatcaacagacgaagaaacgctccctaaaggtataataaatacatattattgacaatgagtgttcgtaacatcaactatcgagtcaattccggatccctaacaaaaatctacattttttgtaccgtttcgaattttagcccgataaaatggacagatatgcacgacatatataaggatgtacttcgttgcctctcccaccaaagcgtttgctccatttttcagaaaaaaatcttataaaactttttctaagaaatttcaagaaaaaaaatttccagcgatttttttttgtaaaatttttcgaaaaactaataattcttcgaaaatttgttaaaaaataattaaacctcatttctggaacacttcttcgccttgcccaacacttcgtggcccttggccaaaagcatggtcgttttggtgggtaatcggcggtccaaaaatgtgttgccattggcacaacagttgtagaacttcctcagttccgcaacatccctctgttgttcaccctcctcacgaaacttggcaattttgtaacaccaacgccacaaatccgtgtgctgtttgagcttctcgtgtggtgctttcggttgcaacaatttgcccaaaaagtagccaacagtggcaaagaaatgttcagttgacgcatttcggtcctcaattcggtcggccgggaaaagctcatcaagcaaatgaagacaacggcgcaagaatcgcttggccacaaaggaagagagatcagtgccaccgagttcgttgagaatccttaattattgggataagaataggctttacatgacatttgtgccatggatttttgggactaggaaatgcttaaaatttcgatccaatgtttaaaatggattttaaataagttttttttgtttttcagttttaaattgagaaaacaactttaattgaaaagaaagaacatatcttttggcagattaagagaaaattaatttattaaaagttccaaattttgcgcaggcggcgcccatcggcaccgccgaagctaaaacccttaattttcttaaaaagatgtctcaatttgcaaaattcgctcatttataaatttaatctgttaataaactacactcaaattttcaaaaaatttttcggcggcgcctacctcataccccaaattttttttgtaaaaagcgccgcaaaaaggtgggttaaaaagcaaaaacaatatgctcttttaaatttactaggtcgtcggtgcataaaaaagggcgctaagaaaaaatcctttgtcccaaagacaagtgttttctccttggccttcgttttcagaaaattcgaataatcgccccataacacaattttggaaacttgtgcgattctgtattttttatattattttaggggcataaaagcctcaaaacccgatggaatattttggatttttgtttttgactttcgggttggccaatagatttggaaacttggcccaaaataaacatggccaaaaaattttgtttttttcctttttcgaaaaatttcttttcaggttttttcttgttaagctccttcaatttcctaaactgaccaagttttaaatccttttgacatttttaacctccaaaataagggcgcttgtgtaaaatggaaacccaattttggtccccttaacccaatttttttggggatgggactttaaaattaaaaggacaaaaccaaaatttttggtaaaa

SEQ ID NO: 4627 - DNA, 2964 bp, Heterodera glycines
ttgttaagctcatcaaatttcataatctgaccaagttttaagtcgttttgacaattttaactcaagttatggacgttggtgtaaaatggtagccaaattttgttgaccttacccaattttttggactgtaactttagatataaaaggacaaaatcaaaatttttggcaaaaacatgacgagaacattcagataaaagaattacacacaaaaaagacataacaaacgttaatcaagtcttaaaaaaagtcattttgaaaaagcgcccttttttatgcaacgacctattaattgcacaaaaaaaacgtacttggaaatccattcaccaatgtccaaaagagagttgtccgtctcacgaatgcattggatcatcaacaatttctgctttatgtgcgcatcctccgagtccgatgtccaatcgtactggtggaggaggacatttttcaactgaaatttgaccgatgacaaattatcgtagtacaacacttttaaaaaaaaaatttatgcatttttttattttcaaaaaagtttttgcggtaaatttttcttattttttcgggtttcgttttttagatcttcaaactctttttcttcattttatagttttatttttttttaatatgacctcctcatatcgtttggcttcaattaggtagtcaatttgttgcagttggaattgtcgcacccttttgcgcaacaattccttcaaatttcggacagtcaaacagctgaggtcgaactcggcatggctcagcagtgcccattccggctccatgagagccaaagcagaagtaagctgtgtgtaagtgtgaatgaagtggaaagcctccgaattgggcaggctaagctcgtcgggcaaaaggttggcaattaacctgaaaaaaagtaatatgacttcaggcccgtagcatgggggcacgaaaaaaattaaaaattctaagcaattttaaatattttttggcatttcaaaaatttttttttttcggatattagaaatagcattttagatgttaaatttaaattaccatttatagcgcacctccaactgtctgcgaatggtcgagagttctgagcagtcttttggttgtcccaagtgattatcatcatttttgttaatgctttcatttcttccaataactgaaaataagcatgtttacaaaagctgaaaatgacatttgaagacttttaggttagttggtcaaaaaatgtgtgaaaaattttttttggcgagggggggggaagggtcgcctcaaataacattgatgaattttttttaaaacaaaagcacacccgtaggggaccgactgttgttgttgttgttaccagccacagtctgtcgtgtctgccgctgctcagcttgaattcgatggaacacccagcggaacagtgcgtcgttgtcgctggtaagcaacaacttttgttgtgcatggccatcgtcgtccactgatgtttgtcggtgaaattgatattccgtaacatttccattttcttcagcattctctctaattggaatggttttgccatttgacgcgtgtgccgttgctttttgtttctgttgcagcaaaagtcggccataaaatgcctgcagaatggacagtgcccgatgtgagccgagttcagcagccaattggtgtattgccaaatctgactcggtgaatgaacaatttgacaaacagaacagactgctccaccgggcatagacgtcactaaaaaatagtttttgtcaatcccatcggcaccgccgtgtcccacccttcaaaaattgtttttgaaaaaatcgtggcgaaaaaaaacaaccaaaagcagtaccggtaggcttcgacctgctccaatgttaggacaacaaatggctgctgttcaaaagcaacccaagcaagaaaagtgtagagaacatccgggaattttgtcgtttcaaatgatgtttcatcaatcaatttgacgaaaagttcatcaacacttgacaactgttgcgggctgttgatggcatcgggcataaactgcatggattgccggtgattggacaccgaagcttgatgttcttccaactcttgttcatcaaatcccatcaaagtcaatgcctaaaaagaattaactttttttttatttattaataataaaatatattgaaaaaaccaaagaaaaatttttttgaatttttttttggaaaattttcgattagtaatttattataatttagaaaaaattataaaaaaggtgtaaacgaacatccatgcgtgaatcgttggcctgtgtttgcctctgtttgtttgagtttccaaaataatccaaatcgtcgaataaacgtgtagaacggcgtaaactgatttcgtcttgagtttccggcatggcggtggtgccggcggctgcctcactttcttgggacatagacactccttgccggtcccaaattgtagcctgaaatttttgcaattcgaacaattttcttaacagttcattaatagaaaattcaaaaaacaaaaattttttcctcgaatgggacccaattactaaaatgttctgttaacaaattgaactcaatttttcaaaatttttccgccgtacccttcccccttccgtaattattttttattgaaaacgccaaaattggtgtgcggaatcaaaattcgtggtttacagttttacacatggctgggtcccctttcaaaaattggcagtgatcccccctccctcggacccctttgattgattttggttgattccccccccccctgcctctctttcatctatgcatttcaccgaccacacctacctgctcattgtgagactcattgttttgtggttgttgttcatcggtgtcccccctctccatcgcgttttggttttccgaaatttccgtctccgtggtcgcaatttgctccaacaatgtcattgcattcggctcatcagacatcaaagactgccgcatatggtactcgacaactccccctcctacaagggaacattaa

SEQ ID NO: 4628 - DNA, 2188 bp, Heterodera glycines
tgttgaatcgtttttgcttgttttgatcggcatttttgcttttggccttttcccccaatttattccctttacaatgctcttctctctttcttccctttgatgttgaatttgttatcccaaactaatcccttcgcccatcccctcgggcatttcccaaaaaacattctctttgtcttttttttgatgtgccgactattcttcgtcttaaccctttttgtttcttgtgttttctctcctaaaacccttttcccgatctttggacaccatttggatttcttctcttctcagtttttcattcacattttgacataccacattaaccaatttaacttatttttgtctaaataaactttgtccaaaaaacccaatcccaatttgctctagttttggtataagtgttggtcagacacaacacaaatagtccatttttgttttaaaaaatataaatgaatttcacccaattttttttttcacaaaattgtaaattactaaggtaatcgttgttgaaataatggacgagcaaaagtgcttccaacgcacgaaattcgtcttcacattgcgtcatgcaaaaagcggcggaccgccaatcccttcgacgaatggcacattgtccacaattaaaccacagatctttgaaatccggtcttatacttaaagcctggcaacaacaaaaaaacagtgtaatgtgaaaaattagtaatttttgctattggaggcctccgaaaaattgcaaagggtggaccctttttggaggaatttagtaatttaaaaaaaaaaaattttggggctctatctcaacaggtaaagtgccaaaaacttgccaacctggacataaaattggaacgggtccttggccagtccactcatggccaaattgatgttgaaatacagttttgccatatttggcacaattcgttgcgatgaagtgccgtcgccggcagtcattgatttttgccaatcaaatgttgaccagtcagcgatgtgatatttggacatcaccgggtggacaagaagtgccgaaaatatggagacagccctttcaatgtttccctcttgcaaaaagttcaaagcacttcggtatttgtcctcaatctccgcttcctaaaaggtttttttttaatgacgaaaatgaaaaaaaaattccagacggcgcctagcgaaaattcagaagaaaaaatagtcagtttaaggcgaataactattaaaacagtgttatttttcgcccatagagactataattttggaaaaaaataacattgaaaattttttagaggaagaacaaagaaaaattcttcggattctccattcgattttttgggcggttaagagctgattaaacctaagctgggagctgatttttttttgttgaccgaaacagaaattatccttttctatcataaaaaaatttcacttttcattttgtggcacggatagaaggaactcgcacaaaaaggaggtccagcattttggcagtgagttcaatggctcaaattcgggccacaaaatataaaagtaccaaaaaaaaaaaattacaataaatatattattaggaaaacaaaaagtttatgagtgagttttacttgtgcttcacgagatgttcgtggattgtccccatcttcaatggatgaccaatcgtcgtccacataatctgaacactcagagcgcaccggggattgatcacgaggacagtcagggcaagtgtaaaacagtttaaattgtgtatttgacgcttcttttacggtggaagcagccaatgacgaatcggtgtgaacatttacagctacagattggcctgaaaaaacaaatatttaggtaattaatataaaaaaaaaaattagtttagaggacccgatagaattttgcaaagaactaaaaaaaattacaaattttaaggtccttatgggttttcatcggatccactaaattgcaaaagcgctgaaacttttgattacttatgggacttaatgagtgtgaatgttgttgaagtccatcatcgtcattaagtggcgttgaattggttgagttcagtgttctatttgttaaaattggaggaaacatgtcaacaaaaaaagctaaacaacaaaatataaatttttaaagctagacattttgaaaaaagtcgtggatagcgcctcaaaatcgccggaccgcaaaatttttgaaattaactcgtgtttttaaaattctg

SEQ ID NO: 4629 - DNA, 486 bp, Heterodera glycines
gttctatacaaatacaacctttgtgtatttgacgaatattttgaatttctaaaattacaaaaaaaagcatcaaaggatttatgagaacaaaggtaaggagaaatgcagggaattcacagggaaagtcatgaaaaataagcattgtcttctataagcacagaaaagttgcgaaaatcatcgaggacagcgcaaagagaagggaaaaggaagcgccggtgggcggcgaaagtgcggagttgcagggaaaggtcgcctgaagaatggggggagggtaaccgtagaatattattcagtccgtagtgcagatgattcattccgtacaaggtttcccccccccccccgaacccttgtgagtcccaacccctcccacattttggtcgttgatgcactggtcgatgagcactgtgacccctttgttgccggtccgtcgctttccgtccaactcctcgcccgtgtaagcgcattccctcacgatggtcgtctcgt

SEQ ID NO: 4630 - DNA, 6708 bp, Heterodera glycines
cttcaaaaaaatcaataaatttccaaaagaaaaagaattgaatttctcttaaacaaagttccggaccgaaagatgactgattttgagtgttaaaaattcatttaccatcaatcaaggaatctaattaattggtgcggtattttacacacccaagtcgtctgttcccctcctccatagtgatcgggatggacgggacagtaaaaagctatcgtagaatccacttacaaaaacaatcaacttttcatatttatctacccttgatgtgtatgtatgatttttgagcttgtgatcggtcaaatttggtcaaataccaataaaatatttatggagaaaaatcgatttaaaaaacaatcaaagggttttattagatgtcattaaacagtgcatattgagctctttcgaggggaggaacaaaatcgagccagtcggaagcatggtttgggagaagacccatcgtgtgaccttgaaatttgaaataattaacgttaaataaataaagttaacgaaaaagcatacatttgtacacggccaatgcaattgcgcataaattccccaaggcaaaaacaattttgtggatccaaagtgagccgacatgctcttgcttaaagggatgaattaaaaaagggactttcattgcttagacacctccagcggtttaaaagcagcattgactgacatcaaagttttcatcggtctccacgccatcattacgaccatctcaaatgggcaaagtccgtcatagcacccaccattccccgcccaaatgtcaattttgaccaatagtcatgaaaaccgaccataattgggaaaatggagattgtgttgcccgccatgtacatcataaacctaaagggcagcctagattcagtcaccggactttccctatattcacccacatattcatcggcaaggatttcaccggctgcagggccaaatcccacgcccttttgctcaacaaatgctgctgctgttgctcggctctgttggccgattcattcttaaatgaggcaatgttatggtcattagtcatcccgtgcccacttgttgtgtagtgctcagtccgggattataaccgggcgggttcagactctggtcagctgctgcacttctcagcatcaacgtccgcgacccggcggacccacaaaggtccaagcgccatttgttcatcggattggcaagcggaatggaagccatttgcaaaacaattatttagtgagcaaattagttagttatatcaatgaaaaaatattttaattcaatgaaaataatgttattaaaaatttaggtttaaaacagataaaattcagtgagaaaatggtaaaaaaaagtagtcgcaataattgaaagaaactcagagatagggcagaaaagcaaaaagaatcattaagtttatcaaaagcgcgcatcaataaaccaatctttcttcatttgacttggagttgggcaagactttctctcattttggtcgagtctttgaacgcataaaccaaacaataatgctccaacaattgcgttaacagctaaattaaccaattgtctaactttttcatttaaaaattcacttctttctcatccaagggttccaatgactcgattctgaaaaaacaaaacaattattatttcacgatagatgggaaaagttaggtaaacctggaaacttcctgtctttgaaagtgctgactgtaaagctcactgatagtccaggcttgtacatgtgaaaagccaacattcaaaaacctagaaaagaaatacgaattgaaaaggggcagagaagggtgaaagtgcctttgtttttgggtttggagagatttgcacgtcgacagaccgggaagatgaatgccacgactgctgagattggtcgacatcactttgctgaaggggaaggacagataacatataataattaattgctctttttgagtgcgttttttcctttttaacatttccgattacctgaatgtgtccgtcatgttaacctgaacaaagtcacacaagttgatgtatttttacggcttgtaaaatggttaattaacaataaatgcttcacctgctcgtagttaagcacagcgactgtctcaaaacgtttggcaacatcttcaatgagttcatgggaatgtgcttcatccatgtaaacaaaaacacactcagcgattacgagggtcggctgagaaaagtccaaatcggcagttgccaatttcccgtcaaattcgcggatttgccttaggtcagtgcctttaaaaatttaggatcagtttcagtggcaacgtgtcaagtgaccgatgaggtggtaatcgccggcatgcaaatcgctgtgctgtttctcttccactaaaaattaaaaccttaccattaacagtttatgcctcaaaaatcattttgcctgttttgctgaaaaattccgttaaattcacatttttgttgcgtttgatctgacaaatctttttggctgttacgctgctgaagtcgagttccacaaacttataaaaactaagcccagcatctttgagtcgccaataaagtgtgtcaaatcccgcgcccaaattcaaaatttgagttgacggaccggcaagctgagaaatgcatttcaatcggaaacaatggggacagaaagtgcctgaacaaattgaacgaccatcgaagtgattgcgtttgtccgggcccaatagccacgagtgatctccgggtctctgtggtggggcttctccgaattgcacgcgtggatgaaagccgggataaatctatcggagtagtaacccaacttaagaaagacagtgattaatcttgaaaattgaaaggaacacctgcgcagcaacgaatttgcctaaaaggggaaagcaaatactatcggaattgattgatgttataagattaaaattcaaataagtatgatcaaaatttgaaaattatgttttttgattataccaaaaattatccatttgagggtttttgagtaacgcccccaaatccccttccaaattaaagtggacattgtcggggtcgctgattcgaaacataaatccaaatttcgaaaagttgaactcgattctgttcgaattcgggcccgggtttagtaattggtcgaaatggatgtcatattcttgatcagcggccccgataacccccgagtggaccgaagaaccgcaaaaaaacagttttttttcttttttttatgggaccagtaaaagtcagtattactgcccttgaaccggttgaacaactcactcacattccgtggcgtcgtcgttcgttttttgcaccgaataatcctcagacactgaagcggatcgccgtcgatgactcacttccgtactgagcaatccggaatcgaaatccgcctcagcttccattaaaatcttcagtagaaattttaaggatattcttttgatactgtaaatataatatggtaaatatatggacaaaacaacaaaaagttaatgatgcgtattgtataatagtgacaaatagcagaacgcttatatacgtttgtgtaccaaagagagaagggagtctattccgtcttttcaatcgttcaacgtcgatctttacaatccctgctgaagcccaaagccgggccccggcggtgtctccgtcagcgtcgtttgtttggcgaggggctcggcggctaaacggccgctcctcggcccgggcaaaggtcgcttgcccgccttgaactcgtcgattatctcttcaatgtcccgaggggtcaggtcttcgtagtaatcgtcattgatctgtcaaattcacaccaaaattacaaagcagaacccatatggcaattagacctgcaccatcggagcgttaacacaagccccgagacattcgacctcctgcagcgaaaagagtccgtccgccgttgtccctccctttttgatgcctaaattcgctttgcataaaaagggttaaaagttcgcctttttgaccaacccaatttcttctcaattgcctcgatgattgcttctgcgccgcgtaacatgcacggcgtagtgccgcacacctggagaaagtatttgcccacggggtccctgttgaacattgtgtaaaaggtggccacttcgtagacgcgcattcgaggcatttctaagaaacaattgactaattgaagggtgaacgttggccgacccaaaacacgtgccacttcgtgcattgcggaaatgggcagccacccgtgctgccgctgggccaagtccaacacgggaatgagagcagctcctttatgtccctccgggaaattgttcaacagcaccgtaattttggccaaattggcttccgtaaattggaaaggcgtgttcggattgttccgctcgttgtccctgtgcacctgcagtccatgggcttaatgaaaggaatacgtatgaagaaacaattaatgaacgaaatgctccacctgagtatcgcctcaagggacgcgcagcaaaagaacagccaaaagggaaattgcgcaaatgcttagcaaacataataagccaaaaaaagggaaacacactttaacagtgaagggaagtgaagtaaaaatgaacaaaacataaattgggagaaacgcatttgaataatttacctttttttattcataattgctttttaacgataacaattgagttggacaattaacgcgggagaattcacatggagatcaaagggtaaacaattaaaagcacaaaattatggacccttattaatggtaaaagaaacgcacgaacaaagaaaaataaataaataaattctaaaataaataggccagttttgaatgagttgccatgcacaaacagtcagtgtaaattgttgccaaagttttcgcactctcttcaaattttcgccgactgctgctgactttgagcggctttttgacaactttctaaatcatacaaaaagcattaaaattagttttttaaaaaggcacgaccattccacaactgctcttcagcagggtcggggttgtcagagcaaaaatcgtttgagtcggcggtgtcgtgatcggaaaccgggtaatccgagccttaatgatgggggggggggaagcggttaatgtgccaataagtagtcaattaggttaatgtgcaaatagtagtcgtaaaagccatccaaccttcgctggttgtctcctcctcttcctccttcactttttccgtcccttcctccattccgttggtgccgctattcccctccggcccattaatttcgttctcctttcccattgcaaattcggtccttcctcccccctcattcggctggtgactgccacagttctgtggagaatgaacaccatctgaagaaacgaaaagcaatgaaattgaggaagtaatagcaagaaccagtggggcaatactgatgccaatggtggacaatgatcacgggcgcgggtggagttggagctgccacgggcagctgaagaggaggaacaccaagaaatgttgggccgggtaaagagccattgggagaaatgggctggcaatcagaatactttggacacaattcctcctctgtttcttacgagttgctgattcctcagctcatactcagctgagagcgattccgagtagagcgaaggagtggcggcatgcattccgagggggccgtcattcggcccattttgcctgagtgacgacaactgtccccgctccactcgcgatctgtgccgtcctcgggccccttccaaactgctcagttttcgcctcctattcctccccacattatgcagtatcgaattggttgttgatgctaatgaatgaatcattagttcggttcccattggccatcccatacaatcgattgcggcatatccattcgaatacatcgaatcagccaccgatgctcggcaattgctgtcgctgctgctgggattcgttctgggtccgttcgttcgccgacgttcttccctttccccattctccaaagtgtccatttcgaattcatttttgttgtcgtcgtcctccgcttcctccccactttttgctttttcatcgtttttcgacttatgcaattttgtcaaatagtacgaaaccacacaaagtgtaagggcgagatggaatacgacggcgagcgaattggcgtaatgccaaaacggaatccgagggatcgcgcgacaattttccaaatgctcattgcccttccatcggtcattcgaaagagcggacagagaacagctgaaattcacaatttgtgaaaatgggaaatggaaaagcaaagcaacagacttaatttgggcggagagcaaatcactttcatccatctcagccaaagggtaaaaactcaaaacgcagccaaaataagcaaacagcagaaaaagcggagagatctgacgggtcaatccgtcgacaaatctctgcgaaaaagagagttggccttgttcatctcggaccattgcttcgttggcacgaaatttggcttcatttttcccaatgtcaggaagggaagaattgtttagagtttcatctacgagcatttggtccatttgaggtccctttttaccattctctgaaagaataaatgtaaccaaaataacagagaaaatgccaacttttagagtcgtttttggccttggataggaaaaggatgaaaaatgccaccagcaacaacagaacaaaatcaacaaaaataagccaaaccgaatgaaagtgaaagtaatggcacacttttggcacaggatcaattgaaatctgaaaataacgaaggataacaaaaagtgtaaaaacattttagcacaacctctct

SEQ ID NO: 4631 - DNA, 4610 bp, Heterodera glycines
  unsure (1)..(4610): unsure at all n locations
ggtatagttgtttgatggcacgttattggatgccctccagaattcggcatttgccgttgaaaagtttgatttaccctaaacgaatttctggcagccgattgcgttgcttccgctcgggctgcttgtgcaatgaattcatcaaatgtcgctccgggtctgcgtgtcatttcaagagtgatcgccaactcgggattagaaatggctcttataaagtgcatgattgaataatcatcgtattgctgttcggttaaacccggataagcgcggcggaccaaacccgaaattctgttcccgagctcatcgacactctcgtttggtcggcgccgaattccgcgcattagttggtcgaaagacgtcaattgtttggcgtctgtgtcgtccaactgtcgaataattatccgcctgattagctggtattcatgcgggttttcggcaatagctgaattgtaagccctctctgctttgccaaagcatttcgatcgaagagcgcgaagtcgcttatgctcaggccattcctctgtcgctacatcaaactgtttaaaaaatgcgttcactgcgtctgatccgctggtgccgtccaaattcggaatagagttcagagtcattgtgtacgagaagctgtctaggcttctaatggcctgtgccatcatgccatcaaataccnagtccggngtggactggctgctgatattgttcgaactgaatcggatgattntctctaattgcacattntggttgtgatttggaactggggagcttgttggggattttgtgccttaaatcgctgagcataataatcgtcattgtgagcgtaggcatgaggtggcgggttttgtcgaaccaaatgatgctggttttcggcaaccactggtcttacgccttggagaggtcggtaccgttcagcattacccggggcattctcatacaattgttgattcattcggtaactgtttggctgtggtcgttcaatggcagtaaaattgttcctactgtgccccgtttgttgattttgcatgacattcatgtcacgcctttgatttcggtcgggaattaaactcaagttttcagaaaaatgcagtctaagatcgcgctgtaaaagtccaaaatcgcgcgagtcatgcggtgtagaaaatattggcccatcattcgcatttgcatttactgttccaacttctaccactccaccaatttgttcaccccaaacttgatttcccacattttccctcaaattttgttgtagaaccacaccattagcattttgttcgttgtccgcgtccatttcctcatactccaactgctcatcatttgcgctgagttccattccgacaccgataagtcgacgatttgcggttcgctctaaatcattcacatcattcccatttgctatggattcattttcattcgaagctaagggcgagttcggtctgtttccaaatgcttcgaaattcccggtccggtgcgcattcccatcacggtcaactactattccgtgatttaaggctcttgtccgcgtcagcggtggtgtgcgaatcactcgcattacaaatgagttgtttcaaatttcgtcgttccgtcgaacaaaacttttcaaatcgcagcaatgcgttatttgatgaagcggcgagcccacactttcgcagcaatgcgttaattgtggggcaaaatcggtgagtcgcaacaatgcgttagaccacagaaccgcaacaatgcgtttgttctgttcgatgcaacgcgaaagtgtagaaccgcaacaatgcgtttgttctgctcgtctggtgatgaagtgtcaactcttcagcaagccaacagacggacaatttgttgccggagaagcgaagctcgaccaatgagtaattcgcttttgttgaacgccgagcaaaactcggccagaagaaaatttgctttttgtcaaaccccaggaaatcaaataactcccctttttgtgcccaatctcgcccttttaatgcaaaattcccgacaccgcttactcagttgtccaggagcgccacgtccaatttcaattgaattctcctcctttttgctttgccactcggggcggaatagtcgacgtccaggaatgacgacaagaagacaagcgaacggactgtagaccaattaattaattaacacaggcggggaaaggggccaatgctttattaattaggacaggcacttcggtcagggacagttcaattacgtttattttaaattcaatccgaagaaattgacgaataattaaatgcacaccaaatatttagagagaacagtccgaagtaaaatgtaccatgaaaaagaagaatgaattgatggagacatgcggggaaatttagcaaaggaaatatcgattaaaaataacaacataattagagaaaacaacaaaaagaaaggaaaacataattataggtcagaggtaagggagaaaataacacaatttatagaaataaattaagcagagagaggtcaaaatattcaatttaacacagcgcaacccaaaaaaaaaaggcgtccctgccgttaattcggcatccgttaggtggtggcctgagtaagctaatgtcggctgccccttggcacatcgttttggttgtaattttttgaagagtatcgacgggcattgttctcacggcgatgaaaaggcgatcgggaacgagaatacgggcggcggtcgcatagacccaaccccccacgagccgaagaagacgacgaagtccctgggcggtcgcatagacccaacccatggacgttgttcacggaagaaacactggagcggaggctgcggatcccaagctggcgattgtttggccactgcgggatttgggtgttgatccatgccgacagtgtcttaatgcgttttccgtcagccatccgtccgaattgattcgacttcgatcgaacgactctccgtatctccaaatctcgacaagacttcgtcctgaaggagtcacacaaacgaaccaagtgcccaacagctccgccaggcgagtgttcaattcttggcaggccaactcgcatttgcggacataaggcggcggcaaccaaatgaacgacacggatgagaagcgtgagcaaagctgttggattcgctggcattgctcgacaatttggtcgaccgtttcgtccttgaccagtgagtcacgcccgaggatgactatggcggcacggactttgctagagaagacacattcgctcagcggtcgaatcacttccgacaaaaggcctctttccgtccccacaaattgcgtttgggccttcatttcgcaaagaatttgatatgctgtggaatcgccgatcagaactcttggcgtttagacaaagatgcggcaccggtgaatgacttgcgcacgtactttctccagggtccaaccggtctcctcgagcagtgagccccaaccgtcgcgttccgtgtccggcaattttgagacagcttccggcacgacaacctgaagtaattccgagttttctgttgaatttttgcaacgtttttccactcggatttggtcgaatccagacgattggaggagtttctttgccacggcacatttctcgcaccacaaaatccagactctttccacgtcttcatggtttggaaagatgccggcacggacattgtctttacggactccttcgtagacgaccaattccattccgggttcggtgccgagaatcagttgcaccaaatttttagccgccgaagatgaaactgttgcacccgaacgaaggatgaacagactcaaaagggcttggagaggagtgccaatttccacattgcccggctcagttttcgcgtccagcactgggtccaactcgccgcacaaaatttttccgcaaaattcgtgggtttccccttcacacttcatagtccacgaaagtccgtcgttttctttctgctggcgctgctgcatctttcgttctcctaaattgtcagttgtccctaactgattaacgacgattttttccgatgactttaaagaattttccccaaattgcgtctgtaagagcggttcgaactgtccaaaaattccttttgtgtctaattttgaaagttttaagctggccaatagaattgtagctaaaatatttcggtaggggttttttccatgaggaagggtagaaatgtcgggtacaccgattggaacgcgcacaaggcgttctattggaacagtaattggttctgccgattttttatcaaccgggacaacactagcagatgattcgagtgttttgacaatttcgtatggtccgaagtgattccaatgtaattttttgtgctgtgtttttgatttagagccagggtaaatgaccatgcagcgatccctgactgcaaatttattcatggaaacatttggacgtaaatcatatctgtttttggtttccgcccgtgaaatttcggcatttttacgggctgagtcaagaattaataacaaattttctttgaagaattgcaaatatgtctcttcatcgattgtgtaaagagggtttccaaactttttgacgtccatttctcctgngaaatcggcaaatttcccgaacatcaggtgaaagggtgagtacccagtgacttcagatggagtggtgtataagaaacataacgaaggaanngcgtcgtccca

SEQ ID NO: 4632 - DNA, 1550 bp, Heterodera glycines
  unsure (1)..(1550): unsure at all n locations
ggactccttcgtagacgaccnaattcattccgggttcggtgccgaggatcagttgcaccaaatttttagccgcagaagatgaaactgttgcacccgaacgaaggatgaacagactcaaaagggcttggagaggagtgccaatttccacattgcccggctcagttttcgcgtccagcactgggccaacttcgccgcacaaaatttttccgcaaaattcgtgggtttccccttcacacttcatagcagggctggagcgtccgacgttttctttctgctggcgctgctgcatcttccgttctcctaaattgtcagttgtccctaactgattaacgacgattttttccgatgactttaaagaattttccccaaattgcgtctgtaagagcggttcgaactgtccaaaaattccttttgtgtctaattttgaaagttttaagctggccaatagaattgcagctaaaatattccggtaggggttttttccatgaggaagggtagaaatgtcgggtacaccgattggaacgcgcacaaggcgttctattggaacagtaattggttctgccgatttcttatcaaccgggacaacactagcagatgattcgagtgttttgacaatttcgtatggtccgaagtgattccaatgtaattttttgtgctgtgtttttgatttagagccggggtaaatgaccatgcagcgatccccgactgcaaatttattcatggacacatttggacgtaaatcatatctgtttttggtttctgcccgtgaaatttcggcatttttacgggctgagtcaagaattaataacaaattttctttgaagaattgcaaatatgtctcttcatcgattgtgtaaagagggtttccaaactttttgacgtccatttctcctgggaaatcagcaattttcccgaacatcaggtgaaagggtgagtacccagtgacttcagatggagtggtgttataagaaaacataacgaaaggaaggcgttcgtcccaactccaatgagaggaagtggactttttaagcatgttaattaaggtttggttggctcgttcaaccgctccgtttgcttgcgggtcgtaaccagctgtcgtggttttctcaattccaagtattgcagaaattccatttaaagtttcgttaacgaattctttcccctgatcactgtgtagcctttttggtactccaaactgcaaaataaattcctttacgaaggcttgcaatcgtttctttgcttttgtccggaattggtattgctatggcgtattttgtgaaatggtcaatgcagaccaacacatagcgatttccgctttctgatggaccaatcgacaaaatatccacgcaaacaagctcaagaggctccgtagtctgaattattctaagcggaggctcatttgaccggggttttcgggtgtgtgcacagattcggcagctcagacatgtcttaacgcagtcggcgaacatattaggccaaaaatatttttccgataattgacgaaaaattttctttgcactaaaatgaccggcacaatttcccgaatgacg

SEQ ID NO: 4633 - DNA, 3315 bp, Heterodera glycines
ctcgtctcattctttttggccagctccccccgactccgtccatttggtcatggcccctttggagctgtcccccgatgccaagtcggtccgttggttggtctacgcaatggaaagtataataaacgcaattgtgagacatcaaatccccaatttgaatgcctttgttctcccttgtgaaggatgcccctcaaatttgtgccaattctgtcgctggcaataccgaacttcgccctcaaatccgactcgagctgttcatgcccaaaattgtgttgtcttctccctccaccgactgtccgtcctctctctctcagcaaaatgacccccgtctccccaaacggctcattttgcaagcgtccaccgtccttctctccaatttcatgctcctcaacgatccgttggtgccattgcccataatgttcagagaccgattggacgacaaacattttaaattcgttgattgggcccagaaaaacaccgtggagacaaaactattggacgaattgcttaagaaaagccgaaattccatctcgaaaaaaaacggtctgttctttcaattgtgcggaaaccgtagacccatttttatactccttcacagtttattttcaaaaaaaatgcccttgagggaaaataatgttttagcatcttttggtctaaaaatactggacttgaggatttccaccctcatttcctttcgaaaaacataataaaaaatttaccaggaatcaaaaacttttcaacaaaaaactttaaagaatttgaaaacaaaaaccaaaatgttaattattattagttctctgacttttgtatgtttaattttggaggttaggtttagacaatgccgacttctttttggaccatgaacagcgcaacgaatggattctatccattccgtcgctttggaccaattgcgacttcggtccaaacacgtgggaactgccttttttgaccgatttgaatattttcggctcaattcttttggacgactccgatggaagctgtcaaagttttctgacttgttttattttttattttaaattgttaattaatatccagagaattgcattttggtggagccgaggacagatttgggcataacggtcgaccacttccaatttctgcatttgaacaatttgctgacggaagtgagctctctgatggatcagatcaattcgggttgggattctcttggaatggcattttgtttctacttttatagaccgcactttcttccggaccaaattgccgaatctctcttccgacattcccttggccatttattgtcaatgtcaaaaggtgcttttttgggttagccgacatttgcggaccgacttttgcggaccactatttctcgatagaactgtctaaataaagaaaaaaataataagaaattttaataaattcaatattcccaaattgaaattagtgaaggtaagctgatgcaaagcgatctgtctcaattggagacaagtcttatttgacataacttttttctttcttttttatagaatttctaacttataattaaactgtgaaattggcgaaaaaattagctaaattaaatataaaagtcagttcaagaattttataccaagaaaattttttatcttgtttcacttccacgctttagttaaccgagagcttaattttttccggcatgtcaaaccaattaaattaacaaacaaaaactaaaatagtttatatttttctcaaaaattgtccgtaatttgctgttattaaaactatgggtccaaaattaaaaatgtgcaactacataatatatttatctatggaaactaaacttctttaaaaaatgggttctttcgatgttgattgcaaaaagttgatcgattactcttgaagggcgatgttcaacttggtaaaaatcacaaataaaactacttagtcactcaatttttgaaaaaattatttttttttgtttttttttgacagttcaacccagaaatagtggtccgcaaaagtcggtccgcaaatgtcggtccgcaaatgtcggtccgcaaatgtcgcactacgtcttgtaagagcttttcttttagtttgtcgactaccaatttttctttctctcccatgacaaatggtgtgttctttttcagaaggtggaacaatggcgccgcaatttctccaaatccgtaaataaacttacgataatacgtcatgaagccaaggaaagagtgcagttgttttttggttgttggaatgggcaattcaatgacaggccttattttgtctgcgttcatctttaagccttgtcgtgttaacacatggcccaaaaaaggtaattcctcagcggaaaaacggcacttttcaatttttaatttcagttcggcatcctgaatacgttcaaaaacaatcttcaaatgcttcaaatgttgttcaaacgtctcagacgcgaccaaaatatcatcaagataaacgaagacaaaatcattgatcagatcttcaaaaagacgagacatgaatcgctggtaagttgctacagcattacaaagtccaaacggaagcaccgtgaattcatgcagtccaaattctgtgacgaacgctgttttttcaatggacttctcgtccattttaatttgccaatatcccgaaaggaagtcgagggttgagaagtatttttttcctcccaatgcgagaagaatgtaatcaatgttcggcaacgggtatgcgtctttcactgtgaccgaattaattcctcggtaatcaacgcaaaatcttaagcttccatcacgtttcgggacaaggacaatggggcttgcccatggcgattttgacggccgaatcaatcctctgctcaaataatcctgaagcatcattgaaactttttcacgatgtgcaaatgcgatacaaacgaattttctaattcatgccaatcttcgacaagttcaacttgcgcaacattgcttttcgcctccaaagtaatcggaatggccgaataattgacaatcgggacaacaagttgtccattttttcctgatgtaagagttggctcaaatttcagttgttcatgaaaaccgtctcttccgattacagatacttctttatcatccagctcgcgcaggactgacaactcgacaagcgtagatgattgcggaagaagagtgactctataaattatgtgtgctgaattcgcttgtttatcgagtggagaaaaatcgatcacattcatgttaactttgtcgatcaatttaaatcctaattgattcaaagcatttgttccaaaaagaagatcgtatccaaaagtagactggacaacgaacattcgaatcctagcccgtttctgttcccctaacaattggg

SEQ ID NO: 4634 - DNA, 1088 bp, Heterodera glycines
actcggcattcgcggctctttcagcaaaaaataaaaacacttttcttaagaacccatgggtgctctatccacccaccaaatttcattcggaaatcccacggacacccggggaccttcctttgtcagtgaaataaaatgacagcaatttattgtaatgacttggagaattttgtgcaatttgcccgcatccacgtccaacagacgaccccagtcgaaaaagtcgacaaaaccgtcggcgttgaaatcggcctgtttgaaccagtcacggatggccttttggtctgttttgatgccaatttcctgtaaatttaaagtctgaatccaaaaaatggttaagtggtgtcaagaaacccctaactcacgatcagtgaaacagaattaatgtgccaattacaatagttttgccaatgctttgctaatcattcgacctggagtcgctcgaccaattcatcttcgctgagacgactgagcaccaagttctcccaactcgacccggtcagcacgcggaacaaattttccatttgcgcgatcgcttcggtcagtcgtatcagaatacgagggcgaccaagggcggttatctgtgtgaaatgcatttaaaattctgtgtattaaacccaatgtgttttttatttggcaaactcttaacggctctttctcactttgatggcagtaaatccttggcccatcgtggcttgcgcagttgcgtcgatgcacttgcagaaaatgtcgacgttacggtcgcattcgctttcaccactctaaaaaaacatggagattttggaaagtggtcaaggacattaaagccgacaaattcggtgagaaaaagctgttgttaatgggtaaacagtgagacacaaatggacattcacgaaaagctaaaaaatttctttctatactgatatgaagctgacaatgttttaagttggttaaacagcgaaaccccaaaaattcttggaaaatcatcaaattttttctttttggaaaaaaataatcggaaattcattggaggatagagtaagagacattagaacaaatagcagagctaaaaagtgaagcgagcactgcagcacgcattgcgcgtgcacatg

SEQ ID NO: 4635 - DNA, 5469 bp, Heterodera glycines
aaagacgtaaaaaaatcacaaaaattcacgttttcccagtcctacaactttaaaaccattctggcaaaatgaacgaaataagtgccataaatgccatgaaaacgtacataaaagtatgtacgtgcgctgacgacatgctcacgtcggtctccgaattccttgtgcacggtgaactgtttgtgcgtttggtccaccaattccgccactgattgatcaccgagtgcgtcctccaattgcgcggcatgtttaggcggaaccgcgctggccaagacgtccagggcctaaatgccattaaaaatggatttaatttaacattaacagctcatacgggtgggagtggttgcgtttcctcttcgtccagaccttccactgccttttctttggcctcctcctccgaaatgtccgactccacactaaatcagataaataaatttttagtacgggaccaataagggtcagattttaaggaaaaagtaatttattttgagttggtttttgtaggtttaaccactcgcccacccctatcgcacgttccgttgttaatggttggcaaatgcacaacaacaacacctgtagtccaaaatgcatttgacaccgaagcgctgaagtcgagtggccgtttttgaaaccttaaattgtttgggacttaaaaattaattattgataacatattcagagggttctgagttcaattgaatcattattgaaaaaaaactagaatccaagaaagtaaatcaaaagttcattcagaaatggaaggttagcattttaatataaatttaaaataggtcatgtttaaaaaaaaatgaaaactgtcatttatttcaatttgaattattgaatgaatattttcttttgccagcctcgccaatgtcctcgccagccacaaaatgtccgtagaaggtgcttcgcatcaatgcattgaatgcgcgctttccaagcattttgcgggccaagcgcatcaacgacatgttgttttggacaatccaattgttctgacaaaaggcgaacaccagctgagcacggaccagttcactgttcgttttgctctgcgaaaataacaaaatttagttggaacataaaaatatgcgttcggacggccattccttgtctaaagttgatttaagacctttaaaggtgctaacttttggtgaaagactccctcccgcatgaccattttgactcaaatgtaaacatttcgtctgccaaatataaggcccaaagtccataaagggaggttgttaatctattcttgtttcattgctaaataaagacgaaccttaaatgcctcctcagcattctggaaagtcagatccagtcgcttataacattcttccgattcggcgcgcaactgttcaggcgttttcttggtcaccgagagaagcgaagttgacgaaacttgctgaaacgctgaggcgttggaactcactccgcgcaactgctgagaaattgaattgaaaataacgagacggagggagaatataagtaattggtattagaaaccggatttttgagaagaatgggccaacatggcttggctttgaagcacagggccattcaaatgcaacttcgatgaaattatttaattgacctgaaaagaaagaaatgtgggatttggaaaagcactaatgaaaatcacagctaaacttttgctctatttattgaagaagatgtgatccatcagtcagactaattgcatcacgtgttctgccttatttgttttttggtaattttccaacttttaaaaggcaaaggcgtacgcatgtcacaatgcaattggcgaaaaataacttgtggttagtgctcaaggccgaaaattacaacacattcgtacgtataccaaacaaaaagtgtgaggaataaaaacaaatgactgctgctgctgttcactgtgttcagctgcaaaacatttggatgaaagggggggggggggactccaataattcattccgttccgctcaactcattgagtttaaaaatgtaatgaacgccgacgacagatacataaatcgcaactcgttctcgtctcacaaatcagcaaattatattttaaaaaacagagagaaagacagaaaaagatcaaatctcgcaacaaatggcgaaggaaaggtaaatgtcagcgctgtgcaaaatgattggcaaaagaaaacattccgagtcaaaagtgtactggggaaagaaggggagggaatgaacggatgacgtaaccaaaagcgaaatgggaaaaaaggggggggggagagagaggaaaagccaaatgaaacgacggacggaggaggaggcaaaggaatgcataaaggaggacaaaagcacaacaaaacaaaaggaatgaaaaatgacgagaaaacaaaacaaaaaaaaaattctgaaacttttggattttataaaataaaaaccaaaataaaaatttaattatttaatattttcacttgaaataaattaaaatttgaattttttttattttttgaatttttttgaatttttaaaaattcccggttggtcccggttcccggtcccgaacaaaaatcgaggtcccggtcccgacttctcaggtcccggcaagtcccggtcccgacttctcaggtcccggcaagtcccggtcccggttttgcccaaaattcccggtcccgctctactctacttaccaaagcttaagactggtggagcttttaaggaagttgaaatgcacaaaaaaaataaaaaatatttgagattgtgtaaatttttaaatttaaaaattattaaatttcgatattatttttgccaaatttaaaaaataaatttgttttggccttaatttcacgacaatgattgatcgaaactcgccattgcacatgttcgtttttgctaatcggttagcaacttttgagggccgatggaactacaaagaaggatgcaccgctgaaaaagtgagcacattcgaccttagggttctactggactttgatccaggcctgaatttctcatggatccaggtcctggctattttttcagcaacctttattttactggacctggggttttactgggtacaatatggaatcaaggtccaggattatttttaaaatctcaaattctaacattaccaacattaagatttcttttttccaataaaaactgttcaggaaattcctaataaattaagccgatttattagtatgatttagtgtaacttttcagatggccagggcaggtttcttctgcactgagaagcgaaagaagccctctgacgcagcgaaatgttacatttgcctgcacgaaatgtattgggacccggaggacgaaccgtggttatttcatttttagtgaattcggcttttcactaaaaaaaacaacacattttccagggaagagcacaaaaagcaccgcccggactgtcctttggtgaccatcggcaaacaaaatgaggaggaattcactgtgcgcgaagtgctccttttgcttgcatatgaacacagcacgaaaatggttggtgccaatgccattgaataaaatggcgtgaaaattgaaacggattccatttttaaaaggtgaaaaccacttcctttactgtgttttatcgtgtttattttagaaaggcctttgaatttagaattatacttttctaaatttacaccaaaatattcaaatcatttttatgctgaagggcataaacgaataaataatcagacactgaattaggttaaaatcgaattgccaagaaaactttgtggttatttttgttcgatttagtacccagttgcggatgcgtcaatgaaagaattagacgtgttgatgaagcaattgttggcggacacgcaaaaggcagtggaagggatttgaaagcgaatgccacggatctcaaacaacaattctctcatcacttttgtgtgacattatttacgaaaaagtttgacctcctaaatccagaagattttaaagtattaaagaggtattatcatttcatttatgtcgggaaatgggaaaaagaagacaatttcaacgcccatttcaattcgattgttttttcttttcctttctctctctctctgcccttcctctttcatgcactatctcccgttccttctcgtcgcatcgccgctctcctcgtcctcctctgtctccaggtgaatgttgtcgccgaattttgcgtaaagcactgcccgcagttcgcccaactccctctccatggttccgacttgtgaacgcaatgcgtccatctccgcctgagtggaaactttcagcagttccaaccgaccgttcactgtgtccttaaaaaagaaaaaggaatgatttttctcgatggttgtattgaaatatttttggtagaatgtcccctttgtgtaaaacctggtcgaaatggacgaacaccgacccgacgagaaagggaatcgaatcggccgccgcctcgtcgtccatcagcagaatttcatcggaagcgtcattcaaattgttgacatcgttgtccaacgatataagtttttcctgaaaaactcccatttacaatcacacacaattaattatcagttaattttattgggacaaaaaaattaaaaaagaaatagcctatcaattttgaaaaatggaaataaaatttcaaatttcgcggcatttactaaattgaactcactttggctgccgagtaagctttatgaagacgtgcaaatcggttgatctgctgttggtcctccgccgttgcagtattttttgcactcttttggtcgggtttcattaaaattatttttctctaaataaagccatcattggatttaggctcttaaagtttccactactgataaggaaaagaacaactttgaaatttgaaagcaatgcttttttaaaaattcaattgcttttgctttggattaattaattgtttttttaaatatgtctggcgttttatttttttcaaatttaaacaatatgaaatgaaatcacaaatgtaaaatgcactcggttatttgatgaaagacacgcaaaattcattcaccgggacatctctcatttctttacgtcttttccactccgagggggcggaaagcataacaggttactgtaagagggaagaaacggtatttaaaaattaaaaaacaaagtttaccgcttccggacgtcgcttgacagtacgcgtcggtgtaagccacgtaagagaattcgccatttgcacaaatcaccttcaaatggagaaaatgcattcttggccaaaatcaaattaaaattttgcaaaataaattaaaattttgaaattaattaaattatttttgcaaataattaataattataattacatttatttttgcgaatagttttgcctctgccgccttttgaatcgctcgtttcgattcactcggatcggaagtgatgtgctaaacacgccaatttctaaatttaaaataaaaaatttcattttccgcatttaaattttttgtgaaaaaaatttcaaaaatttttccaaaaaaattcacccgcgtaattagcccccattttttg

SEQ ID NO: 4636 - DNA, 1481 bp, Heterodera glycines
agtaaatcaacgaaaaaagcgcgattcggacggtctcccgaatatgcccgagtttcgctgagaaatccttataatatgggggcaaggtatttgtggcattagtattaaataaaatttaataaaatttcaatttttcgcacccatgcctccgattggataaccgccgcccatttggggacccgcaaaaaacggcgcaggcgcggcacgaagtgcacggcaattggggagggcacgggggcggtggaggggcacaaatgaccgggggaggacaaattacctaaaataggcaattaacattaaaaaaaataataaatttttggaaaattaccggcggagggcaaaaagtgggcatacacggagggcacgggggcatcggaggggggcaaggctgaaaaaactaaattgacaatgcaatttacaaaatattataatataatattgtggcaaaagaaaaatgcataataatttatttattcatttttatataaaaaaaaatttggtaaaaataaattaaaatattttgaaaattttataaatcttattttttaaatgcctatttaaaaaaaattatgatatagtaccgttaaaattgataaaaaggattgttttttatttagagctaataataataattttatttaattaatttatttttaaatttttaaataaaatttataatttaatcttttaaaatattattatttaattaattttgaaaatttggtgccaccagtggcggaagtgccggcgggcacattggcggcggtgggcacatcggctggggcggaccgcaaaggccgagcccaccgagcaaaccatggccataagtgaattggacgaacactggagagaaacacaaaaggagaagcagtttctgcatttttgaaatttgttatctaaataatttgactgaaaattggcaaaacaaaaaaaaagtggcagagacaaagtgccgacagtgccaaaccgcgcaaaatgaggccgaattggctaaaagtggcatattcaaggcaaaaagtgccaaaatctctccgcccccgataattcggcatttcttgtgaaaattcggtcaaattccaagaaaaagtgccaaaaagagccagccaattgttcgaaaaagagaaaattggaccagcagcaaagaataattgccggaacattttggttctgttgctgatcaaaaacatttgcgaagactgatcagaatgagtgcttttgtttatttacaccacctccaaatccggtccttaaaaggcccgtcgaccccccaaaacgctttgccccctccagcgaaacccacgtcatcgcccggggcgcaatcaaaaaatgtccaaaaaaccatggtcggtcacacccaaaagaaagtgatgataaaacaaaaacaacacaatcatttttgggcacggatgggaagaagcagcgattgtcaaatttggaacatttaattaagcggaagagagcggcggaaaataggaaaagca

SEQ ID NO: 4637 - DNA, 3752 bp, Heterodera glycines
  unsure (1)..(3752): unsure at all n locations
agagtncattttgcaaaaaataaataattaatgaaaaagtcagaatctctaaaaattttaaaaacaacaagcgttggcattttttcagcttaagttagtcctttacaatggagaaggcctgcaacatttggagagattttatcgattttagtgcgctaggttcgatgaaactttttaaaatataagcctaaactttttggcttatttaaaaagcaattaaaatttttaaaaattttattcatctcccttttgatagaaaaagcatcagagagccttatttaacttttaattaacatttggtgcgtttcagagcacgttctaaaaaatatttatgaattaattttgcaaaataataaataattaatgaaaaagtcagaatttcgaaaaattttaaaaacaacaagcgttggcattttttcaggttaagttagtcctttacaatggagaaggcctgcaacatttggagagattttattgattttagtgcgctaggttcgatgaaactttttaaaatataagcctaaactttttggcctgtttaaaaaggaattaaaaatttttaaaaattttattcatctcccttttgatagaaaaagcatcagagtgccttgattaacttgtaaataaagttttgtgtgtttcagagcactttctgaaaaaatacttatgaattaattttgcaaaaaataaataattaatgaaaaagtcagaatttcgaaaaattttaaaaacaacaagcgttggcattttttcaggtaagctctgctcggattggcctcccttcaatgggtcaatgtcagtaaaaatgcaatgggaaaagagtaaatctaaatgaaaattcagttggaatggtgcccaattcttgccgaagctgaacagatcngaattgaggcgaacggaaacgaaatgttctaacgagatgaattggctgctgaatgcctaggcctccgccgttggcacggacttttcgcaggaacaaatcaatgccgcaaagggcggcgtaatggacatagaaagtgccaaatatgtggtgccattggatggccaacggaaaaggattattgatacaacggtgggcggtatttgctaattatcagagggtaattaggaattgatttgctaattgtcgccattttcctttccagccctttgactttctgtgtccctattccattttctgtaccgtcggctgtcagtgctgccaaatcaaccacgcaaatgaccacctcttctcaatgccaatgctcgagtttcatctatgaaaattggtatcgtgcgcaggccccaaacctaaaaaaattccggagggaagatgaagaatttttttttttttgctcttcggtcttgaaattttttctcttatttaattttaatatgtccagctattttcttccccattctcctgatttctgaaattttttgagtctttgtctatatatatttttttaaattaaatatttctaataattcaaaaattacttttaaataaaatttgcataaattgccaaattcctaaattaaaatttaaattttgttgcattttcaggagccgtacattcctttcatggagaaagcatgccgtctctgtggctcggctgtcactatgctgtttttcatttttttgatcattgctacactgttcgacctcattgtgtaccgaatgtttgtgattcgagttttttatgccagcacattttcaatgcctttttcgagattgcttatccgtaagtaaactcaattcaatttcaaatgaatttagcaattttattttatttttaaataaaaatggaattagtcacaattaaaatcaatatgaaattgaactgttattaaccagggttcttgaccgaaacccacgtttaaaaaacctggattttttcacgacccgaaattttctttgaacgtccctacccaaaccccatcttccacaattcctgccctgaatttcaattcgggaatattttatttacatcccgataaatcaaaaattaatgaattatataaatttttatgtttatttaaaatttaaatttttttaattttaaagaatgctttcctattgggttcgacgatggtgctttaaaaattccagcgacaaagaaacaaaaatgcgaacggatttgcaaagaacagcgtcaaacaattaaatgtatcaatccgaacatcaaactcagattatatgagcagctgggtgggtggtggaagagaattttttaataaaacttaaattatttttattttttatattaaatttgcctaaaaaattacatgttttcatgttcctaaaattagaagccctggggggtttaatttatattccatatgactcattttaaatgttttgaggtaatacaacttggctttgtcaccttgtttgttgccgctttcccactagcacctttgtttgcgctgatcaacaacatcctgggtcttgaaaattcgaattcctatggccgtcaaaaaattttaaattttacaaaaattcttaattaaaattaattcagaaattacatggtttccttcaaatttactttttcatttactaaccctatctaatgattgattgatttcttttgatggtttttccactaattttttcaatgtttttatttatttaaagattactcaacaccttttcaatagaagttttatttttaaataaatataaatttttatttttaattaaaaaaaaatttttttttcaagacttctttgtcatttcccgcaatacaatcggaagcccagcagatgcccaactccgtcgctgctactccttgcgcctccaacccgttcaacaacaatcacttcccacaatcagatgcagaaaagtacaacaacaaacagtgttgaagtgcttcagaaaaatgagcgatgacaaatttttgctgtggttttgatggtcgacaaaaattccgaatgcttttttattttttaatttatttatttgatcggaataaaaacaaggtattgcaggaaaaataattttttataatttaccagctaaatagagaataataatttgggctactccaaatgcttctttatattgaaaaaaattacacaaattgattgacaaaacgtcaagtacaatgaattgcgttaataattttcaaaaaatttcgacatcacccaattgcgatggacttttcaatatttattactacaaaatttttaaattttttcaattcctctcaacatacttaaaaatttatttgtaggagataaattatttattttaatttttatcaatgaactgtgaaagtgatagaaacccttatggattttaggatgaccgaaaaataatttttgaccaaaacaaaaatcatttgtgctttttcatgaaacagaaagaaatgcttaatcgttatattagaaacaaaatgaaaaagtgtaaaaaattttattcataattttgctaaaaaaaaactaaattcttaattcataatattatgacacggatacaacaacgaccggcggtttatgattatttgagcacagcaaaaatttgacacaaggaaattcatttttcattatttcatgatatttggagctaaatagacatatttatttttttagtttatttattttttttttcattatttacctgcaaaactttgtgcaaaatcccgtaaaatgaattgtatttcacgtttttagtgtacatgtgcacgtaaaagtgaaatgcacccaaaaataaattgtaatttgtgttacacgttttcttgtgtacaagtgcacgtaaaagttaaatc

SEQ ID NO: 4638 - DNA, 5495 bp, Heterodera glycines
atatcattaaaaaaaacgtggctcttaaattctgtcccaaaatgaggtcaaggtcccgaaaatcctcacgcgcacacacacatttgtcataattcatgaggaacaattcacaaccaaacggaaagcattttcatgtatcgatatttatttaaaaaaaagaatgctttttaggctggcgaaatgtccattttttattattatcatttaatcatttttatggcaattattcatggccaaatggcagcgccaatagtggccgaaagctacagcagcgccaagcaacagcggacagaattcaattatcaacaaaaattgcaatcaacccacccaccaacaatgaacgtaaggaaagctaacaaataagcactgaaaaatgccgattacaataaatagtgccatttttcgtcaaatttgggctatttttttgaaaaaattggcaaaaaaaaactttaattttttgtgcgcttttttttttattatttttgggaaatttttgtctcggtaatatttttcactttttttctactaaattttattaaatttgaacaattcaaaaaaaatttttgatatttttcaaaatatttccaatttttccctgatttttaccaaaaaaatatagcgttgaataataacacaaacattagctgcttaaagtcagtctgacgtcattccaaatgcattttttgccccctctctcttatctgatcactctgatcgcagattctacgccatcattgacgttcattgaacaaatcgggcgaatggaactggttcagtccattgttcaattcatggaaaaaattggcttaggaacgggcgaaaataataaaaaaagtaaaaataaatacattttaatatgaaattttaaatgaatttttttttaaagaaaaacagcgaattgagcgccgaagtgctacaaataaaaatttgaaagaacaacacagggaaatttttggcagaatggtgagacatttgggcgcaaccgtatgggtgccgaagaaatataacacacgttaccaaatccaacaaacatggaatcacccggaagcttttaattagcattattaaactctgttatatttaactgactatgaaaaattatattaaaaaaaacaatttcttaaattttgttttaatacatagaaccattttaacaacactgcctttgtccgaagtccaatcattcgacgaccttcttttgctaatgacccaccaattatatcaagcatcgatgctcgaccgatgacaattgcgagtaaagtttttgatttcattatttggatttccgggtttgtaccagccgtgatttttttttaaatgtatcattatttaaatcataacataattttgtgaatttttccattttcgaaaacccacaaaacttggcattaattatggttcgacctagtgtttcaattcggtaattaattaaagcctaaaattactaaaaaaaattaatcaaatacaaaagttcaaattaacagtgtttctaaattaaaaaatatatatatatatattatgctaattatggtgtaatgtgatcatttagaagaacaacgatgaacagaaacatcacaactcaatgaaatagcgccatcatttcatgaggcaattggtatttgttagaatattaaaaacatttttagcaatttaaattttttttttttgtgtaggtaaagaatggaaacaagcattgttcggcagaggtggcttattgacagaaattttcaattttgtcaacgataaacgcaaggaggatttggccaagaaacaagccgctccaaatttgaacggtgggcatataagaaaaaatttaaaatgtgaaaaaaaaagtgacgacaattatttctttgggggattttaattaattaaataaatttttgaggtagcaggaattaagttgctaatgaaaaataattttaaaaatttatgaaagacagcttaggtaattgaattaaattctgtaattcttcagtttatttggccataacttttcttacttgaaccacccatacattcttggtatcaacgtaaactaagagaatttttatatacaaaaaattatgtgccaaaagcaacagacaatttcttggatatacccgaaaaaaaagtggccatagaaactgaaattgtataaaatttgaaatccattagcagataaggccagcagggaattcagccaaattttggatgcattattgcgcaaggcgaaaagtggcaattttgacgaggaaccgttgccagaaataccattcattggcatttgcaaccgacttagctgtgccgacatttacaaagcattggaccaattccggaaaagtgaatttttctcaaattttcaggtaaacccgaaagtcttggcgaaatgtttggcagcaataaggcacaaaaaggtggcacaagtcgtgtcgaaattggagaaaatgtggtaaaaatatataaattacgcaaaataataattaaaaaacctaataattaattatttataaaggatggtgaaaatattggcattgatttttcatcccaaattgatggtttgtttgaaagaaaattcaaaaatttaaaataaaatgaacaaggtcaaaacaacacgtccaatgttcatccgccacaaattgctttatccattgactcgggcgcaccagattactacagttttgcggaacaaaaaattggcaatgccgaaaaagtggacaaaatacagaaaaacataagtcagattgaaaaattgctttatcttaaatttaaattcaaaatccttcgtttttaccaaaacaaaaatttttcacaaaaaaacaaagaattttttctattttagccagcaaattaaaaaaatatgttaccataaaatatatgatttcataacttctaaggttctatagaaaaatttctttgaaaaattctaggttaaaaaaaattttaagttttgataaatttttattttctcggaggaacgatctgctccggattggtattcattttatccaattgcacattttaagttgaattcacaaaaccgaaggtggaaagtgaaaaaaaagtgcagtcgtcaactcagacaaagattgacttcaacagggaattgcctgaaattgccgaggccattgacagtgtacccgagggtaaatttaaaaatattttttagacttttctaaaaaagttcaaattttagaggaagaatttccgggaggggacatgttggtttttgagaaaaatgaatggcttccttccgcgtcggctaatgacacaaaaaaggtgggataaaaaatggggggataactaacaataaatagggctcggaaaatacggatacaaaaaaatcacgaaatatggccataatgccccaaaatattgaaaaaatgtggaatggaaatatggacataaatcgcgaaatattatagaaaataatggaaaatatggatattgaaatccatcatagaagcttcaaaccaagctataaatatgtttttcaggcagcctagtcacagtccaggaaaaagttgggatttccatacaattccgaaccctaacaataaatgtggtggtgctgatttctatttaaaattccagcagtttgttctaacaccggtttttgaacgaactcatgaaaagaaaagaactcaaccatcgacgacggtaactgttcagcaacagttgaggaacacaaaaaacaaaattggacaaagtcatggcacaacaactgcaaaaagcacacagcaggttaagttgggaagatgaaagaaatttttttaactaaaaattaattcttttccttaaatacaaaattagagaccggactgtatcgataattatcggtcgatgttttcaatatgtatttatttttcggtatgttattgaaagatatcgatcgaaagaatttaaaaaagaacaatcgaattgatctaacaatgccattcatacatgtgcaaggggtgtctcaagccaagggccatacgacggacgattgggaccagggctgcacgcaattacggattgcggattacggaaattacggggttttgggagttacggattacgggttacggatttttgggatttttccgtaattttgatccgtaatttgacttttggattattttttcgagacgatttcttgtacgattatttttataaaaaacaaatttttctattttttatttaaagggctacgcgtatttcgatttatttaagaattaaaatagatttataattttttattatttgttgttaaggctatttgggtagttcgcctagaaaatagaggcatcacttttttgtcacacctatttttcacgcattttatgaaaattcataaaaccttagccaggtgaggggaggaattccccccttccccgcccgaaatgaaaaattaaaaatttttacaggaaaaattgggacttttaaatttttttttgtcgatttttcttaataaaatcattaaaattaaaaaaaaaatttgcccggcggcacctatcggcaccgccggaccacgatttactcgattttaccttattttttttaattttgactacaaaatggcaaaaagtagtctttttttggctaaaaatggttacaattcctgtttttgctgtccggcgctgaacttttttaaaaaacactaaataaattttaccaaaaaaaattcttcggattcccccccccccccgtaatttttttctggctattaaaatgttgaaataattatatacatatacataaatccgattataatgatcagactttcaaaaaattttcaaaaatcaacccataaattcaaaaagaatgatttgatcagacacaaaattataaattatttgtaaaatttaaataaaaaatgaagaaactccatcaagaaaatcagttttttgatttttattaatcactatttaaaaatttttttctaaaattctgacaaaaattgatttttaaaagattacggattgcggattacgggaaattacggggtttttggacccccgtaattacggattacggatttccgtaactgagaaaatcgccgtaattacggattacggatttccgtaattgcaaatccagttgcgtgcagccctggtgcatattgcgaaatcgcttcaaaaacggacagcctatcaatcaaagatttttaaaaaatttcggcgccctaccaatagagatctttgatcatcattaaatttcatatttgcttctgtcatcgcggcaattaaaatttccagggtttcttagggaataagtattcaattaggtcatgtggtgaatttgttttaatggtcaagtggtgaactacattagaatcgaaaacggcatattattttgttatgaaccaaaatttccggtcgttttttccaaaattcctcatttttgtttattttatttgttttactccgaatttcccacccctcccccctcccttaatttgctcattttatgcatttattgtaatatgcttttctttttcccaaatttccccccccccttttcagatatctctgccc

SEQ ID NO: 4639 - DNA, 4299 bp, Heterodera glycines
tatatgaccccgaaagcgcacggttgcgcacgggtgtttcccgcacaaacccatgcctatgggaggggcgcagccctttgatgttgccgcccggggacattttcccgcacaatcccaagcctataggaggggtgaagtcttttgatgttgccgccttgtggattttaatttacccaaatccgtgcggatgttttttcactccgcgccgcgcagcgccgcgggaaggtcatcaatcatccacctgtcaccaaaagtgacaggtggaggaaattcaatttttcttttgtaaatttaaatctttttgatcccaaaccttttgggcggttttaatttctcaaatcctgagtttttttttatgacggtttctctaatcctgaaattaaaaattcattttttgaaaatgtgccaaaacagtgcgggttttttttgcatttcctccccgctcgccccgcgccgcgatgccgccgccgcgaaaaaaaaaatcgataacggaatttggaagaagtgtgaattaattgatattagcagcaaacaatgacatgaataattattgaattgcacaataaaattgattatttaaaaataaaaatcgaaaatgaataaataaattaaaaaactttttcaaaagtaggtcacctttcaaccaaaattgattgatgggtttttatttctcttccattatttcgaaatctgcacgtgactttttgttcaaattatttcgcaatatctcccctaaattaggtcaactgtcaataaaatgtgattgattggcttcttatttaaatgtctccattatttttggttccaactatttcgcaatatggcccgtaattttgcaaacctgtcaaaaaaaaaatgattgatgactttcgaaataaggaatatccaaacgatttttgcacggtttttgaataaaatgtgacagctgtctaccgaaatgattgattaccctcaaaattaaggcaaccccagacagtcacgtgactagacccctcccctctcgcccaatccgtacacccggcccaaatcgaaaatcattcaactaaatagttggatttcattaaactctcttcgcgctctaattttaattcactccgctctatttttatttgcattaattaaatctattactatttacttacgtcttttttcttttaaaatctctctaccctctttaattcttctgctgcaatttcttgtttaaaatgtcttttaaacgcgtgaactccttccaacccaccgtcccattggccaagaaatgggatttccgatcaatcgggtaagtgatttttaataaattaaataaaaaaaataatttcttaaacaattataaatacaattataagataataccctttaagaattatttcaaaaaatttttttttgttcagaaataattttgctgaagaaatggaaaattataaattgatggattaccaatcgacaacttgcgaaaaatttggatttacgaaaaatattacggaatttcgtgtcaacccggatgtggagcgccccgatgaagcgatgaaggacgcaatcgacaacatgataaaggtggctttaaaaactacggaagaaaaaatgaaacgaaaagtgcggatgtttggagttgcaattacgggtgccgggcttgctttcccggtgtgggtgccgtatcgggcgtacccccagaataatgcggatgttatcatggaggagattaataagttggggcagagcggggacggggatgaaaataagaaaatgcttttattatctgagccagttactatgaaaattacttgcgtgaccatgcccagtggagaggggccgaggaatgtccacaaatttgactttggattcaaggaacaccagcggatagggtaagatttttccaattaataaaaataaaataaaaaatagaaaaaatcaaataaaaattaaaaaaaaaataaacaaagaaatttaaaataattatttctaaaaaatttaatgaagcaaaaaaaaaaattttttttttaaagaaaaaaaatgaaaaaaagcaacaaaaacccgaaaaataaattaaaaatattaaaaaataataatttaatgagccaaaaaataaataaaaattaaattttaaaaaatcaaaaaataaataattaaaaaatattaaataaataaaaaataaaatttaaaaaatcaaaaaaaaaattaaataataattaaagtaaagaaaaaaaagaaataattatttttattaagcaaagcagcaaaaaaaaaaaacagaaaaaaaaatttaaaaaataaattaaataataaagaaaaataaatggaaataataataattttattaaggattacaaatgcggataaattttgtttgttttatgctttggtggcgtcaaagctttatttggaagtgcatcgaaacatttttaatcgatttatgaaaaatattgtgagacagagggattcagctattgaacttttacataattgtggaattgatattaacgaatatagctatggtgtggagcaattgccgaatgttcagaaatattgggtgggtttaaatgaaaaaatgcaaaattaataaattttttcaggatgagatttaccccagaaagtaccgggttgttgcgtttgagaagtcagctgatccgcggaaatcgatctgtgttttgtggaaggcccctatgggacgagagaaggtcgtaccgatatttttggagaatggtcactgggatggtctgaagaattacgtctctttttttaatcgtgggagaaaattttgtattgattgtgagtgcttttttgacaaggatgtcaaacatactttcgagtgccgggcaaggtgttattattgcaataaagtgggcggagtgccgtgtcaaaaggagagtggagtgaagattgaatgcccaaagtgtcaccgttacttttacaattgggagtgttataattatcatcatggacatcagacttgcaaattatggaggcgttgcgttatctgtgacaagacatatttatttaacccgaagaaggaacatgaatgtggagagacttattgccagctttgtagtgtgagccatgaccccaagcgggggtgttatattatgccgatcgaggagaaggaggaaaaagatgtctacagaattgtagtttgggtaagttctacaaataaaatcaacaaaaagaagtctttaactccaggattcggagacttcgcaggatacaatttacaagggggaccagaaggagcatgttattaattatatttcggtgagagttacgtgtacggaatgctgtgatgacaaaaacaggacgaattgcaaaatttgtggggaggagaggatcaaggattggagcgaggcggagggacatgagccgaccaaggattttgtggagtggattttaactgcttttacgaattatgatacgtacatatttgcacataacgccggacgttttgacggtaatttcaaaatttaatttttaaatcctaaatttttaggtcattttgtttttaattacctctgccgtaccgggaagaacccgctaccgctcatcaatggattgaaaatttatgaatttaaagtgcaaaactcgaagaaacattcaaagctgatttggagagactcatgtttattgatgccggtgaagcttgagtcgctgaaggcgacatttaatttggactgtgaggacaagccctttttcccctattattacaacaagaaagaaaattatggaatacgattggaacatctgccaccgatggaggactattcgccgggatctatgaacaaggataaatttataaaattcgaaaaatggtaagaaaagaagggcaaaattaacaataaaattcttttgtttttcaggtacaacgaaaacaaggagacacctttttatttggatgaagaattgaaaaattattgccgaaacgacacggagattttattgttgtctattattgagtttaggaggatattgattaacgacattacgaaaggatttgaccccctgccgaggagttgtacgaatgcgggggttgcgatgaatatttttaaggcaatgtttttgttgacggagcagttatcgattgtgccggagaagggatatgagcggtgtgatcgcgccagtgtgatggcaataaagtatttggagtggaggagcaagcaggatggaattgagatacgacacgcggggaacggacgagaggtcaaagttggaaaatataaattggatggatttattgcgaataacggagctagggacaaatacattgaggttatgggatgttacatacatggatgtttgaattgttatgacccg

SEQ ID NO: 4640 - DNA, 3172 bp, Heterodera glycines
  unsure (1)..(3172): unsure at all n locations
aattttttgaaagaagtaaaaaatacaatctaaatatttgctacagaaaagtataaggaattagcagttaaaaccaattaatattatgaaatatttaantacataagtaaatggatacttaaatcttnaaaagaaataaaaaataatactcatatattaagataaaaaaatacttaataattttatctaaaatatactcaaacaaaaaattcacaatacaccgtttggcaataaaccattacattcgggcaagttaattaaaaaataagtatttaattaagtttggctaatattttgttattatataaaaagaaaataacaaagagattaaacataaaatgtgcattttccattaaccatttatgtataagaaaattattataaataatatctttaaaaaaatgtgttatcaatcatttctgtgaatattataataaatattttttcaataagtttttcttctacatataaaatgatatttaagttttatgaaaatctaacaattatgaaaaccgtaaagggttctgtttcgttttgtccgaccttaaaattatttttaaaataattataagtaaaaataaattttaaaatttgaatacataatttacgattatattgccatgaatctgataattttattgtattatttactagcgtaaaaaacagttttatactaaaatttaatttatttcacattataataaaattcggcagttttcaacattaataaagtaaattattattttcaagctaaaatctcaaaaaaaactaaataaaacaattaaatgttatcgcttaattcaaaattaataatttaatttacaataaacgacaaaagcacattaaataatatagaaggtttttattttcaattataataaaaaaaaaattaaaaatcacagtttacatgaacaaatttaaaatgagaataatgtttgtgattgttttgcgctattagccattgtttaagtatttttgattgaaaatgtgttaataaataaatcaaaattcaaatgaattattaaaaatttgatccaaaggcccacaataacgtttttcatataaaaaagaacaataagaaatacaaaaaaatagcagaacaataaaaaaaagtctttttttgttaaactttttaaaaatatttgtgaatgtaaccaaacaaaagaaaaaacatacaaaaaactaactttattagtaaaaaaccaaacaaaaacagtaataaaatttagtaaaactttattttttcaaaaggctaaatcaattatttatgttaaataatcaatcaactggagttcattattttatatttttaaacatttgttaatattgaaaaatagaataaaggaaaattctttttaaatttatttaattaaataagaaaaattaaataaaaataaaaatgttacatatttttttatcaattatttcattatattggcagtccgttaaaagagcattcaatctcaaaaataaaaacattgcaaaaataatattataaatttgtatttgtttttattttaattcttttatttagagttaatatctttttctaaaaacaaatttaaatatcttatcggaaccataaaatttataattggaaaagtgccattgagtggcggcgggcgccgaaagaacaacagttaaaattaaaagaaagtgaattaaaattcaacaacagaaaaatatgaaaaaataattctaatgataacttgggcccggattgaaaaaggaatgaattttttcccgaaattagcataatgaaaacatattttattatcattaattttaaaaggaaaaattctatttgtaattatttgaaaatttcaaaactaatattttgaaaaataaagaacactttatttaataattattcatgaacaactaaatttccaccttgataataaatatttatttaattattaatccaaagtgacatttaatgtgaaatgactaataaatatccaaatttattcttatttattcatttgttagtgaaaatcagggccggattttttcaattaaattaaaactttaaatagtgttgtgccttggacttgaccaaaaccaaagtgaataaatatttatttattcaaggttggtgaagacacaatttaaataaagaagtgaaaatgggggcaaatatcgattgggagaaagtgcacaaatacaaataaatgagggaatgaacggatggtcaaagggacgggggtatttatggaagggagaacagagagagtgggggagggcagaaatagaaaggaaataaataaaataagcggaacaattgagtacctttcccaacatctccccccttaaaaagagtctgtcctcattcatcagtccgttaatcagtgatcagtccatctcagctcggagtgtagcgtagaggtgggcgtcgattgcggtgagggcgaccgacacagactggacttcgttcggtaattgcttcgtctgtctcttgtgcaggtgccgcttgttgaacagctggcagagctgcttcgttgggaccatccagctgtgccaacggaagaccaaaagcatcgttgaaaatgttcaactcatcattgccttggtgatccatgtgacgggccgtcatttggtttgcgtagaatcggttggaagtgccattcgggaactttacctcgtaaatgactccctgacattggctgacgattccagcgcgccatgattgcgattggcgatgacgagcaaaaactttatcgccaagacaagactttcgaggttttgcaccgtaacgacgattgaactgcttttccatcgcctcgtctctgatcagtggtggcgatggttttgctctcagcaaatccaatgttgtgcaaggctttcgcagaatgaaaagttcggcagggcttttgccgttgggcaaagagtcattcggtgtcgtccgatatgatgtcaaaaatgtgttcaccacatttttcgcgccctccttcttcagtttgcgacatgcccttttaaaggtgtcgacaaagcgctccgcttgtccatttgacatcggattgtacggcgctgagaagaggtggttgatgccattttctttgacgaattccttgaattcgttggagctaaactgggtgccattatcagtgaccaaagtctccggcagtccaaaacgagcgcatgaacgtaattgttcaattgttgctgctga

SEQ ID NO: 4641 - DNA, 1012 bp, Heterodera glycines
ttccgttttctttggcgcattcgctttggtggcacacggctcacattttctcaccacttcttcgatttgttggtcaattcctggccagtaaacatgctggcgggcgaggcttttcatgcgcttcatgcccgggtgtccacgatgtagcattttaagcacttccgtctcaagcgatgctgggacgacaatccggtcggcgtacatgatgcatccgttttcgaatgacagcgcttctcgccttcgatggaattgtaaaatgtcctctgacatatattcgctttgtttggccattggttcaggatgaatccgttaatttcctgaagcaaattatgggattttgtggcattgacaatgtcctcgtggacaattggaaattgtgccgtaaaggcattcacagttgccaaatttgcactttctgtaattgttaccacaataaattcatcttcgggcactggcgcttttgcaattaagcgcgaaagagcatcggcttgaccaaaatctgacgtgttttggtattcgatctcaaagtcatacgccaagagtatgagtgcccagcgctgtaagcgatttgctgtatacgctttaatgcccttgttaccaaaaatggtcaacaatggcttatggtcggttggcaggacgaaatgtcttccaaaaagatatttatggaacttctgaactgcaaaaacaagagctaatccctctttttcgatttgggagtagttcatttcggcaggcgacaaagagcaagaagcatgtgcaattgctttcaagctgccatcctgaaaacgatgggagatcactgctccgattccataatcagaggcatcggcagatacaatgatgtccttttccgggtcgtagtgggtcaagagttggtcagatttcagcacttcgatgattttgtcgaaggcattttggcattccgatgaccagacccaagccacgtcctgtttcagcagttcgtccaacggctgtcgaagaaatcgcatgttcttcacaaattgctggtaat

SEQ ID NO: 4642 - DNA, 2841 bp, Heterodera glycines
  unsure (1)..(2841): unsure at all n locations
agtatgagtgcccagcgcttgtaatcgatttgctatccacgctttgatgccctttttgttacaaaaatggtcatcaaaggcttgttatcggtctgcagtacgaattgtcttccaaaaagatatttgtggaacttttgaactgcaaagacaatagctagtccctctttttcgattttggagtagttcatttcggcaggcgacaatgagcacgatgcatgggcaatagcttttaagctgccatccggaaaacgatgggaaatcactgctccgattccgtaatcagaggcatcggcagaaacaatgatgtccttttccgggtcataatgggtcaagagttggtccgacttcagcacttcgatcactttgttgaaggcattttgacagtccgttgaccagacccatgccacgtcctgtttcagtagctcgtccaatggttgtcgaagaaattgcatattcttcacaaactgctggtaatgattgatcattcccaaaaatgatcgaagctccgaaacattggtagggacgagcatttcagaaatcgccttaatcttcgatggatccggtcgccttccgtttttatcgatgacgaacccgaggtatttgatctgcttctgattgaatgagcacttgtcgggtttgatcaggaatccaaaatttccgattcgcttgaaaacttcgttcgtgttttcgatgctcctcatgtgaacgactgaccacgatcatgtcgtcaaggtaagcaaacgcgaatggacaatcggccaaaattgaatccatgatcgattggaaaattcctggcgctgattttaccccaaatggtaagcgaaaaaattggaaatcctcggtgcgtggcgattgtacacagttctttggacttctcgtccaattcaacctgtagatacgcatccttcaggtcgatctgagaaaaaatctttcctccattcaatttcgtgaagatgtcttcgggcaacggcaatggatgctgatttaaaagcaatgcgttgttcaagcccatagagaaatctgcacaaacgcatgctgcttcgttagccttcttaacaaccacaataggtgcggcccaacgggtgtgatcgattgggttgatcactttctgcgccagcaatcggtccaattcggcctcaacaatcaaacgtgtgttgaatggcactggacgtggcctgcagtacacggcaacagcatccgccttcagttccaaatgggctttggctttcgtgcagtggcccaggccttctgcaaaaacgtgcgaaaatttgactgaaggtcaagcaaagtggtgtccttcttcgacgggatttactcttcattcggtccttcctttccgcttgaaccacattcactttcattgccattttagctttggctctgaatgtgtccaataagccaaaagcgtccaaaatgtcaattcccaataaattcagtgaaccctttttggtcacataaaattgtccttggtgtgtgcgtcctccgaacgtgaaagtcgcaaaacccttccctagcagggtgcattcagttacatcatggtatttggcactttcactgcattgaatcaatcggggacgttcaatttgaagatgtgcttcttcgtcgatcacggtgatttcagctcccggatcaaacacaaaatcaatgggtttgccattcacatcaactggtgcctcgacaagacggctcggttggttcagtgcgttcactgaaattccacccagttgcaaagcgttcatttgctttcgttgcgtctgttttctcgaatgctttaaaagccattcgtgatgacgcgcacacatattctgtaaatgtccaactttggaacattttctacaagttgcctttgaatggggacaactttgcgttttatgtccactgccacaacgccaacaattaggctgagttgggcttttgttttgttccctcttctgaaatggttttcgattgactgccaaaacgttggaatgggacgggcgctcaatggccttagcctcagcaattgtcgacaggaacatctgcaaatcgctgacgacattgtcgtacatttgctttgtcgccgtccgttgtcaactttccaaaaattcgtttcctcagttcggcgtctctcggcgatttcagtgcgatcagaagcatgaggcagttgaactgctcttcattcagcttcttaaattcaaaatcgcgaagcagtcgcttgtggcggttgacgaaagcacggaagtcttcatcgtcacattcgtatcggtctatccaaaccgattggggcttggcaaacaaacatttaagttgtgccgatgtctccaaaaagtctaaatcggtcggtttcttcggcagacaaaatttgctgtattcgttgtaggctccctcgctcaattttgtcagcaccagcttcactttcagttggtcttggatgtttggcgaagaacagtcgagggccaacacaaagcggtcgatccaactttcgatgttcttcccagaatgatcatcaagatcaaaacattccatatttgaaagcgctggaagttgggctgtttgagttggcgcgacatttgtctgttgagcgttcagcaattgttcgactaacttttgctgtttggccagcaatttcgtcaattcgtcaattgtcggatttgctgccatttttgtcgttctccactcttttatttgcagcgcctagatacaaattgagtgggtgcgcgtggatgagctaataaatgtcgcctagacaaattattagcagcgctataacttctactgaaagctaaaagctaatcagtagggatgacaaacaattggttgagttaaatgccgactggctgaagttgctccgatgangtttgg

SEQ ID NO: 4643 - DNA, 2826 bp, Heterodera glycines
  unsure (1)..(2826): unsure at all n locations
gctcgtcatttcattcacaggcgacacaaacgattcatcctccaggatgctgtcattatgtgattttgcgggacgcgtcgtacaacagcaatggtgaaattagtgatctgatgtcggcgcttggtctccaagttggaaggatatgcgggaaaattgagagatttggaaaattacgatgattcaattgtccatgttccgtgatgattttattgaatgtttaataaaattattttttttcaatatgtgaagctgagggtgtgtctatagagagaattcggatcacataggagcattaaaaatttgttcgaattttggtcgccattagattagaaattaaaaatttttcctatttcatggttatatttgtgtttagggttaggcaaggggctatataaatgtcgtattcgtattcagcgaccccgaaaagcctaaaacagatccgttttccggctttttatgagctttttagacttttggacaattcgtgggtttttactcttttggacaattcgtggcttggacaattcgtggcttggacaaaacgtggcttggacaattcgtggcttggacaattcgtggcttggacactttgtgggggcgccgcagaaatagaaaggaaataaataaaataagcggaacaattgagtacctttcccaataaatagttagtaaatcaaaataaaattttataaaattttcaaaacgataaaaagctattcttcagaactttaaaaaagagacagtaacaagagtgatttgattaaataaaaaaataataatattcaaaaacatattattattacttaagtagtgtgataatcaaatttaaaactgaataaacatttttatttataccaacaaaataaaaattaataaaacataactttaaataaatgtctatttacaaaatgataaatattaaatatgtaaaaaaaaattcggaattcaaagttatttcgaatattattgaaagaatatataaatatatttgttgttttaaaaaaataaacaaaaatttaatttatttttatattaaaaataaaaaaatttgaaataaaattatatgcaattaaacgggtttggttcttcggggtcaaaaattgttttcctccataatctatgtagcgctatttaagtcaaattttaaaaatatattcgttgtcgctgtcctcacaaaggatccaaagacaaaggcttggctttattattatatgcaatgaattcaaatggcttgtatttgtcaccggaataaatttgaacgatatttaaaattatgggtgtaatttgttaacagcttttcaccgaaaaaggaggatttttcgattttgagataattgtgttttttacttttcacaacgcttcttccgggcgcatttttccgagactttttcggaatggcggagaaaatgttaatgtgtttttccaaaattggtcattttaacgctttttgggttctctttttgaataaaaattttaaaaaatagaaagagagatcccggcgatgcctatcgacaccgccgggaaaaaaattgggaatttttgtgcaatttagtaccagattttgcaccaataatgcaataagttaataaaaacttggtataaaaggtcaaaaattaaaatttttgaattattttttcaaatgctcattttcaaggacttcttgaattcaaggatactttgaaaattttcacgcgagaagggcccaatttcatgtacgtccttgacattcaaggacggatggcagccctgctcatgtgttatttgaatcaaattttacccttaatcctgtaataataattatttttttaatatagttttaattaaattatatataaacattaaaaatactattgaagactcgggactcgaatttatgaaaacccattccgatccaaaaaccgcattattctattttaatttatacggactcttggactcagattatcaagatatttaggttggtgaaaatgaattcagatgtttttatatttatgaataaacttaaaatacaacacattaatcaattcacaaaaaaggaaaataaattataatgcgaaaaacgatttattcaatgcattctaatttttaaaaatagaaaacaatttttattacatttatagaaataaaaaaaatgaattatgctaaaagataaaatgcaaactaaaaaaagttttttaaataaaaaaattctgacttttacattagagaaaaacaaaaaataaacaaaaattataaaaaggagagttagatcttaaaaataattaaaatttaaataaaatttaattatttttcaattttaaaaagcatatagcaaaaaaaagatccataaaattatttttaattattgaaataaatcttaattattaaattttatattatacaatattaaaaaggtcatttttaatttagtttttttttaaaaggagaatttaggagcaatttaatgcgttagaataaaaattttaaaatttatttcaacaaattttactagaaaaaatatataaattaaaggcttttagaaaagaagaataaaataaaaaacatttgtatgaaaacaaacaaacaaataaaatcttaaaaaatatcgatattattagttagcaaaacatttttgtttttgcattttattaaaatctcggacctatgaatattttaaattaatggatttaaggaataaaatattaaattttattattanattttattttcatattaaatcaataanaagacatgttannagcacatatttacttaataanttataatctantaacagcaagcttataaaataaaaataaaaaataataaaatgcaaaatataaattt

SEQ ID NO: 4644 - DNA, 1920 bp, Heterodera glycines
  unsure (1)..(1920): unsure at all n locations
tttatttattttttgcaaaattaattcttaaatattttttcagaaagggttctgaaacgcaccaaattttatttacatgttagtttaggcactctgatgcttttactatcaaaaagggagatgaataaaatttttaattgctttttaaacatgccaaaaagtttaggcttaaattaaaaaaattttcttcggctctagctctttcaataagcaataaaatcgtaccaaattttataggcatactccccggtacaggactaacttaacctgaaaaaatgacaattgtaattgattttaaatttttttagaaattctgagtttttaactgtttatttattttttgcaaaattaattcataaatattttttcagaaagtgctctgaaacgcatcaaattttatgtacaagttaaataaggctctctgatgcttttactatcaaaaagggagatgaataaaatttttaattgctttttaaacatgccaaaaagtttaggcttaaattaaaaaaatttcttcggctctagctctttcaataagcaataaaatcgttgagaagaagaggtaattaggtttaaatttccttcccattttgtggaatttgaaattttttcggtattcttattttgcgtacatttcaaattttcgaaaaaataaattcattaatattttttcagagtgctctgaaacacaccaaactttatttacaggttaattaaggcactctgatgcttttactatcaaaaagggcgatgaataaaaattctacaaatttttaattgctttttaaacgagcgaaaaactttaggcttagcttttttagtgaaaattcaagcactcatagtttttcgcgttctgatcagaaatgcaccaaattttgcagggtaacagctgagaagaataggtaattaggtttaaatttccttcccattttgtggaatttgaaattttttcggtattcttattttgcgtacatttcaaatttttgaaaaaataaattcattaatattttttcagagagtgctctgaaacacaccaaactttatttacaggttaattaaggcactctgatgcttttaataccaaaaagggatatgaataaaattcttaaaaatttttaattggttttaaatatgcgaaaactttaggcttagctttttagtgaaaattcaatcactcatagtttttcgcgttctgatcaaaagtgcaccaaattttatttacatgttaacaaagtcctcttaggcttatatttgaataagggtgaagaataaaaaatttttaaagttttttccttatattttggttatttcgttctactttcggtggggtgcttggaaaagtggaatcatgcgtacccgtccgatctgacaagttaagcaacgctggcttactagtcaaaaggatgggggccgtgatgaaacgaaaccagcactgcttaccccgcggcacccggcacggacccccgaaggaatggatttaattaaattctctccttcggggatttttttccattaggtctctctgatgcttttactatcaaaaagggagatgaataaaatttttaattgctttttaaacatgccaaaaagtttaggcttaaattaaaaaaatttcttcggctctagctctttcaataagcaataaaatcgtaccaaattttataggcatactccccggttgtcagagtacgcctgagttggcggtcgacaaatacccaaaacacggtagtttcgggtgcagttgggttaggacggtgatgtgtggcgatggcgcaggtcaattaaccccaaattatgaatgtgcacagcaacaataaaaatgttttatcggacggacctcaaacttgngtaattaaaccanaaattttaaataccaaatgaaaaatacaatttttacataaatgatcgattgggggagga

SEQ ID NO: 4645 - DNA, 6950 bp, Heterodera glycines
aaacccattcaaaaaaaaggcattacttggaaacaattttcttcttagtccatttggtttatggtgaactaagtataacggtacgttattaaaaaataatagtaataaaaattaattttataaaaaaatgtttattattttatttaggtaacgatgtgccaagatgtcagagtacgcctgagttggcggtcgacaaatacccaaaacacggtagtttcgggtgcagttgggttaggacggtgatgtgtggcgatggcgcaggtcaattaaccccaaattatgaatgtgcacagcaacaataaaaatgttttatcggacggacctcaaactcaaacttgggtaattaaaccaaaaattttaaatacaaaatgaaaaatacaatttttacataaatgatcgattgggggaggaatttgggggaatgtggggttttcctccccaagttgtgttgcgaatgaatgtgccgataggggattttgatcggtcttaaatatgggcaaaagtgagtgggccgacaatgaattgcatgtgaaatggaaggagaaatgcgtaaatgagtgacaggtgggacgagtgaacaaacaaattctgcaaaacttcggagaaaaaaggggtgaaatcgtaaatggggccacaaattataattactaaaatagataagaaatgagcggggcgggggtcacatgaattacgtcaatggccaatctaatttttgattggcggagaattggagaattttctagaaaaaaattcctccagttcgaacattccgcgcgtaaaacgatgggcccttcttccttccttcttagtcgtcggccagtttcatcggtcgtgatcgtccgaatggcgtgtccaatgtgacgcttgatgcccttgagcggaacgtcgcgcttttggcatccaaatccagatggataggcgtgaatgggcgatctgcgcgttgacgaagtgaagggcgctttgggggagttgaaagtcgatggagcgggacgatttcttcgaattgatcacggcgctgccgaatcggttgtcttttgggtcggaatccgattaggctcatgaaagtgatgcggatgggattgagcagataggctagtgcgcatggaatgatgaggtcgcggatcatcaagaaagttgcgtaggcgcaggcgatacggatccaccagttaaccagctcgttgagccaatccttgaccaatttcagtgtccacccttcaattccatcttgaagtgcgccgagagcttgggctcgtccgcttttgtgctgctccagcttgtccttaaaaacttctaagtcggcaaattcgtcgatgtgtgggaacattgcgttgtccgtgtcgttgtcgagttgccattgatggaagatcagcggatttaagtcgaaatcgctgtctgatcgattgatgaccgtttcgtaaagctcttggacagctgttggtggaagttgctttgcaattccggtgttggtgtcgatcttcagccatgcgttgggatttttctgcagttgcagataatgatagcggagatgtgagcagctagcgatatgtgaggtgaatgaaaggatgcgcatttcggcgtcgagaaatgcatccctatcagcgtttgggaggtgaattctgaccgggatgaatttgtaacagtcttttgttgcacggtagctgatgttggtcaggctgacgttaatgcacgggaagacttcgattgttgtctctccgatccatcgtgcttggagattctctcggttgagcaatttgcgcgcttgcaatgtcgggtttgcgactcggaagttgcgttggcactctttgaggtagagttgtgaaagtgccatgttggttgagatttgagcggctgacagttgagaggcgagttgttccggttcgacgtaacgttttgctcgtttgtagtagccgttcatgatgcgttcgtactgttcctttcgaatgccgaaattttgttcggataggacgatgagtttgccgtcgcaggcctccaatggttgtgtgtcggtgaatgtcaaggccttttgtcgatcatccgaaatccaaattgctgaagtttgacccgggattttcgtgaattctccagaaatttcttctgcgtgattgaagtcgcaggcatggcaattgttatcagaacaattggcattccaaatcagcgaactgttgtctgagagttggcaaaattctgtagtgtatgcgcaatggtccacgtgatggattggtgacgtgagttgcaggttgtgtcgtctgatgaacagtgttgccggttgcgcaaagcaatttgttgacgtgcttcgttgcagtcctttgaacaatccctcgatcggtccagggaagttcacttccaactcatcgtttgttgaccacgtgttattgccagaaatcgtcatttccgtttttgccaacgggcaaatttgatggagtgccatttgtttgcacaatgtccttgaaactgccatcatggttttgttgatggtgatgaagcggtcgccgagcagatttgtgtagtactgctccgtcgttcttttgactgcgcagtgccatgctgagtgaacttgatcaggccgatgaattttggtgtacaggtcgatggtaagcggagtccaatgcgcggtcaaaacaggtggcgggcggcaaaacggcgaattttccgaccctttgagttcccaaagggtgcttcctctgtcgccgcaccagaagacatccattccatttttgttgatcggatcaccttttcgttgtgcagatctagcaagttgcggcgcgctttggacattgtttgtctttttgcccttttttcgaagtgcgaggtagtagtccggtgcctgcggaatttcgttgtctagcaagttcgatgagggcaaaaatttcgagcgagtggtgattggacgttgcgttgtcgtttttggtactatttgcgtcgttggttgtaccgttgtgtgccaagttctgcccgtgatagttgtgcgtggtgttgctttcgtagttggtgttgcgcgtgttgtggttgtgtttggttttctcgttgttggcggcgccgtagttgtggcgaattgttttgctggcggagttgcggttgcgttgagtgcgagtactcgttgaatgtaacgttggacggatggtgccaattttgaagtgcgttgttcgatgtcggtgttgcgtggccagagatgcttggctaggttacttccatgccaaactccaactccaccaaatctcttttggcggattggattcgcaaatgctgtgctgcttgcgaggagaatgaacaggctgatgaacattagcgcattgatcattcgttgtccgacggtgattcttttgcgtgtcggttttctgccgcgtgtttcgatggccggcgaagttgttggttcatcattgagttgcatgggctcatccatagtcattttgatgcgattcgccaattcttttgcttctccaattcgcttattgaacacgaaaaatcctgtgtcgagatgttttgtcagtctaatcagctctcgtttgtgccataaccattcagcgttgtcttctttgctgagaatgagggtcacttcaatgtcgtcgtctttgaaacgatgaagtaatggcgcgagttgtttgatcatatcttcttctgtggcctcgtaggtgaagatcacatttttgacttgcggtccagtggtaagtcgaagtcgttgatccggaaagtgggtgtaccagcgagagtttggaaaatggtgttgaaatgcttcggctgtattgtcgccgatcagaatcgttctgacattgaagtaaatgtgatccggaaattgtttcttggcacggtcgcgtgctgtgatttcgcacgatcgttgattaatcctttcaatccatttgtcgaattccgttgtctgctgatctgccgatttgattggcttgaatttaagttgcgtccacgctgactgatctgtgatttctcggaagttgtcgcacgatgatcgccatatttcgatggcttctttaaggtgcttatctcggccgatgtcgcgttgactcttgacaatttgttgctcgtagaagaatttggcggattcttctgatgagtcgaaggactgcgtgtgttgttcgtggatagtccagatttcgttgccgggccggttgaggttgcagttcagccaatttagcatgatggtatcgaacaaggttctagcgcggcaatttgcgaattcttcgattttttcgcggttggcagcttcggcaattcgtccgtaggtggcatttcttgcgcaggagatgtgcgtgtcgtcacattcggtaaagatgttgaagtcgacgtatttctcttctttgcttttggctgcatgatattcttcgacgatgtctgcttcgattggtgcttcggttggtagttgcgcaggttgaagttgtacaggcggaggtggaggagtgtgagctgcgcggtgcttcatgaattgttgaggctcgggtgacggatgacgaaacagtaaaggcggtgtgtgtccggcacgctcggtgatgaattgcggttcgatcgatgcttctcgttcagggtcgtcttcgtcgatgaccaccacttctggcgttggcgatttttctttcatagcgagttgttcttcttctggatccgcggcgactttgaattcgatttcgtccaagtattgccatgaacaaatttttccgatgacaaattctccacaaagtccttttttgtgctcagtgatccgatgcaaaagtgcgggttgtccgttgacgtgctgtagagtgatgcgctcattctccaaaagttcttttagctcagtttgtactctattgcgtctccatgatgccatgagatttgtgccatatctcctctcgcagtaggccaggactttttctccatctgtcggatagaagtcggacattctttgttgcttcttaatcaattgcacgttgttttgttgccgtagtgatggtttggcttccattgcccgagctgcctctttacttccactttttgccaattctcgcagatgttcttcgtcgtccttttcagtttccttcatttctttttcgatgtctactactgaccattgctttttgcgtagctttatccgttggcgaagttcatccactgctgcttttcgttgtgctgcccatcggattcgatgctcatcgtgctttttcctttcaactgcggggtcgcttctgtcgataagctcttcttttgctgccttccttttcttcgtttccatttgtttttcctcctcaattcgtcgcttttcggttcgttgtttctgtctttctttgtcttttttctctcgcgtttcgtccatttttcgtagtttctcttcgcattctctcagtcgtttgtcccattctggcattgggatttttccgtagagttcaagcagtccatctgccatcttcttgccgtcttctcgtttgaagagcgtgattgattcgagcagtactttgagcgttccatccttgaacagcttgagtttgttgtcgggtcttttggcgtacagtagtccttccacggggtcgttgtcttttgcgctctgtgtcacttctcgtaagccgtggtttcgtccggtgatgaagcgttgcgagcgtttgatcacattcttctttttcggtatcttgaagttgtcgggcatttgaggctcttcgtcgcttccgactaatgagagaacgtcctcagatgccatgagcggagcgatcagttcggagtcggactcggtgatttctggaatctcgagtgaataaagtggatttattgctcgtgctttttgttgcccgtttatctcaatgattgcagtacggatctttccatcctgcccccgaaggatttttagcactcgtgccaaacaccacagggaacgaggtaagtcatcgtccccaacaatgacaatgtccccttccttagggtaaaggggtccggtcgctgatttggttcggtcgctttcgcgcaacgaaagcaagtagtcgtttctccacgttgtccaaaatcgatcgagcatgttgcttgttttgcgcagcatggtgacgagatggttacgactgttggatgttggctcgtagtccggatcttggtgatcctcgttgatgacgggaaagttggtctccgtttggttgtacggtatgaggaagttgatcggtcgaagtgaaacgtaaggctcttggtcagattcgaatgtgagcggccggtgattgacgatggtttcgatttcacaaatcaatgtgtgcatttcgtccaatggcaagaggtttttcccaattgttcgtcggagagcatttttcgtgatgccaacgagtcgttcccacgttccgcctttccatggtgcgtgtgctgtgttgaatctccaagttacgccttgttgtgccatttgttgttgaacatgttcagggagtagcgtgtccgtccaatgttgctggatgactttcgatccggccacgaaattcgttccttgatcagtcatgataagcatcggtagtcctcttcttgagacgaatcggcgaaatgtgcgtacgaaggcttcagcagagtaatcttctgctatttccaagtgaactgcgcgaatgacgaggcacgtgaagagagcgacgtagatcttcacaatttcagtacctcttttgactttgagaggtccaaaatagtcaatgcctgttgaattgaacgggcgtgattttagtcacgaatcgatctgcttttctgccggatttaagcctctcaattgagctttgactgtcggtccaaaagatgacttggtcgtcgtcaaattgaagttgagtttggatgaatttaaccgctttgacgccaagtgtcagtgcttgaagttccaatttcggaattgttgcgtcatggttgaccaatttgagcggcttgacgaggcttttggcaaagattaggttgcattccgcttttgcgtaattagttgttgccttttgatacacggcaattcccatgccgtaattgctggcgtcgca

SEQ ID NO: 4646 - DNA, 2585 bp, Heterodera glycines
ggttgccatgtgcagggagacgggcgacgtggtcggcatgtgtcaggcgcggcattgctcggcgaccggctcggcatcagcctgttctatgccaacagtgcggtctgtcggtcttgtcccccgctttacgctccgtccgttttttttttcttcagtccgtcgcctcggctcttctccgtgccgttctgctccaatttgcgggccccgacccctcccaccaagtttgactcgttcatctacaaaactccgtccaccaacacggagtccgtccgcctcttccgccaactcgtccaaaatgggccggtcgaacgtcggcttttctacccgcaattctcgcgttattcgctgccttttcccggccatcgcatttattcgatcggcgatgagcacgtgtcactgatctgaccaaagaagaacgacggaggaagagaagggaaagaaagggacaaacggaggcaaagagaatacaaaaaggaaaattgccgaaattggcacacaatttaaaaagtcaaaagatgacagccaaattcacaattttcacatgtgtataaaatataagggcgaaaaagtcgcaaaataagggcaaaaatatggtcgaaaaagttccaaatttacctaagggtataattttttaaatcgctgtttttatatgaaaataattttatattaagcaaacaattctaagcgattgaacaacttataaaaaagttgcaacatgaatactaccaaaaagtaataaattttgcatattttaatttataacttttttacatgtcgatatatctttgtgatttttgtgaaacagatagagctagttaagagctttcgaatgataccaaatttgttggatttggtcaacaaagaaaaaagtttcctcttttacccgttgccggcgacccccttcccgcaatggtcatccttaacagagtaaaaatttttcggtttccgagactaaaaactcgagaccgggaagcgaaaaacccaagaaatttcccgagtcgagaaccgagactctcgcacagccccactaaatagtaggaaaaaactcctctttttgattgcacccaaaagttggggtttttatttgcatattttgttttagggttcggaccccgtgggcgggggtggcttttcacgggggcgggggatggcgggggtcagagtcgcggggacgggggcacgataattccgcccccgcgggggcgggggcgggggtttgatttgaattaactccaaaaattttacaaaaaattaattttttatgaatgatgtgatggctccacattcctttagtcaatgtatcgcctcaattcaattccttttggcataaattgcacagattttgtctaaagaattaccaaattttagagatttttggctaattttttaagaaaaaataggtttttggggggcccgcggtgccgataggccgccaggcagattttgaaatttaagctcgatttctaacagatgtttacaaaaaaaataagatttttacgataaatttttgtttttttaatatattaaattatcatgatttactcaagcaaaattggaactcagatttgtaacatattttcttgaggcacatttttccaaaaaaaaaaaacttggtgaatgtgcgagcgtagaggtccggcggtgcagataggcgccgccgggaatgttaatagattttgtccaaaaaatgataggtttttgcaatttttagagaatttttttaataagatttacgaatttttgggccctgcgatgccgataggcagcgccaggcgaattttaaaattaaaaaaataaattaaaaaagaaaccgtcaacctgaatcgaactcacgacagaaagtaatgtaaaggttgattcactaaccactacaccacactacacatcaatgaccaataataaaattaactttaattcataaaaaatttgtcaaaatggttaaaaaaatcaaaattgtataaattttttgccttttatccatgaatatgtcattcttaggggtgtattttcacccccgcgcccccgcgggggtgaaggtcgcgggggcgggggatggcgggggtcagagtcacgggggcggggacgggggtgaggccaaaaaacctgtcccgcccccggcgggggcgggggtgacgggggcggggtccgaaccctaataaaaagatcaatttttcatttaatattttacaataaatcacttggcattatgcgtaatttaaataaatacaatgcgctgccagttcttttttaacaaagtttttgcaggtttcgtatttcgttttcaattataatattgctttagatattttaataaaaaatattcacactaataaaatttttaaaaataatattatttttttctatttttttcaagttgattttttattatattgatttatgcatttagtttattgtttctgttttataccaaacaatgggtttttaattggtgctaggtcgatccacaaaaaaactcagtgattgataaaattaaataaataaatttaattatcaattcacaaaatcacggtgccgtccgcttaaccataatgtacggtgggacacaagtcattttcaatttttca

SEQ ID NO: 4647 - DNA, 2076 bp, Heterodera glycines
tctataatgaaaaaaacaatatgtatgcaattctgctccttgatttttccattgtaaattattcacggaaagtgaacttaccgcgtgaatcgtgaccgtgagtcacggcacaactctaccatttagtaaattgccgtttttgattttaccatggggggaccctttttgtttgcgaaaatgtttattgtataatcataaaaatttattccctgtgtgtttttggggtccctgctgatcacgaatctttcaatttttttgacaattccgatttcctaatctaaatttgaacaaaaattcataaatcaaaatttatgtgttttatcacaaaattgcaaaccaaaagggtcccccctttattttttgataaaattcaaaaacggccacttttcatacagcgccaaatattttatacagaattcatataaaaagtttaaaaaaaacgacgacactttctgtatgcgaaggcaaagataaattgcaaaatgcgaaaattgaaataaaataaaatgggaaaaacaaaaaatgaaaaaaagtgcaaagtttggtgataagaagtgcaaaagtccttccaaaatggtcacattcaatcagtggctttttctttgtatataatgaaactcggctgttccttttcaatgcctttgccttttccatgcttttcctccgcttccgtccctccccctccctccgcttttccctctttccgccctccaaaatgccgccgcatccattgtccctcctccgtgccactttttacacttattatcccatcgatgaccaaatgttcggtttggatgaggagcagcgtcaggtgattgtgatgattaggacttccgtttttaggcacaaaaagtcgcaaaataggcacctaaaaaggcattaaaaaaatcgcaaaataggcattaaataggcacaaaaataggcaaaaaaattttttaattaatgctttgtaggtattaaaacaagtaaaaacttaaatattcaattgtaaatgaaactatttgcctaaaaatggagtccttaacacacagatttggcatttctcagtgttccgtccgttttccattcattagcttcgtcaattggtctttcgactcgcccagagggaattggccccattcgccagtgaaattgaccgtcaggaccaattcacaatgctccgcgagttttggcgattacttggccaaaacggacttttgggcgtcaccgttccggcggagtttggcgggtcggaacgcaattactttgaccattgcattgtgatggaggtgcatgattaccaatttattttttcaattactaatccaatacagtattttgtaaactcattttgttacagtactcatgtcagtgctctctctcttttttaagagattcaactatcaaaattcccacttagcagggcttccatttttatgtaaatacatgttttttttcctggattctccatagcctaattagtaggaaaaacactttcttttttgtgtttgcgaacaaaagtgggacttttatttacatatttttacatatttcgggctttttctacatattacatatgtacatatttttatacatattttagactttttcgcattttttcgtacatattttgcaatttttttttcattttttaaaaattttttgaaaatgtaccccaaaaattcgatttttttcaaaaaaagagatatcaaaaattaatttttaaaatactaaaaggtgattctaagccaatttaaataatttttatggcattttatgcctatttcactttttactaataatttttttccaaaaataaccattttaaaaattttatttacatttttttattacatattagggggtttttgtacatatttaatacatattttagcattttttatatgtatttcgcgatttttcttacatataaatggaagcgctgctaattaggcacaaattcaaaaaccaaaagcgttcaaacaaattttgaacctataaatatttgtgtgcaggaattgtcacgtgccagcggtgccatcggcctcagttacggcgtccattccaatgtttgcatcgaccaaatccgacggcatg

SEQ ID NO: 4648 - DNA, 955 bp, Heterodera glycines
tagtttttaacatgatttttgtgcaaaaaataaccaaacctccatagagaccttaaaatttagataaaatattgacattacttcatataatttcaaaattataagtatgtgtaagaaatcagaccgaaatttggtcatcactacccttaaatcagaacctttctgataaatcagaacagattgaaaccctgcatataaaagggcaataaaaattaatttttgaaaattcgacacagaaattgggaccaaattgaaaaggcgacaaaattgtccaattaaaattgggcaaagcattttgcacattttttgttagaaaatgaacgcgcggaaaactgcggacggaagccattttgtgctgaacggcacaaagttttggataaccaatgcacaggacgcggatgttctggtggtatttgcaaaaacaaacagtgccaaagcgaaacacggaattacggcatttatagtggaaaaagtgggcggagaggggagggcgggggatcaatggacggacaaacattttaaattaaaaaaaaggaatttacgggcttttggccggctcagaagttggacaaattgggcatgcgcggctccaacaccggcgaattggtcttcgaaaattgccaagtgcccggtgagtttatttttgacacaaaaagaggacggacacacacacacacacacatccgttttggcattcagcggagaatgtgcttggcaaggaagactgcggcgtgtacattctgatgtccgggctcgattcggagcgattgatttttgcggcggcacccctcgggtaacgaaaaatttgtgcctcattttccctttggcgtccattcattcacttcccccccccccccacccggagcaggacaaaacgtcgtcgccgaaacgtcgtcgggacaaaacgtcgccataaagaaaagcgccaaaaaattactaacttagaaatttttca

SEQ ID NO: 4649 - DNA, 2881 bp, Heterodera glycines
  unsure (1)..(2881): unsure at all n locations
cagcgctggtattcatactataaaaaaattgaattatgtaaatgtatataacattttgattttttctccctcacaatgcaggagacggaacgccattcgtacttgtcacatttccattaatcagctatgcacacgggatgggctaaaaatattaaaatatattttttgcaaaataatacaaatatttttcctcattatcctatcgctcattcgcaataagatgaacattttgatgggatacggttcagaaaactgtaaatccgtacagaatactgctcatttacaacaatttcagtgtttcatagataaagttcgatttaaaaatcacattctgtatgcttctaaattaatttaaatgagatataaaacttattctaatatacatgcctaacttgggaaaaccccccccccccactttcccatctttcccctcccccccccgcctttcgnggatcttggctttatattcattcattatttattccccttccctccccctcttcagattgatgcaatccgcatgcgacatcgctttcgagtacgcccattcgcggattgccttcggcaaaccgatcggcaattttcaggtactgttttgacttctgctgctgttttccgattttcgacctttccattccatcaccgccgcccgttcagcttatgcaaggcaaattggctgatatgtacacgcgtttgtgcgcctccagggcgtatttgtacgcagttgcacggaacgccgtttctgctgaacgtttaaatgcaaaagtgaattttggacactttgaggcacaaaaaaaaaattcattcatgttgttttcaaacaaaaggattcggcagcaacaattctttttttggcagaaaacgcaacaaaaatggcattggatgccattcaggtgaattcgggggacacacacactagaagacggatttggcaattacctaattaattgttggtgaataattgacaatggaaaggtgttgggagggaacggatacatcaacgaaaatgccgtcggacggctgctcagagacgcaaaattatacgaaattggggccggcacttcggaaatacggcggatggtaatcggaagggcactgaacagagaatacttaagaaaatgatcggcccaaacaaatcgaaagcgaactttgttctcaattttttcattttgatgtttgttttttctatttacaatgttataataagcaaatattgaacgaatttttgagggtttaaaatttatattttgtcagtttttagtccatctttttgtccatatttgacgttttttagtccatataatttcgagccctagttataatttttataatcggaatttttagttaataaaaattctttgcaacaaaaaataaaaagtataaaaatccaatttatttaaatttaattttgtaaatctttttaagtttccttcttaaattgcttaaatctcatcaaaagattgcatttaacaaaaacgttattaaaaataaataaaacatttaacgacggaaaatgggaaagtttttaattaaaatttcaaaaatttttaattattttccagtgaaattttcataatatttgatttttttgtttatttaaaaacttatcatttaaaaggaaaattaactaaaaaattccaactaatcaaaaagataaaattgcaaaataaatgaaatattctatcaagatggcaattagcaaacctaattaataaataatgtaaatttaaaacctttaaacaaatgaacggcaaaaaaaagttataataagaaagcaaatttttgtaacttttatcatatatcttttattaggatatatttttaattgtacgagttgcctttttgtgcgagaatttccatggcacctccgcaaattgtcgcaccatagagaaaagtcatagagctgtgcatttatttgcatcattatagaaaattttgttctttcattatttactgggctgaatattccatagacattcagctcgattagaaaaaaaaagtaacgaatttacggttttggttattcagtagcaaaaatggatttttaaaagaaattcaaaagggacattttagcgccaataccgtatcacattcatggcgcttccccaaacggatttatttaattgattcattcaaattatgccattaattttgtcctttgttcatttgaattcttcagttcgtctcatcaaagattaaaagaaatttctctattctgttaattaatgttttgggttttacataatctttcaatttcaaatgaatttccaactccctcaaacttttttttgacatatttttatttttaaatagaatttctgtggtaaaattttttgtccatataaatccatattttgggtgttttctagaataaaacttttaaatttttagaccatatttcgaacatttttatgaaattttcacaagccaaatgcaaaaaaaagtaaaacaaaaaaaacaccccctaaggacaacacacacaaaaaatgcgaaaaatttaaaatgacggatttttctaaaataagcaaaataaaaattttttattaaggatttttaggccacaaaatacataaaaacttaatcaaaaaatataataaatcaaattttaaaaaatttaaaccaaaaatttttttagaaaaaataaattaaattttgtgggtcaatttttgagaaaatttttcaattaggggtgtattacggaaatttttcgggtcttcttaggggtgtattnttttgtgtattttaaaagaagaaaaaattaggtgcagataaggggtaaaggggccaaatatgttctggcgcaaatggaaaacatttattgcactttagaaaaatatcctttcataaaaaaagcccgctcttcaaaatggcccccggctta

SEQ ID NO: 4650 - DNA, 5571 bp, Heterodera glycines
ccgtcctgaggctgcgttgggcgctgtatgatttcgtcagtaaacgatttcgtcattgaatgaattgtcagtgattttcgtcagtgactttattttcacgttaaatgttctatatacatacttattttctttaatgtattttaaactcaaatagcggataattctttcagtcaatatatatggtgcttaaatatgaaagtaactttttactatcaaacgaattcgtcagtggacaatttcgtcattgaggtgccgaaaaatgtttaaaataaaatttaaataaattttttaagcgccttccggcactttggcaggaaggcgtcgcctgttctcgtcggatgaagacctgctgtacataccgcctcgggaccctgggcaaatcccgaccccgtctggtttccagctacgggtatattcgccatcgggcgacctttatagtcatagtcccagaaaaaatattcgatttttagatttcatattttatttttccaaaaaatgtttgatgaaagcctaaattcaatagaacaggttgaataaatgtgcagaacaaatcagcaaaaaagaaataataagttgtaaaatgtgcaggaacaaaaagccaatcgtccgttaattaattaatttttcgtcgtcgctaattggcaccgccagtcgtctgctgtgtgatgaactcagcaagcgctttctttttcggttgctgctgttgctgatccggcccgccgtcatcctcttcctcctccacctgtccgccgtcattttccgcgtcctcctcgtcctccggcgggggcggggcctcgtcccccggcggcgcctcgtcccccggcggcgcctcatcctcctgttcctcttcctcctctcgcttacgcatcatcttacgcaaatacctaaatatggaaaaatggcattagaaattaattaaatgaaaggggatcagacgactcaccaaacgccaattccggcgccaaacgcgacgacaacaaccacacaatagccagcaatttttctccacataacttaaagaaaagaataactgtatcaatgaattcgtatattggagaatctgggtcccacccaaaattatttttctctcatgaaaagaccaacccgggggttttcggggcttcttatcaagaaaatatcttcttaaaagttttttggaataggctatgcaactaataattttgatacttaaattgaattttttttctgctttaaaaacgctttttttgcggcgcgcttcttcaaaaattttgtgggacagggggggtgatccggcggcgccaataggcgccaccgggaaacatttgtaatgtttaattcgatttgtttacagctttttgtccaaaaatggccaaaatttgcgattttgggctaattttttaagaaaaactttatgccataaatttcaaaaattctcaaccatgagaaaaaaattacattttgttgacataatgccataatttaatcaaaatattgttgaaaattacaaagatttctcaaatttcttaattttttttttaaacttttccaaatgctcatttccaaggacgtccttgtcatccaaggacattttttatttccaaggaagagagtcaaattccaaggacgtccttggcatccaaggacgaatgggagccctgccataagttaataaaaatttggtataaaagttcaaaaatttgtaaacttttgaatttttttctttcggatgctctttttcaaggacatcttgaattcaaggatatttccaaattttcaagtgagaggacccaatttcaagaacgtccttgccattcaaggacgaacccgaaccatgatctaaactattagcgtcatttcatttcgtatttatttttcagattttctcattttatgtcgtacagttcaagaaaggttgtcacattattcatccttagtcaaggcgccttttttatcgacgtatttatcggctacaaacttcttcaaaaacacgagtccgcgcgtcattggctgtactccaattgccccaacattttgcttgcttattacaacacgcgtgatcattactcggacaagggccaattgcctggcaccgaacagcgcaaagaagacgtaaaacggtggaaattggcggcggcgatcgaaaacgaaggccaacaaaaggagcagcatcagaagacgaggaagggcaaatctgcggacagcacaaagggcgaagcacagtgactgaaggagaaagccgaggaagaaaagggaaagtgggtaattatgtcgtttacagaccataaaacaattcgaataaaaaaaccgaagaactttcgagtttttgttcgaatttgggcccgggttttcctgtatttaataacaaaaataatttttttcaaaaggggggggtaccatcgacagttatatctatccctccaaaaatttttgtttaaattgtgtctgccattttcagcaaatggttcggcagtcctccttttattacatgattgtgggcaacttgatcgttattgcggttttcgcggacagggccttaacgagacgctactttggcaagaagatggagccgatggcactgccctcgtggaatgcttttgtgaaaacggagttgaaagaaggcagggaactgacgatgccaattagcgacgacggaaattaattaattaacggacgattggctttttgttcctgcacattttacaacttattatttcttttttgctaatttgttctgtacatttattcaacctgttctattgaatttaggctttcatcaaaaattttttggaaaaataaaatatgaaatctaaaaatcgaatattttttctgggactatgactataaaggtcgcccgatggcgaatatacccgtagctggaaaccagacggggtcgggatttgcccagggtcccgaggcggtatgtacagcaggtcttcatccgacgagaacaggcgacgccttcctgccaaagtgccggaaggcgcttaaaaaatttatttaaattttattttaaacatttttcggcacctcaatgacgaaattgtccactgacgaattcgtttgatagtaaaaagttactttcgtatttaagcaccatatatattgactgaaagaattatccgctatttgagtttaaaatacattaaagaaaataagtatgtatatatgtagaacatttaacgtgaaaataaagtcactgacgaaaatcactgacaattcattcaatgacgaaatcgtttactgacgaaatcatacagcgcccaacgcagcctcaggacgggcgcttcgcgcccgttttttaatttttgggagacattcgttcgcttcgcggcccaggactggcgcttcgtgatgctcattgagcttcagggcaccattgaagttgcgcttctgtcgcgaaaacaaattaagtcggtgcaacacattttgaaatttgaatttcaaatttaaaataaaataaaagaaaaataataataataaaaattaggcgttccccacgaatatttttcgtgcattcacaaattccacgcttttgtcgaagtgcgctgctcctcctaccagcaaaaggcggtccaactccgtctggtggccctccaaattcgccgtcggcaaatgcccgtcgatgaattcgacagcgatgacgaggatggcacagcttcaaatgccgatgaagcttatgccgatggtggacacgatcagcttggccatttggttgaccaagtgggacacaaagacaaaatgccaaagcgtggaaattcaaacagtgctaacatgcctttccaggaagtgtgcctgctgctccaccaacattcgacttgtcttggcaatgccctcgggcggcactgtccgttagcgcgttcgttgttcaccagtcggcacgccttgcgggacaattttctgtcctttgtgctgccctttggcaccgccgtggaacggaatgccaaaggagcggaagcaagcgctaacagtggtgccaccatcgaattggatcaattattctcggatgaagtgcttgacacgtgccaacttttggactttaacaggtgggccccaaaaaagaagcaacgagaagcgaactaattaatgaatgaattaattacctaatttgcaaaagtggacagtgagagcgaaaaggtctttaaatgaataactgcttaattagctaacacttcggaacagtggcaaagactaattaagagtgaataataattagactgagataattaatcacagttttttacagaatgatggcacaatggctgccaccggtggcagtggcgtcggaataacaccgacgcatacggtgacggcgccgacacggtcattggatacggtatcggcccgacaaaacgaacttggctactgaagtttttttttttattgcagcattcgccggctgagttcaaaattcaaaaatttccgaatgatgccgatgaaagggtcggcgacagaatgccaacaaattggccgccgcatggcattgacgactctgaacagcttcaacacttgcgaaccgatgccaacaatgtgtactttgccaaaatcttggaatttgatgacgaggaggaggaggaggacagcacgggacgagcagtgggaagaacgacgccgcagggcgcgcgaggtgagtgccaagggggaggggctgaggacaaaattttaggcttttatctaacaaaacaccctgccaggcatttttatgccgatagtatacctaattcaccctcctccggcagaatttgctacaaataaaaagaatatctctgcggcatttagtgactgcctacattgaacacattccacgtggtgaacaggccaagccgatgcaaccacaaaacggtgccgtcgatcatcctcattttggggaggaggaggaggcgaagaaggacaaacagctgctggacgactcttccgcagcggaagatgatgattattttgaggatgacgacgaaaatgacgatttatatacagacgaatcgacggagggacagcacgacattcggcaccgaatctcaaacaaaagcccgggttcggcacggcccattgcgacaaatgaagcgagccgaggattagccgacctaagctcgaaaacacgaggtgcggtgaactaagcacacgaaccacggcatggacacagcggtccaattttgggctccaagtacaaatatgctggatttttcgtcttagtggtctgtgagttagtcaccaaaaggggggtctcaagttcaattcctccttgtgtttgtgtataaatttcaattttttaaagcaaataaataaaataataataaatacagaacgccaaaagaacaaatacaaacagtaaaaggtacacactatattttacccttgattttatgaaatttttttagcttataacttggtgaatactagagcaaataaaaccattttatgctcattttgaagggaaaattctggagaatatttctaagttagtcaaaagtttaaaaaaattgtttattggcagataaatgattcatgtgttattttatatgttagagacaaggaaatagtacgcccaaatgaaagaaaaagaaaaacctttgtccttgaaaaaaattttttcct

SEQ ID NO: 4651 - DNA, 2622 bp, Heterodera glycines
tccgtccgttgctgcatttttcaaaattctggaaatcgttttaataaatttcctctttcctcattggctgtccaaaaatgcccaaaacattacccaaccttcgatgcattttctccactttatctataaactcgaacccaccacttcccatttttttcaggccatttcaattggtggtgacatcatgacagcaaccatcggctggcccctggtgacaaccggcgctgggaattgtctgcttcataccgcatcgttggttggttgaaggcaacaaaaatggcagggggatgcaattttgggagcagtttgttcccccccccccttccccacattgttcccaccgtgtgggtttgggggggacacgcaaaacgaaaaattacggattggggcaattttggcgttatgccacaatcccaataccaggaacggaaaaattgccgaatacggtatcaactcaaaatagcctaaaaacacgtttataggttttcttagatgcttagaacgatagaaaagcttaaaattgggcgcggaaaagcatttaaactggtttttgaacagggttaaaactcgaaaaattgaggaaaaagctggcctcctgaccttttaaaaaggtcaaacccagacaaatttggtatcattcgaaatctcttgatgagttaagtctaaaaatcagggaatgaagtcgatccaaagccatctgagcgctaggacaactgaattccagtgaaatgggaatttcagtaccaaagaaaaacaaactttttttttactttttttggtaagggttggaatcagccccaattatagaataagaaaatttgcatgataattacgtttagagcctaaacctaaagcctaaacctagtccgtcttcgcatgctcctttttgcgtgagtttttgtgcgattttgagccgatggcttgcgttgccaaattttggactttgagacgtaaatatccggaaaaaccattaggaataaaccacaaagatgtgtcttgatcatacttgtcggactataaatgttcgattttgggcgggctaatgtccggaccgcaaatccgggccgaaaatgtcgtgcatcttaccaatcaaggaattggaaaagtccgggtcggaggacgagctgctcgtcactgatgccaagcgtaaaatgcaccccattggaactgttgcaccggctttccagtgccgcccttgtcgacatgagctgaaattcgaatgacgattatggcccgtgttgactacgcggccgaaaatgataaggagcacaaacccggacttggttacttagacagatgggaggttattgactaggaacaatttcgagtgctagccttaaatcttagatccgaggaaatgcgccggctgctcttgtgaaggagataaggaaacgcctgaattcaagcgcgtttgaaacgcaggagcaagtgggaaaaatatgctgacgaaatttgtaggcattttttgttagtaaatgctcgaaagtggacatgcggcctcacgaccaagtcgacgaaccgtttgacattgaataaaaggttgcatagtttttctgcgtaaattataatgaatagggttcgaagttgttttagagaattaaaaagaattggattttgtatatttttaataattaattttgaatttgtttacatttttcaagagttcttacaaaagcccatttccgattttaaggataatgaaacaaatttttgggttttgcacgggcctgtaatatcaatttgtaagaagtgataaaaatgcgaaatattctcgcgcctataggcactgcgacaagacaatcaaatttgcctcgaaaaattgacttttcggtgatgtacttaaaaaaattacaaatacattttgaacaggttgtggtgctgcacgatggaactgacgaaacgtacccgatatgtgtcggcggcctttttccgatgctcagtgcggactatgacacaaaccgggagccaaatcaaacattcacgccattcccgatttgttgggagaaatggccatgctaccctatgggcaagacagttagcctagaggtgctgaattaattattgtatttgaacgcgttttatacacaaaaaaggaggcattcacacgcttggccgactacaagaaacaatgtcgggcggggctacagcgtttcatgttgcggtgtctcgaacaagtgccacaatgcggaggaggagcagcggatgggacggaaggagggacagcttgtgtgaaccccttgtgcgggcgcacatgactgtacatgatgtgaaagaaatctgcaaaaggcagattaagcatttggagatgggaaaattgggcagggaattcggacgccgtccatggctcgcgttgattacggggcagccaatgacaaagaacataaacctggcctcaattacttggacagatgggaggttgtgttttggcaaggaaaaatttgcgaatattggcgttgacttacagatcaaaggaaatgtgccagttgaatatgtgcagagcttacatgaaagcatgcaaaagggcgaatttgaaacgcgggagcaagttaaatgatgttggaggaaatttcagtatcttttgttagtaaaagggaaggacagttaccgaaaagcaatgcaatt

SEQ ID NO: 4652 - DNA, 2325 bp, Heterodera glycines
  unsure (1)..(2325): unsure at all n locations
aaagaatggatgcagtgattaaagctgctggcaatagggagtgcgggcacatttattgggtctggaaccggcagactacttcgtggctggcgtgcgaacgacggtggacctggtgttcgtggccggagacaaaattcgtgccgatggaacatcgacccggggcaagatggcatgttttctgctgctatcacacccactggggcgatgaatcgaagccggaaacgaagggaaaagaaagccgtgcaaaaaggattggcaaattggaggaccgttataaaaaaggtgcgtttttgcttttgagtacgcaattacctaaaaaaatcagctggatgtgctggccgatgcttataaggagatgaagtcggcctggccaccttcgaagaagcagtacaaggacctagcggaaacatacactgcggtcataagccgtggacggcaattgatcgaagccgaattgccagtgggaacagacagggcaaaagagacagaaaaagtggccaaaaggatggagtaactcagttttgagtttgccgaatttttggacatggcacttgaagaagatgaagacctgcagcgaatgatcgaccaaggtccaggggagcagcggcagcagccgaagcagcgggacgggcaacaacaacaggagggggagcgacagggaaaaggagtcacgaggaggaagacggcagatgaggtagtaaaatccaagcacaactttaaaacaaagcttccacaggttttgcggaagaagagaaacaagaagatagagaaggcggtgggtcttgaaagggaattggaggaattgaagagacgcaggagatatgatcagaagccagaggggcgggagaaaattttggagacatgatcaagctctgacgttgacggaggatcagatgaaggcagtgtttgaagagcaacgccaaaggcgcgtgcgagtgaaattcgaagagaatgatcggcaatagcagacggagtatgagtcccgacctgttccattcttcttgggaatcgggttgagcgaaggggagagcagcagcagaaccactgggcaggaagcgggtggaggatgaaggaggaagcatcagggatgagatggcggaagagcaccaacagcggcatcacccgatgaagcagcaggaagaagaggaagggttgtgatgagtggttgtgatctgagagagcgcaagcagaagtttgaagatgaggagcggggatgggaggagatcaagaagagcagcgcctttccattatttgtaccattttacacctggcctccctccgcacccggatgcggttgtttcatttttattcttttacaccgccgggcggtttctttcctctttttattttttctgaataaaaaatgattggaaaaatacgggagttgacgagtgggagcgaggaaggggtaataataaaaataaattatatgatagaatagtaagatgaagaacgacttcaaaagacaaaaaacacttattgttggacgttaattgaaattttaaaaaatccattattcatgaaaattgaaaaaaaatttctagtatttttggaatatttttttgaaaaaataactatcggcatcgcctagtaatctgtcgacgtcgtccctttccctacagtaacccctttttcgaatggcgctaggacttttcgacagcggacctttcgacagaaggacttttcgacagcggacttttcgacagtaaaggacttttcgacagtgaaggcttttcgacagtgaaggacttttcgacagtacactaacaaatcaaatttttcattaaaaacaaataatttctaattaaaaaatatatttttataaattactggtttataaaatatcttaatttagcggggtttaagaaggcattttagtttattgcactgcatttttggagttctcatgaatggttttcttatcaataataaataatttatttgtttgacctccgtttctcgaccggcccaaaaaagagtgaccatgccattcataactattactgaaaatatttttgaattgctgtgaaaaatgtcttctggttctagtggtcccgaagaaggtgaaattggggccgaactctttgcaaatgaagcctttgaagaagcagaggaaccagctggtcttgtccacttttttcaagcagaaagcaagcgtggccgagagctaatcagaagcggcggttttgaatatgcctttgaagcggacagcggacttcaagaaggtgcaaaacttggaattttttgtccaaaccccaaattagggatcgaattttggcgctgtatcaatcggnccccgtattgccctgggagagtgcatgtcag

SEQ ID NO: 4653 - DNA, 3198 bp, Heterodera glycines
attttggcacctttggaaccaaattagcccttgatggtgcctttaaggtaagaatgcaaataggttctgatcatgggcgaagccaggtggccgaggccccccccccccgaaaccaaaattttaaaaaattaaaataaatattatgtaaaatttgttaaataatattatcaattttaaaagaaatcccatagaaatcggctttttaaaaaacgaaaaatattccccaacaattgaattaaaaaaaattaaatcccatttgagaactggccaaatattttgcaaaaaattggcttggatgccgtcaaatttggcaatccgatcctgtaaatgatgatccggctgtgggccattatcaacatgtcgatttgtttatgcgaaactggattgtccaaaaaaattaccaaaaccgtaatgccacttttccaatttcattatggaatatgtgtttgaatttgaatgcgaatttatgccgtaccaataactccttggagtcatggcatagagtttggaacagcaaatttaagtaaaatttttttttctattttatttttttcgaattttactttttcgatttagaagtggtcacccgaaagttagtgaaattgttaggggaatcgaatctgaagatttgcattgggcaaatgttgttcgagactgggatgacacgcctgtgaatggaattcgtggtaaaggcatgaaaagaaaagaaatttatgttgaacaagacgaaaatttgctcgcgctttacaacacacgtgaacagcgccatccctaccaatatttaagagctgtggcctatcgaatgccggacccaatttaacttttccataaaaacggaaatcatttcgaaacaaaaataattattttgcttactaaatgaaatagcattgtcttttttaaaactaccatttactgtcgaaaagtcctccccttaaacaaaaattttttctgtcgaaaggtccgctgtcgaaaagtccggcgccctttcgaatgagatatccccatacagtacccttctttgttgctaccgcaactgttggtcccattcgctgatatttgtggtgatggttgctgcagtagttgtactgctgctgttttgtggtgctgctccgccttggccgtcctcgaataatatttcgtgttaaaaaatggaaattatggaatcccccgccccccaaaatttaacttttgtttatttaacgcaggggtgcgatcgaaaatttttcaaaataagaacatcaaggtcaaaaaataagatttttgggtcaaaaataagaacattttgcgaaattgcttcaaaacaattatttttcaaatttttcgatcaaaaatgtactaaatactatatttttagtctcccattattggttttaacaattttggggaggaaataagcaaatcataaatttcagtgcattccggatcaaaaaatcagatttttacgaatttttttgcggtgcattttttaaaagactttttggggaacacgcggagcggaaggccggcggtgccgataggcgccgccgggaacatttttgaaaatttgagtataatttgttaacagattttgtccaaattttgtgattctgagccaatttttaagaaaacaaagtatttttggggttcggcgatgccattaggcaccgccgtggaaaattttggaaatctaaatgacattacgccataaaattacaaattttctgaagaattttaagaaataagaacaaaataagaacaatagcccgaaatcagaacatttcttacaaataagaaggtgctaggtcgttccacaaaaaagcagtgtgggcgttccacaaaaaactcagtgattgattggtcattttccggaagcctatcgcaccactttcggggcaccaaaagtgcctgatccggaacccggaccggcccggttaagaacaattttttgttcagtttttcaagggctatctcccaggccgggtccggttcttgatccattcacttggagcccgtcatgggtcgggcacatctgccggaggaccctcagcctcgcctccgaccctgtcgatggccaacccaagctaagcttgccggtaccaggcttttttgtacagctcgatgaactctacaaaacggtatcaatggcgtcaggctatgtctactacaaatggagaaaattggcgagaagtgatgtcaaaaattaaaaaatctgaaaatgacttgcgtcccgccgtacattagtattaaccggacggcaccgtgttttgtgaattgaataattaaatttatttatttaattttatcgatcactgagcttttttgtggaacgactcaccacgaaataagaacatttttattttgtaagatttggccctccaaatcagagcatttcttataaataaggacagatcgcacccctgatttaacgcttaagtagtgaaattattaaaggactaaaataataatgtgactgtttttttccgagaaaaaggctcagaaaaacggttcggcagaaaagcgaggccaattttaatcatcaattcctttttgaacctttgttttacctttatcgtttcgaaatttattgccaaaatcctcgctatcgttgccaaggaaatatgctaaatacgggaacgggtcgtttcggcgccgccaattcggcgccgccgtttcggcgacgccgtttcggcgacgccgtttcggcgccagggtcgtttcggcgccgccgtttcggcgccagggtcgtttcggcgccaaaaattttttaaggccctgcaacttttgaagcagacgaaaatggttaaaaattcacaataaagtttacaagacccaaaatgcacaaaaaattatatcgaaaggatccgaacctgaccagcgccatcccttcagaatcaactgatacggatggattcttaggtcttaacgaatcttaagatccttctgattatattttcgtgatcactgatcagcggcttaaataacttctaaaaaaaattttggaagattttggtgaaaatttttcccactcaaaaatcatgtcctccccctttggtcctgaatttcaaaatcatttttattgaaaatagggaattcaaataaaaagtataaaattctccagatttttctttattttagaccttttttgtaacataattggtccacatttaagtgtcaaattggcaggaaatttaaactcgtttggcaaacaaatattttttt

SEQ ID NO: 4654 - DNA, 1388 bp, Heterodera glycines
aattattgaaatgccattagagggatttatagcaattaccaaatgaatagatgatgctttcttgtatcgtatattcagattttatttaaaaaagactttctgtataaaaatttcgatatttaatctcatgagtcgcagttggcccttttagtaataagacgcagttggcccgttccgtacgtaaatattatactataaaaaataaaagttcaagaaattaatattaaattttcaaaaatttcatttcgcttttaacagttaatgaagatttagaaatttcggaaaaatggctgaaaatgcgcgatgctttttcatatattttttggccatatccacgatttttatgaaatattttaaccccgagccttctttgggtttttacgtttaatttcagaatattgtacatagtgttgtgtgtatacagacaaacatagacttaagattcgtcccgttctccgacttccccatttttttcgcttcttccccgacccggtccccggcatttttgggccccctccccgacccgatccgtacattttgcgtctcttctccgacacgatccttaacatttcttcccctattgtctccgaaatggccggggacgaaccctcctaatacaaacaacaaacagaaaaaaatgtagtagcatttgttgtatgtatatatggggtttattattcattccgcggcacattcaacggaagaagctggccaaagatgacgcgtcggcgccgttcccacctccgcccatcgatgccgtcgtcgtgtgctgctgatgtgatgcagccatcgaagcggtggaacattttacgcccgttgtgcccgccatggcaccaaaaccgttcacgttgttgtacatgccggcgaccccgccgttggctgccgccgtgctcatcgccatgccggtgccgtacagtgatgggaaacaaccgccggaggccgccgccgccacgccgaactgattgtaggcggagcccatggtggagttgaagaagcgggcggccggcttaaaatggcatttcgggtgcaaataatggtatttttattcaattaaggattaaagtcggtgggaaacctttcgaaattcttatagagttttgaaaaattctttcccaaataattatcgaaaatatttgaaaaaaatatttaaaaaattttaaataattcagtttttaaaaaatccaaagacttaaacataaaaatattaggtttactaattctcattttaaaaataataaaaaattatgtgtttttattttaaatcaagtgaaccttttttcaaaaaagtttaattctaaatttcactttcattttttaaatttaaacagagtttcaaacaactaaactcttagtgtccgatcaaaaaatgtctgccccacttctgccga

SEQ ID NO: 4655 - DNA, 5966 bp, Heterodera glycines
tgcagcactgccggggctgatcagcgaccggtagttggccgcggtccacaggtcgctggcggttgctgctgccgcggcaccgttggcaactgccgcggcaccactcagtcggctggccgcctggctgaacaggtcgccggccgccgccgccgccattgtcgcgtgggcggccagcgacgcgccgctcgccgcctcaccgctatggtggagatggtgatggaattggtggtgctgatgatgatgatgcatgttctgcgcaggttgttgaagtgccagtgaaatgcctgcggcggaaaaaaggaaggcatttatgataggggggctgcatgcaaagtgccgagattttgagtgcgaaattcgtgaccctaagaaattgtgacgagagtcggaacccacaaaaaacccgatgttttttctctcgaatcaatattcgagatcgagacaaccccaagaaatggtaacaagagtcggaaccccaataaaatcggatgttctttcccgaaactgaccacgcgactcgagaccaagactcggcgacccaaaaaccagccgggaacattcccgactcaacaccgattcttgatatcgagatcgaaaactagaaaaaggcctgccatccgcagcagagcaaatcatataaccatttggacaaaaaaattgtccgaaataatgccattgaaaaagtggcatgataagcataggagttatggtttttaccatcgaagtcgaatttgtaggcgtagcgcttcccatgcactttgctcatgatctgtttttcgtagtagtagcgcaacgcgcgcgacattttgtcgtagttcatgtgcggcttggacttgcgctcgccccaccgtcgagccacttcatcaggctcgcaaagctggaaattttcaaaaaattttggtctagcctaggagggggatggggattggggagctaaagttaaagagggtcgaattttcttgttcaaatcccggcgtcatgacaactcgtacaaaggcaaaatccgaaccatttttggccaaccctggaacgtctctggtcgtgacacgaactaatttttaatcaaaattcctccctccttgccaaaaatcgaaaattttcgggtagccccccccccctccgccagaaatggattttttagccaaggcttgacactttttctcaccttgaattcgccatgggtgccctcccaggtgatcatttcagcgttcagcggattggacaacagttccaataggaattgccacagttggatttggccactgcccgcagcggccagccgactgcaaattgggcccagcacttcatagggattttctgtgaaaatgggttactgtagtattacactaatactgtaagagagatagtgaaattttcctaatttctcaaaaagctagcggggcacggcagaacaagagagttgaccaagagagtcgtgatatactgagaatactcgggatcgggatggacaccaagaattgttcccgagattttatactaaaaattctaaggatttttgaaacagagtttttgtttttcagggagtcgaaatgtgtggccccgagacccgaggctgggtgccgagaatggagaccaatgttgttgaccaaaagaaactcagctcgagactgagagccatgatttttcccaaagaatgatgccaatgttctgcttgtgatgaattcctggactaaatctaatccctagccaattttgcgaaattctctaacatttataaaaaattttaattttctttcattcttttcatgtaaattccaattttccattaatttttcgttgattggcatgctcaaaatcccgacacggttcaccttccccccctctctttagtcctccttttaagcttcatcagtggccccatctatcaatggacacagcagtggtaattagcagcgaatttggagcgcgcgcgcgtccctaatttgtgtccgagggaacggtgactaatcgctcacattattaattattaccgtaccaatgcccaaatctttgaccgttaattgccaatggacacacaacgccacaacacatcatacaataaaccttgtgctcaacctaatgcaaatcccattctcgggaagactcgggcaatacacacaacaatctgttggcgtttgaccccattttgccctgggaggggaggtcagcagaatgccaagaaaaaacaattaggcatgcattgtgtggattaatttgagtccgtcctcgggagcaaaattggcattttgtacaaatgccataaattaaaatataaaattgagagaaattttgttcataatgaagtgccaagatttaaaattctttttttaaattttatatgtaaaataaaaggttaagaacagaaaacaaatgaaaaggtcaaaattaatctgaatatatcttcttttaaaaatttaatttcagggaatggataaaaaagattatttttttgctgtcttacataaaatgccaaatatatttttttaatttcattaccaatttacaaatccccccccccctctctctctgattttctttccacaaacttttcaacagattttctcaatttatactacttaggttgtttgacttaaggactttctgactggaccaaaatccggtgccaaattatgcaaattaggggaggcttgggggtagaagcgctgaaccatgcatcaaaggagttcatcaacaaaatccggtgccccaaaacttggcccacaattgtgacgccgcagagctgtcgggcagccaatcatggcaccaccaccgctcactcacttttggctctgctgccgtgccgataacgacggcacggcccgccggcaatggtggggcaccaccgacgggggccaaattgaattttgccaacaaaacaacaattgaatgatgtgccctttcgtggggcacccatcgcagccggaggcaaagtttaattaagagaggaagaaaggactaagttgtcgagaatctcgaccccggaggcgatggccaaccgcctctctcccggagcgagctgaaaacaatggcaacaaaattggccatagtgcgccgaaggcacggacgggcggcccaatcggcggcacaaacaaaagaagaaagggaggggagaggagtttgagctgatacgaaatttggcattttgttggtgcatatacggtatgccgtacataaaaaattgtgcgcccccttttttggtggtccttttctgagacatgcaatatgatgtggtgacttggcccaataaatctcatgccaatatcggtggcactattttaaaattcagtcggataccccccccccctcccgttttattgccctgggggggaggaaaagcatcgccgctctttgcctctgtcccctcaggccgataaggggggagggataatcgttgcacaaaagcccatcgctaaagagtgccccccactctccagccaataaggggctgcggcgggagggggtaattgtcccgtcgtcgagagtcttgagaaaacggcacggcggtgggatgaatggcacaaaggggacggcattggcaatgggttcccccccccctttcccgcattcgttggacaataccacaaatgatgggccaacgacatgcacatgatacacgcgcatacaatattcagctgctgagggtgggcggagggcacacaatgccaaaaaatttgagggaaatcaaaaaaaaattctaccaaactttatggtatcggtaattgacaataagtgttaatttgccaattagtaaaagtgagggaaatggtggctcaaacacagaagcaaccaacatttgacatttatattttaattaatacgagcacgcgtaggttatagtgccaaaaaatgtttgcaatttggcacactttcaaaatatattttggaaataaattaaaatttaaaattagaattttacctctgtctctctgctgatcattagggtgttgaaaagcacagctcagtgcgaccgattgatgagcgaccgacaaagaaaagggctaaaatttgaaaaatcaccccaaacggcatatgcagccccgccgctcgaaaacggacctcctctttcacttgcaaatccgccgttgtcccgttgctggtaacgctgccgctgtcctctgccccatttggcgtcagcgcaccgccatttgccatcgacaaattcagtccttttaggacaattgaagggggcaagggttagggaaaaaattcagaatttttgtgccagaaatttaaaaaatcggaataccggtaccgaaactgccgggtgtcggagttacacccaatttatataccgctctctactaataatcctcaagagtctcggtatatccctatttcgagtctcgacactgtctcgaaaagaaccaatccaaaatttttggggtaattcgccagcttcattcccaatttctgcatttttgtcccccatttttacctgctccagttgctggtgcccttctctccattccgtggtgctgaaggcgtacggtagcctccgccgccgccgctaccgtaccaccaccaccagtcgctgtctgtgccgctgttccccctcctcctcctcttcctacagaactgttactgttgtgccgtttctgctccaccgctgctgctgatggtgagccaattttggcaacagttgtgccggtgccattactacggtcagcttctccattggtactgttgttgttactgtggctgttgtgctggtgccgtccaatcagtgccgtcgttgtcgccattgcttcgcccgtgtaaaatgccatggttcccgggtggcaatagcgctgcatcgacccatgacacatcatcccattctatgatggggaatttatcaataagatctggttcctaaccaaaatgtctgatttaggcatatttcccaacattcggaggtgatcagggccaaattctcgaccccccccagcactcgggtcggcacgacattggctcaccgttgagaacggcacaaatggaaatgtgccggccattgtgaaatcaaagggcgatgccgccgttgtcgctgccggcgacaacatgtcttgttgctgatgttgctgctgattgtggttatgcatgtgttgctgtagttgttgttgttgttgctgatgcggatacacaatgccctgcggcttcgtgccattgtttcctgtactgcttgaagaagacgacgatgacgaggaggaagaggacccggatgccgaatttgcatctgtccatgaaaagcaatttaactcatttgtcagtcatcattttagcggtcaagtaaccaggttttgtcccagaggacggtttttggtcccgaaatttcgattacaatgccaatggcacgaagccaccactaaaatgccaattctatgcgatttctgcttccgcgagcttcggatatcccagatttcgtaaattctgtataatcaatcccgaaagctttgtttggtcatgccctgaccacaaatgtcaatttatgctacggcttggctatttgacccagcccgagaattgtcatattcccgaccaactccacatgcttaattacccgctctttccgttgcagctgctgttcgttgtgccgatgttgttgttggtcctgttgtgccatcgttggcatttgtcctctgctgctgtttttgcgttgcgccctgagtgccgacgacattgccgctggcggtgccaccgttattcaacataaaacgcctaatggggcagcacggggatgtttcaatgagcaaataggcccccaggggggggggggaaatccgggccacaaaggaaaaggatgtcctttccgagctgagacacactgcaggggcctggatagaaatataggaaggtatggggcacattctcttattcccccccccctcccccctctacccccctcgaaaaaaaccggaaaaaatttccctccccacccaataacccctcaaatacaaacttttttcttagacaatttacaaaaaccacaa

SEQ ID NO: 4656 - DNA, 911 bp, Heterodera glycines
aattgcggtgtgccaatagaaaaaagagagaggacaacggcaaacggcgaaagcgcgggagtgtgccgttgccggagatttggccaaaaaggtaatttaatccgaccaacaaagtcaagccgagctgggctcggcctggggataaaggggatgagtttatccctccccccgggcatcctcaatccgagtccatagcattggcataataattataaatggcgggaggggggggggagatgaaacggacggatggatgacattgtttgattttgaagaagaaaatgaggagaaaacgcggcactgcacaatggcggacgaatgaaatgaaaatgtaatggaaaacgaagatgaaattgatatatggtatttatatactatttttgagagttaaatttgaagtgaaaattaattttttgggaattcccattttttggcataaaaatgaatttttgccaaaaaagaaaagttatttatttacacatttaaatatttgtgaaaattaattaaataattaattaaagttgctttaatctgggaaatttgtattttgattttcaaaattatgtaaagcggtcatgcccttgaattcaaaaacacatcactgtctgatccttattcaatgttggggcaaattgattaattaaagttgcattagtctggaatataaattttggtctcgcgaaattttgctaaaactgtcattgtgtgtccttgaattcaaggacacacgattacccgatcctttttgtaaagatattaaacttgttcttattgccttcaataatatacttggattaggattttgcacacaaacacatcgacaaattaagatttgcctttttttgtttttggattcattaattgttcataagcgtccttgaaattcttggattttctattcaaactggaaa

SEQ ID NO: 4657 - DNA, 2951 bp, Heterodera glycines
cgaaagactgccgggaacgaaaagcgactgatcacttaccgtattattatcattattattatacattttttgtcaattttttttttaaattaaaaaataagtaactttatatcgcattttccattatttttgaaacatttttatttgttgatttcaaagcaattttctgggtcaaaattaggcggaataaataatatgtgtaaaaataaaatcgtaaataattaatattgctaattaggtaattattgctattggtatgtccaaaagttaggcaatcccagcggcggaacggcggccattcttcccttcctcctcatcgtcctcctcgtcatcggttgtcaacgaaaactgaaatttgtcacaattcagtggtgcaaattgcgtacacaaaaatgggatggcatatttcatcggctcattgtcagacagtacagcaataacaaagcgtacgaatttgttcgggtccgtccaaaaattggccgtcgtcgtctctttggcattcggcgccgctttgctcccggcagcggtttccggcaccgcttttgcggcagcgccggtggtgtccaccgtcgtcgtcgtccgtcgcgtgccgatgcgaccaccgctgccgctgctgctcagcctcaacccgcgctgctggtgacgttgtcgagacgtggcgacgggcgtcgtcgtccgtttcgctttttcagcgttggcaatgccaccgtcgtcgtctccgccatccgcttcaattgttggcactttgtgcagcagttggcttttgccactcgcccgttgctgatgttgcgtaaattgtgagtgaatgaacggtccgttggatgacaacagtggcgcactgtgaaaaggcgcaaaacaaataaattcttatgagaaattttgggtttttaaagatttttttcctataattacatttttcagggaatttttttgaaaaaaaaattttgtataaaaaacgcattaaaactttggaattcaaacaaacaattcacattggaccagaatttggtcagaatgggtgtcccaattttgcatttcgcatcaaaaaatgcttcaaaataatattcgaacggtttgctgaaacatattttcaatataaaattggaagaacttacaaaaacgtaaaataaaaggtattactcgctgatgtgaacgcggaatgaccgtcctcctccacgacgaagacgacaacgacggacaaatgggcgaaactttgccaacgcaaagtcaaagagacgggcgaagacgaacagcgccaaatgggtggccaacgagacggagacggcgatgagtgcacaagtcaaatggggatggacagtgacaaagtcatcctaaagaaagagacaaaaatgaagaaaatggaggaaatgttgggggaagaagttggagcagtacacatggacagagctggaaaggaaaatcatcaattaattttaaaggaggaatacattcgaaattgggaaataccataaacacggggaagagagaagttggttagtaagaatggtaaatccggtccaattatcggtaaaaggacatttaaccgcgttcctgtcagcaaaattaggcaaggatagggtcaagaaagggttttaagagcagaaattttgaaaaagaagaccataccgaatattaaaccaaactgacacttaccaatgccagtcgaaatcgttcggtcgtttcattagcaccagcggccgccgccgaaaggattgtcgatgatgaagacagcgtatggttgagaaaattagacatggtaaaatgaaaatgcaaaaaccgctgaaaccggaatgaaactttcctattcggcggaactttgaagaagtaaaattttaaaatttgaataaatgcaaacataatgccaaaatttttagcacttaatttgaattcaaatgaaaggatttcgaatcacaatgatacagtatgtaacaaattatatacggttaaacattgtcgctgaagaaaaagttgcgtaaaattgttaaaattgaatatagcaaaaaactttcttcacttaaatttagccctatccctgagctttcgaaagcatccaaactcactgcctttccacagctctacgaattgttcattaattttgaaaatgtttgctcataaattaggtgctcaaaaatatatgattaaaactttaaaaaaaaaaaaattcttctcggagctaagctatggtaaaaaactgaaaataattcctgctagggcctaacttttggctgaacaaataagtcaattacaccaagttgatcagcagatcactccttcagcagaatgatcttttcataaaaatgtaaataattttaaatttattttctatccttcgttccgcttttatcaataacattgttgaggaggagatcacgggaggaggctaatgtgtgtgtgcaaaatgccttctcttcttctgtcgttcgttgtcctctttcatcaagttgtggtgtggctgaaaattgacaaatgatcccaaatgtctgcttcatccgttccccttataattaattagtcccggacagacagtaaatgattttcgattaattggcgttttcaatggaattgctattcgaatttaaacatagtaagctctaaaatgtccgggcacggcctccacagacagtcgaccaaaagtgatgacagaccttccattcggaagcgtagccattgccagcccaagtcgttgaacttgggcagataaagcgtcaattttggcataaagacgctcagatttggtgtcaagatgatctcgaattctgttgtcgacattgccaatttgggtataaatccggtcacttagtaagctaattcgtgtataaaggaacattgcagacatgatgaggatgaagaatgcaaagaatgccaagatgaggtaataaaacgaaaaacttgcaagtcttcgattcgttgtgccgactctgcacatgcttttgtgtttgccttttgatgtg

SEQ ID NO: 4658 - DNA, 3345 bp, Heterodera glycines
tggtataaataagcgtgtataaaccagggggggagtgcttcaaaaaaaatcccgtggccgcggatcgcgtaaaaaaagcccggaatcgcggtcgcgctaattaacttctatatgcttacaaatagaagcttatgctagactaaaaaaagcgaacgaccggggatggtggcgaatttttgcgttatggcgcgcaacttttaaagtgcgaatttcgtgtgcacgtcagttttctgtccgtgccccagccgggttaatgcggcaactcgtacaatcaaaaatgttacaaagcctggcctaaagcttaggcctaccctaagccattgtatgaagaattgcgttttgtacgagttgtaatgacaacccccccccccatcctgctgggccatggtatgaatttttgtgaagcaaagcggcacagattggctttggctgttgtgttggcgtcgtcccagcaacataaaaagcagcggtggtcggacagacggccacttttcttcccccgcgggcgcaatctatgcgttcttcaccttccttttcgtttctcacatacactctctccactctctctttctttttctctctctttctcctgttttacgctcctttctgtcttatgtgttgtctgttgccgctgctaacgattggagaatgggaaaagcatttctttttctaaaatttaacccccccgctgcgaaaggggaacactgcctaaaaattaggtaaaaactcaactcgtacggcatggggggggggagggggggacgtaatgctgcattttagggtggtagtcctcaaattagcatttttgtctatttcgacagtttgttagtcgtaattcggatgaatttcagtgagctcgaataatcgcaacaatctgatcattgaccagcaaaaaaatataaactaatctcgaaaacgacgcttttccttgtccaattcgcaaatcctttgttccgttgcaatgtcggccgactccattttctcgaaaaagaaacccacacaaaattttggtgagtttgtcgtatctgcagtcacaagtttcattaaaacagctaatttttttttgcatttttcgaatgtttaattgcggctttttgttctgcacgaaacgacaattcgaattcgcacactaacaccaatctgcaaatctatgtgtaagtatagaggggggggaggattcattcgccacatcccttcgaaaagaaataaaatttctagacaaaagatatgcatttttgcaaatttatcaattaatttgatatgaaaagcacaaattgatcattttttgcaaaaatccgataaaaatcacttttagcgcgtagcatatataattttgaaaaatgacacgaaaaaaaagtcaattaaaaaaatatttacctaattaaaattcaattttaaaaattttcttttcgaagttttaattcattttaaacgtttcggtctttgttttgaataattttgtcacttatcgccagttttgagtagttattatttgcattttttaaattttcttttgttagcgcgtagtatactgaattttgtcttattaacatgaaaaatcaaagtccaaaacttatatttaattcactttgtcctgaaaatttacgaattctatccggtctaagcaagcaaagctcgtattctaccgaaatattatttattatctttatcggctcaattttgaactttatgcgcaatccacaacaaccccgtaggcgttctcttgcggcaacccgagttgaaccaatccaggtcgcccaacagccccgacaaccgcggtacgccgatatcacagcgcgtcttgacacgctggaaagaaacagccaacgggtagaatggacgacgtcgaaaattatcttctgcaaatttaggaccgcgacgcgtgcaaggaggccgccaaaaaattacgatcagctcaatgttttcccatgtttatatttttcactcatcgataactttagggaagtacttcctgttcatctgcactgtgattattggctctggaattggtgcctattatcacctcagcagccgcatcgacggtcttggcagccgcatcgacggtcttggcagccgcatcgacactcttgacagcactcttggcagccgcatcgacagtcttggcagcactcttggcagccgcatcgacggtcttagcagccgcatcgacagtcttgtcgatcattttagtgcctgcaattgcaggtttattgttttcaaggggttgcgtagtcggtgcacggaaattgaagatcagtcattaagtgcaatttctattcacatttgtgtctatcgttcaaattcaagaaaatttcactctgttaaggtttttctttgggtccctgccccaacgccctcaagagtttacgcgttttaaccgccaattcactgataaattgaatacctaaaaaactctaagactcttgcccttttcggaccgattaggtgcaaatgtcagtcaagcgatacaatgagacactccatttttaaagtttaattgccttgccattgactcctcatgtgtactacttaatagggacaggacgggcccggggcctggcgggcttttgccagcccgcccggttcccttttttggacaaacccacgaggccgggccgaccggcaaaacgggttttttgaacgggcggcccggtcaattgtaagtgttgcccgggctcggtagttttaaacttccggtctctactgcgcgtcttaccacgccttctttgccaaaagtttccactcaataatttctttatcttttcagtcttccgaaatgatcggttttcgccttcaacaaaaggaatttgccacctctgacctccgatctcacatcgcaagaaaaaacgggacatttgcgtataaaaattttttcgtaatttgtgctttgcgttaacttcacgctcgaattccaacaaaaaagtctaaaaatgcaaatttttgaaaaactgattttggccaagaaggtaggcaattaataaggtcttattgcagttcacacgaccacaaaaaaagacacgaccataaaatttttggcaacttcaatgcaccactttttctagaagcatccaaatgaaacatttttagtaacattcgacagccctagaagtcctctattattctataaaattgcaaaaaaatttcgttgggtttcaaaaaaagttacggctatattgctagaaaatttcaaaaaactggtttaattttataagcatagtttttttgaactcaaacgaaattttttgaaattttgtagagtaatagaggacttctagggctatcgaatgatactaagaatgtttcatttgtatgcttctagaaaaagtggggcgcccccgcaaaaat

SEQ ID NO: 4659 - DNA, 4395 bp, Heterodera glycines
ttacacgaaaatgcccaaataaggctaaagaaagtgtaaaaaatcacaaaattttgaaattaggggtatttgaaaattcaaaaaaaccaaccttaaagggctttcagttttttattgcatttttctcaacgcgtttcaccaaaaaaggcctttcttcataacatacgcgcaaaaaatggattcccaattccccccactttgtttgtttatcgattttaattgtttccaagtcaaaaacattcaattataaatacatattaaatttaaaatttttaatttccctgctgctggatgagcatcaacaaaccaaacaaaattggtcacaaaacaaagcaataaatatcgatagatttcaatcaaaaaacaaaatgcaatacaaaaaaatatttctctgtatgtctctttgccatttttcactccattaatcggacgttttctgctgctgatgaaacccaccaccgccggtgggcgactgctgctgatacgtgaacagtttttgttgaatttgccgacgacgttccgcttcttcgtccgcgctgatgcgctcattcatggccaaagtgacctggaaataaattgttgaaaatatatatttaaaacccaacatttaagaaaaaactcaaaaatttcgaattttttttctatttccattttataacttttttgcaaattgtctaatcaccaagcaatagcttagaaaagcttttcaacatgttaagctttctgtggtatcagattgttggatttggtcaactgagaaaagtctggaaatccctggcttcttaaacctcattggcacggaaacgtgcgcattgaactgaaaccaacccggcattccgtgggttcacatttatggcacgcaaagaaaaaaaaacaaatcctactcacttttttcatttccattcggtcacgttcgcgcgcctcttgggccagtcgccatttctcgtccatattggccacctcttccgcaatgtgcacagcctgtcacagtaaaatgggagcaataaataaagagtaaaccaaatggttgattaggaaaatgaatgtcatgcttgaatcaaatgtatcaaccaatttacacacctttaactgcactccgcccgccttggccattgccccgccactgccgccccctttcgcagcggaagcacggagcatcagtgccatccgtggagtctgttaaattggcaattattttattgccgatgtacaacacacataaaacatacctcctgatggtgctgttgttgacgaacgacagacgaaacgccatgggaaggagtcaaaacaccagcaggagaagcgggccgatcaattggcgtcgccgttgtaggctcagtgggatcggctaaatttggaattaatcgaggcgaaaggtaataaaaaaaaaaatgcaaaagagattttgtatgtttaccaaatttgagtttccgctcaaatttttgccggacaagcggcggaacggccaaatcgctcatcggtccgtgcagcgtggcgggtgcggactgaaatattaaatttagataatcaaaaaagcacgctctttttaaagacctgtaatgactcaaccatcaatcggtcaaagtcccgcataaagtcttcgtcctccggctgcacttgctgctgttgagtgcgcacacggatgtgctgtgcctcgtcatcgtcgtcctccgctgtgatcattcccacttccgagacgtcctcatcctcctcctcgtcctcgtcactaaacatagaacgaatttcaggataaaataatatatttttttttctcatcaaacaataatgcaaacgcaaaattttcgtaacaactttaaaacagaaaaaaaactactcgaaaaaccggaaccaaacttcagccctttgaaataattgtttactccataccaattattagtaataatgcacacctttcctcgtcttcctcctcctcttcatcatcgtcctctgatagtgactccatgttttcttcctcctcatcctcgtcctcctcgtcgtcgtcctcctccattattttttccagcctccgctgttcgtcgctctcatccgcgccgcctttggcaccggctgccgcccgttttgcggccgctgaacgcatgtttgccaacaattcgtcgacctgcggagagtattccttgacaccaatcaaaaacccaaattggctaatcaacaccgcactttggccttgtagaactgctccacctcggccactctttcgtgggcctcggccagccccttggggaaatgttcgcctttacgccaagtgttcaagacatcgtccaccaaattttccacatcttccggaaattcgtcgagcacttcaatatgttcggaccaggcctcgcgcgtttcgtagtctgcaatttacgaaaattatatttttggtgttgattggggataaatttttgacaaacagaatctgaagaagaagcacagaaagtggtccatccgccgtttgcttttgccgctgacgaagaactcgcaaacagtgtccacgagagtgatcgcgagccgaatgcgctggagacgaaccaccaaatggtcaggaccgtcaacggggcatggcgcaatggcaaaagtgatcagttggtaaagagcctggaatatcggatgcataatgatgattgggttgacaagtaaacaatgataatcgaccttaaaaagggtggccgtgttgcacacgttgtagttgaacagttggccaaagtaggccaccgagcaaatggttcgctgctgaagacgcgtcatgttcaactccatggacagacgaataaactcgagcacctgaacaggtagagcaaccaataaaatggttttttcagttatgttacatcttcaaatcaaaaatcataggacgatttctgtcttggtgatttagcagtaaacagaaacaaaagaaaccatggaaccaaaaaacattgtagaaaggtcccaaaattaccaacttcgtccaacacgcgcactccaacccaatcgtggtgatcagacagtgcgctgaccagcgaagcgagccgtggcaattcgtcaaattgtacccgttgtgagttggacaagaggcgaatggcaaattctaacgtcgatagaagtgattccgaattttatttaaaaattataaattaaattgtacacctgcaaagccgggatcggaccagttcatgcgacgaaaagtgttgacacgaaattcggtggccaattgttggcgtacaaattcgtactcaggcggcaaatgcgcacgtactgcccgagcaccggatgcctgctcgtcgggcgggatcaccgcgtaataggcattttccaacaaaatcttgcaaaataaataaacaattaattaattgtatttaattaggagcaatctcgagaattttcagtctcaaccattactttagagtaagtaatattattgacccgacgatttccgctaattctcacccactttttgccgagcgtcttcaatgttggatgacttgtcatgcatcacttgcatgatcacgctcatctttgcgtgtgcatccggcgaccggtggagaaaagggccacaatgttcgacgaacacactcaacatgtcgacctgcacaaatgaagggaattgaaacaatacaacagtggtagaaaattatgattttaatcaaaataaatggaatcgccgactttgagatgggtcttaataaagcaacatttccgtgttatcggactgtaccttaggtccgcgcatggacaccaacagctgacgcaagcaggtcaacgcctccgcttttggcaaaatgcaaaacttacactaaaaacattaatttaatagtgtttgaatttctttagtgcccatggttgttataaaaacgaaagctgaccagttcggcaagaaaagtgcacaagtgcagcttggcgtccagtcttgtcaatgccgtcaacacttcggccacctttttgccgggcacccgcggcccatcggtgggtttatggccactgacaatgcgaaagcggagcaaaagctcatgaagaacctgaaaacaagacatccaatctatggcgttgtatgatagaagggattaaagcgaaattatctcactaatactttccaaaatgacggaatattggtttatattttcacatggatttttgggaataaaaatgtctattggcttatataacaaacaataattaatgcgccccgttacctgcattgtcaggtcaggataagcgggccgcaccgttgctaaaaagcgagcgtagaaaggcagcaaatccaaccggtcgacgggggcctaaaatggctggcaaaagatcagacgctttttattgctttttaattggtattattaaagcattgtcatatagagcgagcattattgaccatttttaaataaatttaacaactaattacctgcaaaaagtgttgga

SEQ ID NO: 4660 - DNA, 5843 bp, Heterodera glycines
taaggaaattgaaaaacgaaaaaattcctgtttttttttaattttcgaggagagaccaagggatgtaaaacgcacatgtacacactccgtggtgtaccacgtgcatccttcgtttaatttttaaccgacaactttctcctccctagcgtgggtttctttgttttctggcgcaattattttatttttcacgaaagcataagttcatttagacaaaggttttttatggctttatgagttggaagggctacatggaaattttgtggtttttggatccggattttcgagtcataacttacactaattaattggttcatcgtttttcaggaatgtgttggtcagtcatcagcgttcgaaaaagcatcgtcaaatggtggaactgttgcgtgcgcacatgcgaacggaggaccaacagctgttttttgctggcggggagggagcggcggcggcggaagagagcggaggaacaaaaaacgacggaggaggaagagagactgatgaagacgaggagagcgacagcagtgatcacaatcatcatgaccaacagggacagagaagagggaagaagaagagacaacgcaagcagcagaggagggaagcagcagccgccagacggttggaggaggaggagagagaacagcagcggcaagacggagaggagcaggcgcagagagaggaagaaacaggagacggtgatgagagagcacgttgtgtggcggcggaagagaaggagaacaacaacagcggaaacaacagttgtggtggaagagaaggagagtgctacgaaatagcggtggcaacggaagaagcagagagcggaaacatcaccgtaaagaaggaagcagagacggccaagaaaaggaagaagggcaaacggacggatgagcagcagcggaaaacggcagcagcagcaggaggccatgaagagcaacagtcgaaaggcccggtgcattgcgagtgcacgcgctgtggagccgagttcgaatcgaagaccaaactgcacgcccacctgcgcgacagtggtcacgcgacgctcaagacggtggcggacaaaattggggcggcggccgccgactcggcgacggacagcggaggccgacggaggcggaaaaagaaatgacaaatggtggtgaaaacgattctataaaagtgctgtcggtatgttgttattttgttgcacattattgtcgagtatattatacaacatttgtggttgaattttcgataatttttctctcttccatttcgacaaaaaaaaagaggaaaacaatttttttattaagaggaagaaatgagaaaaaaccatacatgaaatagtgaggggggggggagaccaaaaacaattgctcttcaaaaccgcttttttattgtggcgcgctttttccaaaaaacttagggaacaggggcgccggcggtggtgtaaggtcaccgccgagaaagtttgaaaatttggtgatttgattatcacaattaaatgaccaaccaacaggaggggtcgaccccccccccccctatttcatgtatggagaaaacaaaaatgaaaaaaggagaaaaggtcgtcatgaaagcatcgaatttgttcagcaaaaactccccaactgtccggcgtgcttaaatgtggggacaaaaaattactgtttgaaaggtgcatttttcgagtgcgaccatttaggcaattaaatttaaatccccccccccccgaaatggatgggtttcatttttcagtaaaacttaattttaatacgcgcactttttcgttgagctccttaaactgtgatttgacccgaccaccacactttgtcatcggcgcagtgattgcagcggctccggcggaaacaaatatagactgaaaaatggggaaaaaagctgactctcaaacaaaaaataaataatgccaaaataatgaatctgatatcattcagtatcattaagtgctctcgatttccctacaaaacttcaaaaaattgcgtagtttcgaaaagttacagttaaagattaaggaaacaagttgttttttttgaaaattttacgatatttcacaggctcaaagagcacatttaagactatcaaatgatgctaaagtggttcatttggacaacttgcaaataagcaattgttgtgtgcatagccctctgaatattaacccgaattttttattaaaaaaacacgggcctaaaaggtgcgcacttacaacaaggagagaaatacgagcataacgtggcggcaattggaccaatttgagtcgaccacaaatttcggcaccgccggcaagcacaacaaaagggccacagaagaggaagatattctgtgtacaagaaaaaaagtatgaaaatcaatttcaaaaatcgggagtaattcgtttccccttagaaaaaaaaaattttttttttttggtaaatattaaacaaaaaatggccaaaaatatattttcatcgggtgaaaatgtttgaatccatgcagtttgaaaaagattttttttgctgcttttttatttattattgtttgatttatataaaaaaagtgaaaccttcaacaagcacttaaaaaccattgtcctcagctccctgaactcatcgtcggaaagagtcctaaaaacacaataaatttttaacattttaaaagcgaaaattcaggaatacattcttgcaaaaaaacgcaccgtacgtggtgaaaaacctccctcaatacacacatgcatgcaacccactgagtacaaaaaaaatttattttttttggaccccgaaaatagttaacctattcataatttattgggtggcccaccgtttattggcgcaaaaaatgcatcgaaaatgatgtaaaatggaaaatttaaccgacaattttaccccccccccccccttccattaaaaccataaatccattgatcggaattccgacaaatctctgacacagaccaaaaaccaacccaaggaattcgcgttgtttcggcttgtaaaagctccaatgattggcttgcatgatcgagtaaatattatgtaaaaagctatgttttaaaattaaacattttttattcggtgaaaacataaagaaagaaatttgctcaaaaatttttagtgttttgtcataacaattagtgcgaaatcgaaatttgaattttcgagttttggttcgaattcgggtcctggttcgaaattggtcgaaatggatgtcatattcgtgctcacaatcagagcgcataatgggagggggatccttacaattcccaaagtttaacattccgggtatcacaaactaatgcagtggtcgaatcttttctgatttgtcaaaaatattctgattttgtggtatagtgacaacaaaaacttgtcaatcagaaaccggcggaattccgacccatacctaacaaacacatccacgacctactcaagaaatttgcgctgtttcggcttgtaaaagctccaccgattggctgcgggccttaagtcgtcgctggccgttgacggaacctccgccggttgcccctgctcttgctcttgttgttgttgtggcgctgtagtactactaatagcatttgtggtgctgctgctgctgtctctgggttgcctttgaagaagaattgcctctcggttgcccataattttccggcaaaaaaatggcttgaattttataaaaaatttggcaatagttgcttatctgcgaaaattatccggcgcggcggccggcgcctatcgatggtagcactgctggatttgactagttttttatggttgtagtttatgcgtccaaccaatgactttgctgttttttgggccataacttttttttaaaggtaaaagcttaacattttttgtatcaaaactaaagcttaaagtctcggaatttataatttacagtatacctaaatgtaagaagaaaaaaaacatgcgatgcaattatatgaaagttgtgttaattaactaatgcaaatgtcatcaacttctgcttgtgaacagaaatcatttcccgtagaccaaaaggtacgtggaggctggtgaccaaaaaataatttaattctcccaaaatttgtcgaattttgttaattttgcggtaatactggagaattggtgtcccggcgaaaaattaattgaaaatttttctttttctaaaagtcgttaaaatatatttatggaggttttctgtggtcgctgatcacgaatctgacattaattttgaccaattttgaatcccaatacacgaactcgaacaaaagtgaaattcaaaattctcacacacaaaaatcaattttgaattttcgactttttgtccgagttcgggtttgggattcgaaattggtcaaaattaatgtaaattaatgtcagattcgtgatcagcgataccgaaaagcccagaatgcatgttttcatgttttcttagatgaaaatttattttaaacaacaagtatttgatgaaaaatcatagacaaaatcaatgctttttcgaattttgagcccagatccgtaataaatttgggattttttttaatttagaataaaacgacgggaacaaagcgaacccgaacaattgaaacaataaccgttgctgaagagacggacaaaaacgaagaaaaagtggacaactcatttgacaaaaagaaacggaaaagtgcaaaacaaagagtgccgacgaacccgacgaagttggcaccgtcaacagcggaaaacggcacggaagaaaagggaaaacaaaaacgaaatcaaaagcaggggcaggtagagttcgactacgaaatgcgccgggttttgccacctcagaatttggaagtgacagtgaagaatggtgagatggagagagaggatttggcattggcacgactttttagagggatttggcaccagttttaaaatgattttggcaccgctttttcaaagggtttttgcgacaatttttatgacgaattttgcaccgtcttttagcgactcggaaacccttttaaagcatttctggcaccgttttggaaccacttaagacgatttttgcacctttttggggcggtttttgcatttttgagcgattttggcttataattgggggacaatttctcttttaacccgatttctgattttatttaggtgttcgttatctacagccatattggtatgtctttttggatggtaacagcgagaggacgtaaatattaaatttttcttttcaggggccttttttgcggttattccaagcggcgatggattggaaaaacaattgccgaagtgtacgccaccgagttcaacaaccttctccacccgctttacgcggttttcactcaaaattaaaaaaaaaaaacattttttttcagcaagccgcttgccggaagggtcgcatttttgtgaacagtcggccaattttcagtgcgaaccatcgcattcgtgacaacgaatatttcttgcacataaatcacagggtttgtgttgtttttttgtgtttggcgatttttccctttttagcggcctccagtcttttatcctcatttttaaggacggatcttatttttagaaaaaggatgtaaaatgcaaatttttgatggtgtcaaatgaattttaaacgaatttcaaaaatattataccaaaattaaaccctatttagcacgagactgaaattccgcacttgcccatccaaatactggccgaaactgacgacatattggtgctgaacaagccggccggcctgccggtccatccatgttggattttcatattttttaagagggtctttgaaaaaaagatttcgttttcataatttacatgctctgaatttcaagtaaaaaataataccgacaattttcagcaaaattgggagagggtacgaaaaaattatcaaacaaaagcgcgaattctttttagaaaatccgt

SEQ ID NO: 4661 - DNA, 1715 bp, Heterodera glycines
  unsure (1)..(1715): unsure at all n locations
ttttaaaaaaattttttttttgggggggggggggggggggggggggggggggggggggccccgcgagccaaacaaaaaaaaattttcccgattcggaataaaatttttttgaaaattttaggcccccaataggggaacaaaaaaaggaaattcgctttttaaaccaattttaaattaaaaataattcattttgaaccttgctcagtttgttccgctatttcccgtcgaaaatgcgtcggtggtcagctgcaccatcgtcaccggtcggacccccccaatccggatccatctccaattccctggccacccgatcatttgtgatcggttgtacaatgacgagggatggggtccggagaaagggcaaggcggccaatttacggtgaaagaaccccgganacaggtgggtgcactttgggcaatggacaaaatatgtcccccgataattaaaaaaattacgatttaaaacaaaattatgagggtgggggttagtgaatgtccccgaaatctgtaaactctactcgatttcccattttttcgtccgcaacattttcagttggcgcacgacattggcacaaggcattcaaaagacaattggatcattgaacgggacgaagagtacgagcagcgcattcgacagattggagaagacgaagaggttggtaagcggagattggataagcactcgtcccgaaaatttaaaacatttgaatttttatttattttttttttggaattttactccccccccccccctcatccaattgaatttcttgctccctaaaagaaaaacattttccctagtgcgcggtggacgagttcgacctgaaaaatttggacgcctgcctcaaggcaatgccggcctttgacccgctctgctggggctgtgcaatcaaaaagaagcgggaaatgcaggaaaggtgggtggtgtggtactgtgtaatattgggggggggggtgtacagtaggggcagaagggaggctatacgataaatcggtcaaattttaaaaactttggaaaaaactgcaagtgcctggggagggcgtgctgccttttttggtgatttttgagccgccaagcaaatttttttccgattaacgtggtactgtattaatatgggggtatggtaggcgtggatgaggcctgatactgtaaaccggtcaaatttaaattttggaaaaaacgacatcattcctctaactccgaatggaccattctgcttttttgagcggatttttagtcaaacaaattttttttcgccgatttttaaatccacatttttgggttttgtaaatttagcttccacatgccaattttttattgttttttttgtacagagattggctgatggcgctgcattgtcatcgctattccggcgacggatgggcctacgaggcgccgttgcccgactgggccaccaccgaaattgaagctgacagtgatccgcaacagggggaggaggaggaaaatgccatgaatggcgacggcacggacaatcaacaaaagcagaggaggagcagcagtacaacaacaacaccagcaacgacaaaaacgacggcgggggaagaaacggtgccgaaaagtgtggcaccaccgacggcgatgacagaggaggaggatgaagaattggtgccgaagaatgcgcaaaatgctctatgatgacaatgacaaacgggcatttttttttttttgttgttttgtttgtctgtttttgttg

SEQ ID NO: 4662 - DNA, 4460 bp, Heterodera glycines
aaaattctctcttcgacttgtttcgttttcgaaaataatttttgtcatttttgtgcatccctggtaggggttttaatataagaagtcccattagattcatcttggcaatgaaaaaacgaagaaaagtatcagcaaaatcgcctgcggccatatgagattgatgcaacccgaggcattgctgagcgtccacgattgaaaaaatacataaaaaatgatgcagcaattaagcaaatgatcattgcatacgatatcaaagagaatcgcaatgacgctgatgtgctttcccacttgtacgcattacaatatcgtttagggatgaagggttttgaagcgtgggattagaattttaacgatgaaaataaaagaattgttgttgataaaaattttgtcactttggctgggcgccgcaagtgtcggcgccgcaaaaaaaatagccgcaaatgtcgggccgcaagtgtcagcgccgcaaaagtcggcgccgcaaatgtcgcatcaccgaaaacatcttggaacttttcatcccaattaaaccctaaccaatcaatccaaaattagggtaattcataaaaaaacaattgggtttcgctccgacccttttagcatccatccatttggcaattcgatcgctttgcaattttcaagccgatcaaaccgattgtcagtggcaccagcagctaattgattaattaataaatttgtcgattttgaccggaaccaaatgattttatgttgttctcgcttcacccttttgcacccacttttgtgccctttcccgcttttgctcatccccacaatcattgtccgactgcttacaaaataatgagttgctgctgatcaatacgacaaatgaaccaggaattgagcgaccttaggacggaacactcacggagagaaaaataatcggcgaattaaacacagagagtggataaatcagtaacaggagcaaaatcattttagaatcatcgattatttaagccgtgtcgagcgacgagaccgagcagtacagatagacatgggtgctgcttctgatttgtttggtacgcaaaatcgttttcacctgcgagaggccatccgttgtttttcagcagccgcaaaaacaaatgggatcgcaactgctggccatatttgaagtccgcaaaaaatgatttttttggcaatttaagtcctaccgatcggagactattccgagtcaccatgacttatcgctttaattcacgacgcaatgacaagcggtcaatttgaagcatttcatgagcaaatgcacgagttattattcgccattttgagccgggctcgcagtgccagtgaaaatgcgacgagggcacaccgcgagacgaagtcgggccaactctttgagcagtttggctagtggtttatgatgatggccgacggggagaaatgccaaaacgaactgcggagaagagcagaaacattgctgtgggaaaaagatgaataagggaacagttgagaaatgcattggcagagttggaggtgtacatcaggacggagccacgacggacggcgtggaacgatggacggcaaaaatggtgaggagcagtagcgcggaacaaatcgaccttaaacctttcttctttaatgagttttcgggtcaaaaaatatccgattctgatcatatcagcagattaggagaatgcaatggcatttgctttagtgtcccaatttttttgcgagtaattaaccattattaaattattaacccaccaaaatgccaaaaaaggtgcccactgaattggtttttgaaattgctaattttgtgcagtgccatcggaaatggacacactttcgtgtgtccagaaaaattgactacccaatggttaaaaggatgaaaaactggctaaaaaccctcaaaattgcggttgtaaattcaaaattaattttaaattaaacaataattaattgttccaatgcctttagattgtccaattccgcgcagcatttgaagaactgtgccacaacgtggtcaaatattcacaaaagaatcagcgcaacttgttccagcggatctacaaaggcaagacaatgttttaataaaaactttaaattaatttagttttaaaattaagagtttttcaaactgtcgctgattggtcgaatgccgaatgtccgtgccattgagagtcttggtctgagcccgggggacgccaactatgtgggttttagctgttaaatcataattggttcacagtctcaattcacgggttctgttggtctcgacttttgggggtatacgttttgcccttctcggggtcttcggtcattcacagtctcaatcaaattttgaattcttggggcccggaaattggggatctacttttgatgatcccgacttttggtgacccgacacattattctccgtctaattctcgatggcattctttttgcccttgtcggggtcttggccttttggctacccgacttttaggcatgtgaaaattgggggcccgaaacatgggactatacttttgaagatcccgacttttagtgacccgacttttgggtacccgacatatatgctccgtctaaattcttggtgtccttccttttcccttctcgggatcattggcctttccaagtctcgatcaaatttttaattctgaatacaaaatcatcgttttgccatttcagatcactcagttgaaggcggcttgtcagggtgttgtggacgcgtgctgtgaatcgaactcggcgagtgcggaggcctttgcttttctcactaaccgtatgtttgggagagagtactgtacttttgaataaaatctaccgtttttagacgtcatgacactgaacagtatggttttgggtggaatgccggaatagaactggtcaacaactctgctggattcaaacaacctgcaggacaaaacccattgaaaatttaatcaaaaaacaaattttcgaacgtccatatcttttttctactcatgaatcggttagcatttgcttataaaaagcttctcataagatctttcgatttataccaagattttccaatttggttgtcaaaacctttcagaagctcattttctgaatggtgtgttaagtgaaatttcataccatttagcacaaatttaatgggttttggttaaaaaatttataaagtgtatggcatagtgtttaatttttaaaaatttatttcagtgacgaaacacaaaaaagaattatcactcacttttgccgtttcatttcgtatttaatcaatcctttttcattggcacattcggacttattccttcacttttgtatttaaaatcatttgcatttaaattgagccccgtcactttttgtcaaatattttaaaattttaatgttgacaagtaaacagtttaatcctttcattcatttgctactttcacattacttacaaatttaataaaaggatgtgagaagttcaaaatagcaactctaaaatgcccgagaccttataaaatcctgataagtgtaattaaaaaatggatggctagaatccctaccggaaaccccaatcaaaaatacgttcctaagaatcgaattcaaatatttccagggaatctcggcttgagaattcattgaaatattctaatttttcaaaaattacatatcttaatgttagaaaatgttaggaaaaaatgcaaattcaaattataacaccaaatttacccgaaatgaaacattattaaatcatttgtgaatagcgaataaacaataagtattcaaataaaaaatgatgaaagtaaaacaaaattacaattcgcattgatgaaaatggaggaatcaaatggtcaaattatgatggtaattaaagacatttaaaaattcaattagcaaaacattttttagcacagggaatttgttgataaaacacattgatgatgattataaactattcgagaaatgattaagtaaaaaatgcacgagaaatgttcaaaaacaaacaaacatttaaaatctgatcaaaaattaaattactaaagctgatcagatcaacaatgggaactgatctaaggagaccaaaaaattgaaaaaagcatctcattaatataaatgctttgttttttcagatcagttcccaagtgatcgacattggacttttttaaaaagaataattgattgaaatttttgatcagaaaatttaaaatgtgtgaaattggaagatgagaatgagagaatgtgttggagcatcgactaattagttaattaattaatcaattagctgctggtgccgctgacaatcggttttatcggcctggacacttgcaaagcgactgaattgccactggaacgatggaagtgacggcggaatgctgaaaagggcggaaatgaaagaataaataattttaaataaaatatttatataaaactcatattttttttaaggggggggggggggggggcccccccccgcccccccccccccccctccccctcaaaaagggggcccgcccgggggggggggggggggg

SEQ ID NO: 4663 - DNA, 1856 bp, Heterodera glycines
  unsure (1)..(1856): unsure at all n locations
ggtgtaaaagaggtggggggggagaggcttcgcagcgaggggttcgcaaattttggaaattttcttaacaaattcattaaaaaccccaaaaattttccccggcggcgtctatcggcaccgcctgaccccaaaaatcccaatttttctttataaattggctcaaaatcgcaaaaattggccatttcggcggctgaccccccttcgcaaaaaatttttccgacccaccccccttttttatgtatgataaaagttaaaaataatttttatttaaatattttttaatttaaaattaataaaaattatttttttaaatttatttttaattattatattccttaataaaaaaactaattttgatgttcacctgcgtgctgacttcgtgtccgttcactgccataattcggtcaccgatcgccaacttttctgctgccgaactgcccggttgaagcgaagtgatctgaacgagaaagttgagcaaaacttgggaccatattaagaactaattaaggcgaagagagagaaatggcgagacattttttgtgcccaataattaaatgttaattaggcacagaaattctgatgcattattgcagattcttatttattatgatactcgtgacaaaaaattacgagactcgagaccgagaaatgacttaaaaatttcggtagctttattttatgattcatagtgtgactaattaggtgaagaattaattccctaacattttcatagactcaattcctggaccttcaattagggactgtttaggaagaagtgttgttccaagatgattttcaacgccttaccaaaatgcccctcggccttttgccgatgcccatgccccattgttggccctcgtccttcttcagcagaatcagcacactttcgcagcccatctccttcaggtcggacctaacaaaaatattcttacaaattagggtcacagatttaatctgattttatgatcagtttaaaataatcaaacggccaattcctgcgaataaatatgccaataaggttttaaaatgaattataattattgggcaaaatacattttacctaaatgccaaatttaaatttatcattatgataaggcggaccaaatctgtttcggtaataaattgaatcattatccaaatttatgatcaagaatgatcagcagagaccaacattgatctgttttttcgatatattttgtttcggtaccaatagatcgaatattttcgggtttgatttttttgtcgaaatgcgtcgatcaaaccactttggtcggtctttaatggcattagcatatatgcccacctcagcacggtgcccatcactgccgcggacgccaccgtagcggagcctccgccgctggcggatgagcccccggcggccccactgccggcggacgaacggccgctgctgccgccggcgccgctgccggcgaaaccgctgatgcttgtgctgccgcacgcggaggacgaagcggcactgctggcggtcggcaggtgcccaccgcccgcgagaggacgccgctgggaggaggcgccagtctcttcggaagccgacgtttcggcgatggatttctgcaaaattaaacatttaaatatatttttaaaaggctaaaaatttatttaaaaaaaacaatttttttaaatttataaaatgaaaaaaaactggtaaaaatgatttcttacacattaaatgcaaaggcacgaatttgttaaagtatttcgaaaatgaaacttttttaataaacttttattgtttgctttaatttttgtttttataataaaaaagattaataaattataggaganaaattttggggtaattaataaagttggttttattatattnnaataaatta

SEQ ID NO: 4664 - DNA, 1945 bp, Heterodera glycines
aaaaaaaaccaatttgattatccgctgatcaacagtgattactcatcacatcaaccggggaaagtggtgggatgggatggaatgtgacggcaaaagcggcggatcggacggacggacatttgacgattaacaatatttatgtaaattaggttagtaaatgaaattgtgtgaacagcaaaaaagtggttgaaaaataatcgtaaaaatgggagccgggacaattgagtacggactgacttagtggagccaaatgaaaaagtatcggtcggatttctcaaatctcggcaaaacattttgtgccgatcatctgctgctgttttcggcattaaaaagatcaaatggaatgaatgcaatgaatgtttgtgccaatgtgttgtgccattgcttctgctgtgcagcttttcttgcctctttttttaaatttttttaacaaatttccgccaaattttttctcgacaccgagacccgaagcccaacaaacccgagactttaattgattcgagatttttttcagacttttaaaataaaaaatcgaatgctcaagttaaattgtttttgaggaaatttaacagattttttcaaacattgaaattataatgaaatttctggcccggttaaatttgaactcaaaaaacccctcaaaataagcatttaaatgagaaaatagtttcttaaaattgtcaaatataatttaaatatttatttatagattggtggaacagtaaattattaattaaaataatttattgggactgaaaatgtgccaccctcggccatttcgagaagaaaagtttacggttcacaagaaaaaattgttattttttaaaatttgaattgattgaattgaccaaatcttctcaatttcaaccggcctcagcctattttgttggcattcttcagcattttcattccttggatgaatcaattaaatttaaattcaaaatttagcaaaaaaaaaaaataaataaaatgaaaatgatttgtgccaatgtgttgtgccattgcttctgatgtgcagcttttcttgccttgggtgaaagtctcggattttctcagccctcgtaaacataaatgaatgatgcaatagcaatgtatgttttgtgccaatttgtggtgccgttgcttctgcttctgctgcgcagcttttctcgccatttctgatcagtgagtgatcagtgccgccgaatgagaccattggctcggcaggggatttgagagggatgcgattttgacgctaattaatggaattggtcataataattttcttattcaaaatatttaaaaaattgtttttatcaattttcataactagggtggggatttttaggggcgaaaaattccaatttagggacctaaataggggcaaaaaattcgcgaaataggggcgaaaatagggggaaaaaagtttcaaatgtagaggtgaaatttattaaaattgccgttttctctatgtaataagttaaaattaaggcaaacaattttattcactgattgcagttagaaatgaagtacattccgaaattttcggggtttaagggtcgattcttaggggtgtatttttccaaaattttttgggtcgattcttaggggtgtatttttccaaaattttttgggtcgattcttaggggtgtatttttccaaaattttttgggtcgattcttaggggtgtatttttccaaaattttttgggtcgattcttaggggtgtatttttccaaaattttttgggtcgattcttaggggtgtatttttccaaaattttttgggtcgattcttaggggtgtatttttccaaaattttttggatcgatttttaggggtgtatttttcttttttattgcattcttgttaataaatttcctaaaaatcgcgaaataagggcgagaataggggcgaaacgccaaaatagggacaaaaacttattttaggggcgaacactcaaaatag

SEQ ID NO: 4665 - DNA, 4582 bp, Heterodera glycines
  unsure (1)..(4582): unsure at all n locations
ttcataacatattttaaatttcatccacaactaaacccaggggccncaatggccctgtgaaagcgccggggccgctacaaagcatgggattttttttttgagctcttttctcaagttaattaactaactatttggtacaaatggatgaaaatattaatgccgacaaaaaaatgccggagaaaatttgaaatttttattgaaattttgagtacaaatttttgatttgaatatttttatggaaatggatccggcggtgccaaaaatgatcggctgctgatggtcgggcttggctgacttttgcgctgcgaaacttatgccaccgaacaaaatcggcacttacgccgcgcgatatttataccggactgcaaaaactggcatttgcgcaactcattaagaaacaaaacaataatctaattaatccaacaccaaaatattaaattagaattgattaattaaatctaatcgtttaggcaattgccaaaaaaggcatgattaagttgaatatgtttttttttttgtttataattattcattaactgttaacattctcttgttttctcgaattcttaacttattcagactttatgctttcgagtgataccaaaaaaataggccaataacaacccgtacaaaagtcgactcatatttttcaaaataaagcctcccaagcaagcctaagcctagaatggcgcggcacaaaattctcatcatacaaaatatgttctgttaatagattttcgccgaaatcctccctcattaaaagtctcgggttagcaatgttcgagagtctcggcgcttcgagtcgttgagagagaaaagtctcggattttttcaaatctcggcaaaacattttgtgccgaccatctgctgctgttttcggcattaaaatgatcaaattcaatgacattttgtagtgccctttatttctatttctgctgcgcagcttttttcgccacttctgatcagtagtgatcacgcatattcaattgcaagcttggcatactgtaaaaaaataatttttgcccaagaaatgaaaatacagaagaataccaaagactgacaatgaaatgagaccggtaaaaaaaaattaataatttcaacaaaaaatttcaaattttctacggcaccatctgttggcactgccgtcttcatcttttataccaaaaaataaaaattgattgaattgactaaatcttcatcatttttttttgttctttgccatctcatatcatatgcgattacaaaggttcttattgcctgatcatttccaagcatttttaatgcatccctctcaaatctcctgccgagccaatggtctcattcggcggcactgatcactcactgatcagaaatggcgagaaaagctgcgcagcagaagcagaagcaacggcaccacaaattggcacaaaacatacattgcaaatcgaatgattgaaagcggccccggcgctttcacagagccccttggggccctggttttttcaaaaaattaaaaaaatgcatatgttgttaatgcaaaaaattttcttggagtaaaaaattctaagaaatttgtaaacattttgaactgttcctttgcaaagtttggtgagcttctgatcaattaattaaatgagttgtggatgatcaaattttggtaattaattaattaattaattttgaacttaactctttctattatttataaaatcgcaccagatttatttacacgttattaaggcactctaatgcacatatattaaaatggctcatgaattttattttagaaaatttttatgaaatttttaattatgcctatttttaggcttaattttacaagttttatcgaacttatccctttctataattcataaaatcgcaccaaaatgtacacgttaataaggcacaaaaaattttcataattctgagtttttcattattttaaatttttacgcagcagaagtagaagcaacggcagcacaaattggcacaaaacatacattgctattgcatcattcatttatgtttacgagggttgcgaaaatccgaaactttcgcgcttaaagactcggcgccgagattctcgaacattgcgaacccgagactttcttggttcaatgacggacattccacagcagcaggacattactttccaccacctgcaccaccacccaattttgctccaaactcagtcagcccgtactcaattgtcccggctcccagttttacgattatttttcaaccacttttttgctgttcacacaatttcatttactaacctaatttacataattatgtttatgttttgttaatcgtcaaatgtccgtccgtccgatccgccgcttttgccgtcacattccatcccatcccaccactttcccagttgatgtgatgagtaatcactgttgatcagcggataatcaaatagtttttttttattttctgctgggggttgggccaattcattgtggttggctctgattggctgctgcttttccagaggcaaagctccgccccttgccaatgttagccgaacaaccgcagaattcattcattcaatcatttgttttcaaatgaaataaattttctaataaaatatttttaataataaaaataaattagggataagaattaagttagttctctgatagagccaagttcctaaggacactaaatgggattagtcggtcattagagggaagttacaatttaattagcacgactccgggtcggtcaagtctgctaattgagctccattagtactggcctgaacacaaaaacattaattagggaggataaaattgtcagcttaaggcaattagccctgtggcttaatgatccttaactggggaaccaagtgcaattagcctaacacctgtgggtaataaaaacgattagttgaatagcgggtgaaaatgagtgtgttgtacgtacgatctcaatgccaaacctcgggccaattagcttacactgatggcaatgactaattaagacattaaattagccccgtggcttaatgcctcttaactggggaacaagtacaattagcttaacacctgagggtaataaaaacgattagcttaattaattagtgtatgctttggacgatatcattgccaagctttttacacttatggctaattgagacttttgttgcctttcagaatgttcggcataatgtgccgtccggttctcttcatggtctgtgcctgtttcgtattgttttttgtgcacatcacccaacctgaactgttcatgcccaaccatgccccaaccgatgaaaacgaaattccaaacatcggaaaagctgaaccggatgcaattggccgctttggacatgagcacccgcgcaactcggacacggaaacggaaaagcccgcgcacggattcgatatcggtcccgaattttcacccgttttggcatttgaataactaattttttggaaaatgaaaatgaaaaggccaaggacaggattaagacgtggaaaaaatcatgaaaaaatagttaatcggcttaatatccttgttcaaggacgtcaaaaagcaaggacaggagaaaagactttggaaaaccctgactaaatagttaatcagcttcatgtccttattcaaggacgccgaaataaatggctaattacagggacgtaatgagtgtgactctttagaagggcataattaattattcaatgaaattacctaatgtaagctgttaacggaattaattggaatccatggaaaattaattgattgattgactaattgattctgatcaattgattgtcatgcactgatttgaaatgtctcattgatatttagttgaccaattgtccatgattggtgcactgttctttggacaagtgctcatcgcgattttggtcaatcccccacccggcaaaactggtgccgaatttttttttttggaaaatccaattatttatttatttttttgagacatccgattcttccgctcgctgatcattgttttggttagcattgttgtttcggtggaagcgccgagctttggagcaggtgtgtacacaaaaattacaccataaataacaatgatgtgtggtgaagtcagataaatgtgccgaaatacacataattagctgttatcgattaagcattaaatttaaattaaaaaataattatttttcgtttattttaaaaatgaaaagagattgctaaaaatggtgaataggcgattaagaattttcaaagaaaaactttatgaaaatatttaaaatttcaaattatgaattaaaattcaaaaaaaaaatcttgaaatttatattttttcttaaatgttttttaactttttttaaaaatatatctgattttttgagagatgtaaatttgatgggtttaagcgtacataccatgaacatagcttttaaattttttaaacataataatttgaaaacatggaaccaagggcgtagccaggggggccgagggggggtttaaacccgctgaacactaagcgctcctcgtacattgttcaagcttttgagaaaatattccgccgggttggctatgtgtcatgaaagatgatgacggaccagggcaaagagttcaccgccgccccagagcaacgcttttt

SEQ ID NO: 4666 - DNA, 1160 bp, Heterodera glycines
aattttttttttgaaatttttgcaaggggcagggggcgaaagggggggaggggatggtggagggatcaaaacaaataaaaaatgtgttcattctcgactgaagaagcatttattacatgccaattattcgtaattagccgccgcccgtaagtgcattttccatggctatccaatcaaatttgttctgtgtaattagccaacccccggagcaagtgaaacaaattgacggttgtaaagcgtctgcaaatcagctttgcaagtgtggctggttcgcatgcgtcaaaaaggagggctctcccgccaccccatgctgcgccgaacacttcgagttttcgtgctgcacggaagcaagattttctggcacttaaacctccgatttactaaaatttaaaaatgagattagtcaacaattatgcaaaaattggcatttttgccttatgtcagtcagtggtcctttgaattttatcaaaaaaataatggatgggtgtgctgagctttgattccttccaatgaatttaataatattaacgaaaataataaatttgaaaaagaaaaacggatggcccagtaaaaggacaaggttaacccctcgggggccgcccgtctattaaattaaattggccaatttttattgccctttttaaggtgaaacctccaccgccggtatgcacacacatttatttgttggttttggaaagcaacgaatttgatgaacgaaagactcaacttttagacaattcattaaataatattttgctaattggtcccccgtttaaaaattaagcctcaaatcgaacatgaattggaatgcaaagcagcgcgggagacttgcaaatgcgggtgggccgaatgcattccgaaagcgggcgaaccatcgactccatgctgtgcggagcattaccgctttgcgtgctgcgagaaggcaagcaacccgtacttcttgattatttttggcttaaccaggcttttgtactacggccccggcggggagggggggggggcgccctgggccacaaattctcacaaaagagcaaaaaaatcaatttaaatttcttaaaataatttgaatggctaacttgtgtaaaaaaaaatagttcgcaccacgcccctcacgctctccggagcccgcacgaacccaaatattccggcagtggccgggc

SEQ ID NO: 4667 - DNA, 907 bp, Heterodera glycines
tcagttagccaagcgcgcaggccagggggtggctctatcattaaaataaaaaataccatcatgtagaggacagttgtggggagtgccctcacagcgagcactttttgattcgagttttagaaaaaaagttacgggccctaaactgcaagaaaaagtgacaaatcacttcccgggactcagtcgtccgcgctgaatttttctctatagttttcccggattctcctcaaaaagttgtaagacccttccactactttcagggcgctcccggccttcggccgggagaaaatggttttagcaacgaaactccttgtcaatataacatatatagtaactagcgggtgtgtgcttacatgtttcttgggtgcttaaagcgcttcgcgctttccgagcttcgctacctaggaactgtgactaaaagaggcacaaaagtgattaaaagaggtacaaaagtgataaggggatgggaccatccccttaagagtgtttaaggggatgtgatccatccccataagagtgtttaaggggatgggagccatccccataagagtgtttaagtggatgggaccatccccataagagtgtttaaggggatgggaccatccccataagagtgtttaaggggatgggagccatccccataagagtgtttacggggatgggagccatccctataagagtgtttaagggaatgggaccatccccataagagtgtttaaggggatgggagccatccccataagagtgtttaaaggggatgggggccatccccataagagtgtttaaggggatgggaccatccccataagagtgtttaagggggatgggaccatccccataagagtgtttaaggggatgggaccatccccataagagtgtttaagggggatgggagccatccccataagag

SEQ ID NO: 4668 - DNA, 3368 bp, Heterodera glycines
accatccccataagagtgtctaaggggatgggatccgtccccataagagtgtttaaggggatgggaccatccccataacagtgtttaaggggatgtgatccatccccataagagtgtttaaggggatgggatccatccccataagagtgtttaaggggatgtgatccatccccataagagtgtttaaggggatgtgatccatccccataagagtctttagggggatggaatctatccacctaagtatgtttaaggggatgggatcgttagggtctttgcgtcagccgacatgcacttggtttcaccttgacacattgcattttcaatgcaatggaaaccggaagtgccctaactcgcacgtcatggcccacctgcctccctcagtccagctggcagcacttttttgaatatgtgtccgttttaagtgcagatgagaacgggatgacatcttaaagtgcgcactcgctggacttaactcgtttgctttattgcaaattgagcattttcgttgcaacaatattcagcactttgactctgtcttgtgcatcggtctcccttctgggagcgtacactcggacgttgttccagtccgttgcccttgaaaaggcagtgtacaattgaccatgagaaaacacgtccctttcaaggtcaattccgaccgtgctgattgtttgaccttgacctttgagaatggtcatggcgaaggcaggtttgatgggaaactgcaaacgctcatattttaagccgccaggcgttttgtcctcgtagacattgcgtgttctttcgatgaagaacttaacttggccaccaacagcgttgctgttaatgacgcgaccgaccagacgatcgtcgccaagttcttcaagaacgatgcgagtgccgttgatcagtccttccttatcgcttttgttaataaggaggacaacgacgcttccgacctttagtcgcagacggtggggaggcatcccagagtctgtgcgtcggttcaacgctgccacttctaactcgatttcatcgatgtccagtggccgctcgtcaagcggtttgtccgaggacaaatattcgcgcacttgaccaggcacgttcgccatcataatttcgttgatctcatcgcacgtgtcaatgtgaggtgcgaggatcagacgattgagcagttccttgtcatttccaaggagtctttggaagtcgggatagacaaagtctatcaactcttccctgctctttacgaggaactgcggaggaatccagaagtgttctccggtctctccgaggccgatttggcggcacatttgcaagtacgcttgctgcccttggcccaacctctggtttattgtcaatttcatagtcgtgaattgacaaaacagtggagaggtttgaaaacaggccgtaatttgtgcagttaggccttcgtgaggcacaaccggtagtgactgtttaaagtcaccgctgaatatgaccgtttttcctccgaagaggaggtccttgtgctggggaattgccatttctttgcacactcggtcgatgacctctatcaccgtgttgtgaagcatggtgatctcatcaatgatgatgagctgggcctcacgtatccgtcgagcaaagaagctttcaagcggaatgcttggaagcttgtctagcgagacttctctgccgagacggaacgtggaatgggctgttttcccatatggcagcaagatagccgcacacccagtggatgccgtagccagcactttataggtgtatgggggctttcgcaagcgtttgataatttgaccaaacaggaatgtttttcctgtacctccatcgccgaaaatgaagaaacggcgcggcacagtctggtccttcgggtccgactgtattgccctcacaacagcatcaaagaccttttgctggtcgttattgaggggaggtggggtgttttgttgtggcctttgatttggctggccaggcggcatattcagaccatcatcaccaaagaaaaattcttcaactgccaaattggtatttttagcttttgaatttggtggatctggcaggccacagtgcacacagcttaagttaaagtagtgcaaccgccaatcaatgtcggctaaggcttgcagctcgcgtgcttggcgtatagccgcactggtgatgccctgtgggttgtacatttggtctttatacttgtcccacagttctatggcattgctcggctgcccaaagacaaggatgctcacgaagagccatctcatctggtccggccagcgatgcaaggctgcctcgccgagcgttttgtgccaaatttggtcatcttcaagaagcccatgctgtagagcggcctctgtaaaggtgttgtactgctgtccattgaccagtttcaagtggtccggatcaccgggaaagtgacgcatcaacgcataaagtgcaaatctttcccggtccgttggagggacaggtacaacacgaccgattgggggcctcttggcaggcttccttttatacggaagccatcggtcttttgcccatcgaaattgctctgggactttttcaaaaagcatgtccttgagcgatggaacatgctgccattcgttttgccattgcttccaataggcagagcatggcgtctctgggagctcgcctcgctgaatttcctcagctttgctcacctgttggaatgccctgtatacaacgggctgctggtttggcaaatgaatggacaaatgaacaacctggtgcgagagttttgcaaatggcattgaatgcacaactgcaaaagcttccgtagcaccacggaagttcattttggcatattgagccggctcatcgataccgattttgctgccggactcctctttgcactcgacataacaatgtccaggccctttgaaagggtatttgagtgcatatttgatgttcgctttgttaccgtatgcgaataacacgttgtggtgtactcggtaacgcagcaaaatgtatgggttgtacggcacgacttgcgagttgtcgtatattaagccgttcacctcaatttgggcaccaccgtcggttgggctaggccggtaatacaatgcgggcctgtccgggtgtagtatcgtacatttcgagtacggggctgggaagccctttttacaccgcccaaagttggggtcacgtggaccacaccaactatcactgcatctgtgcagttgcatatgcattagttcgcggacttcgcgatgcatttgcgctatgggtgagtcatcgtctttgcacggcaaagatggaatatgagcccatatgtattcctggatgacttctggaactgcgtccaggtcagtctgggctacaatgtgtgcgtgtgggccaccacgcccctggaactccatggactctcctgagccaaggat

SEQ ID NO: 4669 - DNA, 2596 bp, Heterodera glycines
ctgatcgccttggaggcgtcttaggtctgacaaatattgtttcgtcagcctgcgcaattggctcttgcggtgcgcaagactccgacaccaaaccaagcgtgtcaacttggttttcaccagccacttgggcctgggtgagaacagtattaactgcttgtccactcgtctgtggttcgataatcattatgtcatcatgctcatcgattttcattggctcagcggccttggatgtcgactgcacctcatccgcatgtcgatagacaattgggcaaggagttggtaccccttccctcggatgatatggcacattgtctgtgccataaagctcgttaatgtgccacaatatgcgccgcttttcataattgatggacaaatctggcagaacaaacgtgcgattgttcatgagccatgattcagcatacaggcacacgaagtacccgcaactatttccatcgtgttgaaccgtcagatttacggcattaaaaatcccggttaaaactgttgacggcaaaatgtcagaaataatctttctaattttatccgtcagttgcggatccaacctgccatatggggtaggcaaagaatcggcaaaatgagtgccaaattgcacatcatggataattagagtccagtgtccagggaaatgtactggcaaaagtatgacttctgccggaacattagggtcatacccaaatgtcatttttttatattgcatgacccggtctatgcccatttgccacacaactggatcaacaacgaccacttttcgttgtgatatacttgccaagtatgccaaatactcgacaacaaaggcatcattgagaaactgtgtcagatcattccaacaggtctcaatgaatcttgggccagatcgtgggccttgtgatgtttcgccatcacgctcgtaaaggccaacatcggcccatctccggattttgcaggccatatttcgcgatgtggcgaaattaattgccactgtgctgaaatttatcttttcaggcacatttggcaaaagggccaccgatgtggtagcttcagagctcagatccattgacgagctctcgctcatggaatcattagctttgctcctgcctgagcctgcatggccgcctctttttttggatggtcgccctccacggttcatttgcgtggaaaccggcgtcaaagcaattgcctcaagagcagacatgggtcgatcaaaattgtcgatcttcccttttttattgcgaggcgatgactcatcattttgagtggccgatgtgctttgtatatcagcagatgaagcactgtgttgcgatgccatgaatggctccgctccggttttcggatgtatactccgtcttttacttccaatggaagagaccggggtgcttaattgcaaagcaccaatattgggcgtggtgttgcccgggtgtgatgccaccccattctcatctgcacttccgtctgggacgggtgagcgatctgggctaacagatagctccatctgccctcggtaccgctcttgtttcttcttcctttgatttttttgttttgaaggcatctgaaaacaaaaatgaatcaatgatgtgtacatgcggcaaagtatttagggaaagcaaccgttaaaccacatgaaatcaaatatttatcaaaaaaattgaaaatgtgaaaaaggatgcatattccttgaatgccaccatgatgccgctgcgaatccataagccagggctcgcatgtccaattttcgcacagtgtgttgcgaagaaagaaaccggctcacacatcccgttaagaatgcagatgaaaattaagcattgattggcgaattcaatcagcttattacgaaccacaatcccgaaggggcaggtaatcggaccaaaatcctcaaagggcaggtccacattttggttgactccgatatcctacgttacctctcaccagtccactggtcttggtaaagtgcgggaccagcttcgcaccggattttggccggtaacgataaggaattcattgtaaacctttcggaccacaatcacccaacggggcaggcccacgaaccacaatcctcaaggggcaggtccgcatttattttggttagcgggtaatcctacgttacctctcaccagtccactggtcttggcaaagtgcgggaccagcttcgcaccggatgttggccagtaacgaaaaggaaacctttgtaaacctttcggaccacaatcacccgacggggcaggtccttttccgaaccacaatccccgaggggcaggtcctagctgaaccacatccctagagggcaggtccacttttgcaatagggtcttagcgtcggccgacatgcacttggtttctcttcaataagaagttgacacactgcaatgcattgcagtggaaaccggaagtgccctaagatgcacatcattttagaataatagtttgttcagcgtaaggcaaatttgcaaaacacatctcaaagaagtggtgcaaaccacaacgcccttgaggggcatgtccttggtaagaaccacaatcccacggaggggcaggtccttgaaacgaccacaatcccccggaggggaaggtccttggccggtgaaccacaataccccggaggggca

SEQ ID NO: 4670 - DNA, 1613 bp, Heterodera glycines
gacaggcgaccgtgccaactgtggcaacagactttgcaacagctgacgcccattatgtccagccatcacagagcaaagtccgtccagtataaacggctcgccaggtttgttgtaagtgtccagcatttggggccacatatttgactcgaccgcgagatagctggtctgaagtgatttgacaattgtgaaacagccatacatgctttgtttgatttgaaaaaaatatatgtacggcatagtggtaagcggcaaacgcttgccccgccgcgacgcgtacggaactgtcggagtcggacagacaaatgcgaatggagccgatgaaggaggaggcgtggttctccacgatttccctgaaacgaacgcattaactgacaacgaacgaaatgggaaaatggaaattgtcaaattgcgaattcagtcattgtcagcggtggacatttccgatgatttcgatcagtgcgagtgcaacaccacgccggtcgttgacgccgccttgtctcagcctgtcttccagcaaaggcaaaacaatttccagaattcgctcgcccattttcttgacaagttcggacaaacatcggacggccatctaacaaaaaatgtgaatgaaaagcatttagaataccaaaattggacacacgcacttgctgacgatcgacgactgcacttgacagacagtgaagcatcagctcaaacattggcttcatcatgtcgcgaagagtgcgcggtgtattggcaacaattacctgtttaatggaaaagtgaaataaattgaaaaatggagagaaaatcaacggagtaatggaagaagtgtaatgaatgattcttttggttttaatgcttttaacatattcaacaaaatgagagaatgattgagtaggtttttctgacaattttgccgtttttatataataaaaatgataaagtgaaaacaatgttggctctgaccttccaaacatgggaagcagcttggcgaacagccagaacaacatcgtaccgggcgaggtaaatccccgccataagttcgtcccgggaacgttgtccaatgctccgcacaatggccttgttcacggcctcggagcccatcgtgtcgtcttctcccgtcgtttctgaggtcattttgccactaacccctgaaaaccaaatttacgaattaaatttccattatcaaaagacctgacacaaagaacagaaaatcgccgagcaatttgaccgatgcttgccgaatccgccagttctcgtggatcagcgcggattggagctgtgggatcagcaactttcgagcgtgcgtggaagaggcggtgatcaaacgtttgcccgcaattaacgccgactcgcggacgtattccgtttcatcagccaaagcctggcaaataacagaaagacagttaaatattgtgctgcaatgaatgaatcaccttcagaatggaaggaatgattttggaaaggaatgggatgaaactgaaaaagtattgaaaagttaatttaggagaagttgaaattggactgaccgatctccgaaagccatgggcaaataaatgtacaattggatgtacccatcgcgaatgtgtggctgagtcgtgggtgactcggtaatgcgaataacgccgggcaaa

SEQ ID NO: 4671 - DNA, 2817 bp, Heterodera glycines
ttatgggcatctgaaaagaaaaataaataaggaaaaaacaatcgactggaaagggaccatcagagccaacgaaggagaatcgacgtaatggacgaatttgttgttcacaattgtctgtagacaagaagttgttttgcccggagggtcgacgagtgcttggattaagtgggaactgatggcgagacattcgggattctgaagagaaacgggggaaggaagcaaatgaatgagtgcaaattgaaatatcaaaatgattccacctggatgactttggcaatttgtttgagtgcgcgttcactcgctttttgcactttgttatgcgtatcggtcaaagtttcgcaaagtttcggaacaatggcgggcaaagaggtggacaattggcgaggggcacagtttgacattgcccctaaaacaaaaacaaaaataaataaataaaagtgcaattaaatggtgcatttacccaacagttcagcagaggcacactttgtcctccacgagtcatcgtccaaccctttgagaagcgacggcaacaaaagtttaacaccgtaggcggaaagaaaacgcctaaatgtttgagtaattggtaaaaaagaaggtgcaaagagtgcgtccgtcacatcatcgctcgtgcggcgtcgtcggcggcccttctgacggcttcgttcgtatcattgaacatattcagcaaatttgggagcaaatggatcaaatagggctcaaacaatttgccaagggtgctgaagcgaaatgtcaaatttggcttttccaatgtttggttttacctgcaaaacatttcaatgcaaagcaacgcgccttcgcggtggagggcattttgcttttgggccaaaagttccttcagacgttcactgacattcatttctttgatggtgacaacgcccagccctttgacaattgccgcaattccataggccgcgccgcgtcgttcgccgtactgttcggcgttggtcaacaatagaaacaaattctccatcaacgctttggcatcggcacgcagagacggcattagcgcaggaagacaggcggcaaccgcttcttggacctaaacaacggcttaattggtcaacaattaacaatttattagcaccggctgagaaggggtggacagcgtttcgatgagtcgtgcgacgattttgcgcacttttgagtcatcgccttgcaaaaactgcgccaatttgccgatgagaacgaccaatccctgtcggagattgtcattctgaaaaggtgctttgaatgttgccaatcgttaactgtcccgtcgtcacccgctcgatttcctccgacggcccttttttcttctcagcgacgcccatttgcgacagttcgttttcgagaataggaaaaagttcgtcgacacaatgcgaaccatgcttaaattggaaaaaaatagaaggcaaagacgacggaattgccttttctatcgcaatggttgccgctgtgcgcataatgtcgcgacacttttccgaacggtcagccaatccttcgctgacaatcaaacggacgagtcgcaccacttcggcagaggagcaaacgcaatcggccagggaagccaagcctaactgaggtgaccaataaacatggaagcacaagaaccccctcgacattcagttttaggaaaaaaagatataaaaaccgcgctaactgtctcaaaccgttcgcaattcccgagcgcacttcccacgggtcacgttcggctcgaatcaaacgtccaacgttgtcgaattcggctggttcgaactgtttcgacgaagaaaattaatcgttttaccaaaatgaaaatacttttttgagttcaatgaatcgctttccaattaaatccaacgcatcgacgcatttttgcgggtatttggtaagcaaagttttcactgatttggctgcttcatccctagtcaaatccaactcgtcatgcaaatcggtaacaattttgtcgaataacccaaacgaagtctcgaaattgaattcatcccataaatttttggcgacttttaggcattcctcgcttgggtcatgaattgccaagaaaaggccatgccgaaaattctccttcaaattaacgtcccttttaaattgcactgcaagtaaactgctgatcagtgacaaaagcttaaatagtaaataaaaaagcagaaatttaatggtaaaaccttcaaaatatataagcgtttaatggcatcggcggttttcattttgaaaaggcaatgatgcaaaaactcgaccaagccgtcagaggagaaagactccttagttgttccgttttcatttagtaatttcatgaaatttgaaagtgaataaaagagttcgtcgacgtaatcgaaggaagcgtccacaaaaagacaatcgacgagaaaatgggccaatttgagcataggcatttcagcagtttcagttgcctttgtgaaaaagaaatgaaatggaaagggaggaacgaattatcactttgagaaatgtgggggagacggcagttttaaggaaattgcaaattttaattcgcagctcaacatcgaagtcattcggacagtgcagaaaaatttgctccaggaaagggaccataaatgccaatttcgcagtcgttacggggtattcctcggccaaagcatctttctgaaaagcattttttggccaatcaaataattccacttgcttcgtctgctgatttttcatccgtttcgtcctccaattcatcgtccgataatggcgaatacaaaaagcaggcggacgaaagcgaatgaaatgtttggttcaactgctcactgagtggcacttcgagcctttgttcgggaataaaatgtgcgcccaaaa

SEQ ID NO: 4672 - DNA, 5296 bp, Heterodera glycines
  unsure (1)..(5296): unsure at all n locations
aattaatcttttcaagagcgaagtccattttattcagtgaagtccggtcacagcggtactggtggcacttccaatgtgttggcagttgcggatagtaaccaacaagttagtgctcaacagacaacggcgccagtcgagtcggaagaatagtcaggcccattttgaaaatgattttcccctttttggtttctttcattgcatttttgttctttgaagatacaatatatcattggaattcattaattgtaaattttcaatttggtcttaatattttagcactccattattattgaatatttggaaagttctatataatagtaatacccgattacttttaatatattttttacgcgtcccaacaacattttcatccaaattggtttatttacaaattataaaaatatgaaaagaaatgggttctagtcggttttacgcgtcccatggcattttacgcgtcccatcacatttttgtgtccatgtcagggatggcattccgatgccccaaggaattccgtgccatccctggtctcatggtattatagttgtcctaataactgagaaaaacttttttttgtcaggtattcagtaaagtttttaactaaaaatttcgttgttaaacctaaggttatcatgacaacttatacacaggcaactcgaacaatggcttaaaaagtatacaatcaattcggaaggtataaaatttcgattgacggttcgaaaaaaactgtttttgtgacgcgtaaaaccgactagaaccaagttttttttgttttctaatcatgaaacaagtctcttttgtgatttttcggggtcgttgatcacgaatccggcatccatttcgaacaagggataggtgaccacgatcggagaataacaaaattaacctaatcaataaaattttatcacaagtcaatgataagtttaagacaggacaaataagaactgatcacagcatattatgtataatgacgagcaattatgatcagacaggcacagtaatatgtacaatggcgagcaaatacgatcagaccagggccgggctcatccttgcgtgttgttttttcctcctccgccttctttcgtgttatccttcttcctcctcgctgcctcactctgcgcttgtgccatcgcgttgcgccttcccacttcccagtcgtacgggtgctccggaacacggcttcgggtgaggtgctcacgcagcatcgtctcaatcatctcgtaattgggccggtcttccaactggagtccatcctgcgaaaaatgtaattgttaaaacgcaaaaaaaaaaaccgtaaaaactcacaatatgcgcaagtatctgggtgaattccggcggacaccctccaatgagttctgtgatggcctgttgtcgaatttcgtccggttgcccttccatgcggcgacatttcatccttccgatctgtagatggatttgttaatttaatcatatttccccaagaacccacctccttgacgtcattcgcaaatttccaggggacagcacctttgtagaatttgaccatgacatagaaccacgattcgacgtcatctttgcggctgtagtcacgcttgatatgtgcagagatcggtgcgtaaattggcgtccctcggaaattcgcggaggctcgcggacgtcgctgcgtaccctgtaaaatggggaggttgggcttatttggcaattcatcaagctgtctgcaactcacatcgggccgaagaaattgacgggccatcccgaagtcgataaggtagagaagtcgatgttcgttggtctccgcccgtccaatcgctgtgtttgctggtttgatgtcgcgatgaagaaaaccgacattgtgaagagccttgatggcactcagcaattggattgacatgccgattgcggttcccggactgaagcgatcgcccgcgtctcgaataagtttgtccaacggagtgccaaccacagtcatgctaaaagtggaaaacatgttagaacccgatttgtaatcagagcaaagactcacacaacgtagttgaacaccgtatctccagacgtagcattccgttgttcactacgtccaaggtccaacagacggcagaagtgttgaccatcagcattcttaagttttttgcccagggtgtccaaaacggtggcctaaaacaaaaacaaaaatttttgattaaaacatccattattctacctccataacaagaagcggttgacgtgtgtcgattggctccgttttcagtgctgccactgttcccttgccatctttgcacaaatagacggctccaaatgctccggcgccaagcttctttaggatggtccatcggcctgagacacgcgttcctggtgcaagcgccacaagctcatccgccatgtgtcgctgtcgctctgtggggtaagttggcgctgctgttgaatgaagagaggcgatgttgtaagtgagcgcattgaaaaaactccttcccttttatacactaaatttgaacaaaaaattgtttctgatagaaatgagtgcgtgtagtgagttttcatttatatatttaagaagggcaaccggcatttttttgatcagttttttgaaaaagcgcgaatacatatttaccaaaaattgcaaatttgtaaatgtgaggngttgaaacatagaaaactcgggtcttctaattggagaaatacggtatatattttataaggcccaaaagatgtacacagctcatttatgctttgcttgctttacatacctatacttgttttaaaacttttagcacgaaatttgttaattgtttgataaataattgcacaacgtcaatgcctccattatttcccgaagttgttctcatttaaatttaatagataattttgactgtacatttaatcatttagaaggtagagagcattcgtcacttgtccacaaaatcttgggaggcgacatttacgaaggattatctctccaatgaaggccaactccgttttctttcgcgcatgtgttacctcgcaatggcacattaccttttgtaccgtggagtgctccccaaaggagttttcaaacgccgaaagctcgaaggtttatgttaataattattgcattcaaacgtgaataagctcggcgctacttgcaaagagtactcttgattttatcaaaaagtaaaaacaaaaaggggggacccttttggtttgcaaaattttttaatatatagtcatgaaaattattcactggtgttcttggggtccataacctcgaataggtgtcagattcgtgatcagcgacctctaaaaccccggatatcaaattttcatgttttatcacaaaaaaattttgcaaaacaaaagggtccccccttttgtttttgataaaattcaaaagagggcttctttaaactagcgcaaaaaagtgtatttaaagtaatgatgtaatataaaagaacgaactcacgtagattgtcatctgcgatctcaaaaaaggcattgcgataagagagataaccctggacagcagtttttgacacaaacggagatttgagcagagggacgacgacgtcgaagaagaaagcgatgttgggataagcaagctaaagagaaacaacattaaagattgacggaaatgacagcaattagtgataccttcggctcctttttacacgcaatgaaaagcgatttaattgtctcttcgaatgaatcgtgcaatttcttaagccttgatctaatctcctaaaattgagacattgtcatcaactatcaaaagatcatatttaattttgaacaattttccccaaaatttcgataatttcggcataccctttctattttcaattcctgttcaacagcctttttctgtttttcgctgagaattcccttttctctgttctttttcgcacgttcgttaagtgcctccagggcttcaatctgttctttaaatgttcggtaacttggatctcgtcggacatttttcgtatcataaaattccatatttctgtgaagggatgggttatatatatataaaaacagagaataaaatacctctcaatcacttcctcattgtaaagtttcccgtctggcgtttcaaatattttgatttcatgttcactaatattcagataatcatttacattaattttggccaaattctgaacacatttatcccaaagagatgcagggacagaatttgcttggtttcgtgaagacatttttaaagggttgaaacaaaaccacgggcagctgaaaaaaaagagtaggaaaattctattatgagaaaatgagcactaagacggataaacgctttcaaatcaaacagcaagaaaaaatatggtaatagttcagtttgtcccccccccccttttttcgaattgttttttatgttttcaagtcataaaaacactttttatggggttttcgaagtggctcaaatgatcttttattgaagcaatgttgaatttcagttcgtttccgtgtatttaaacaaagtttgaaccaaaaatgtgaaaatcgaaaatttgaattttcgactttttgttcgaattcgggtccgggattaggaagtggtctaaatgggcgccggattcgtgatcagcgacccgaaaaccccataaagtgtttttatgacttttgaaaacacaaaaaaaatttcgaaaaggggggggggcaaactgaactaattaccccaaatattcgtccgataaccgacagtttcggctctggctggcttttaagcatttgataatttcttaatttttttaatggcattctatcttgcacaaagaacagagtggccaagtgtgcttatttctaagatttgtgcttattttgaggggtcgaatcttagaaagctaaaatgcttatttctgagatttgtgcttatttcagcattacgtgcttattttgtgcttgtttttggatttgaaaaaaatgcactttgaatggctgttttggcttatagtttttattcacggcgattcaattttgggctccaagtacaattaagttggattttttgtcttagtggtctgtgagttagtcatcaaaaagggggtctcacaaaggaggggtcggcaagtgaccgtgaaatttcaaaatgaaacttggtgggtgggtaaatcacccctagtttctattgtgaaattttaaccatttttgccaaatgagcttctatgccgagatatgacgtgctaaagtttttgacattttataattagaaaagatataattatttcctcctcaacaagaagccattggtgtagaggtagtgcgttagtcagatctttttaagtcacatgttcggatccgctacgtgcatatatattttataattttcatttttaa

SEQ ID NO: 4673 - DNA, 4487 bp, Heterodera glycines
aattcggtcatgtaccaaattgttgatcgcgaacctacgtttcaaacaaattgtgctaaattagtgtcggtcggttaaatcggcgatttgctttgaatttggcatttcacttttcccaggaagtactcattgaaccaatcgtcaaagagtctgaagaaggtgcgatttgctggcgtttgttggctctgatcgaagaggaggccgaccttcggcgtctgttgctccgatctctcattttcctgcacaaagataagagtttgccgcctcggctggtccctcgtctgttgagccgctgttccgcaaatcccgagctcacttttccctgttggatgcttttgagtgaactcagcaaatttctcgacgtattccgtggagatagttttttcattgtttgtccattttcatttttcaggtgtctcccaacgaagctgtcagttattggtccgattatctcacgctcactcaccaaaatcgtctgatcggatacatggctgatctgatcgccaaccgagcaaaagttctcagttttcagcagcgccgttttctcagggagagtgttagcggagcattgcagcaattcaagtggactttcctctggtagcgcttctgcacaaatcccgcttttcctgttgaaggatccatcccacttacatttcctctgtgtatcatttgttcgcccgaattgtcaatggaattggccaagacgcatccggaaaagcggaacttaccaagttcaaccagcaatggtttagcaagtgtctggtggagttggacttgttggtctatgccaatgcaccgcccgaggtggacgatgccgaatcggtgaacagtcagggcagcaacagcaccgaactgccgggcagtcaaaggcgagcgagtcaaatgtgacgaacggagtgaaaaatggaatttaagtgacaattgcgagaaaatcattcggctgatcacttccatcggcgagtgccttcagtacacgcccgcactgatcaacaaacaaatagtgaaccttctccaagtgatcatcgcgtcggatgtgctaaatcggatttaccaagcgcacaacgacaatgaacacggcggtgagcacttttaacgcatgttttgttcatttctctcctcgttaagacaaattgggagtcccctccccgcagcgtctcttctctcccaacacttcgttccacacggaactgcccgcggacggccccggcggcactcagtccaacgcggcgagtgaagcaggcggtgtcgctgccagtgaccaaaaccagcgacactttcacatgcgcatcaaaaaacgcattttccgcggagaattgatgagccgagaagttcgcgccagtggggtgctcgccattggcaaactgtgccttttggacgaacagttggccaagaagtgcatccccgtgtttgtgcgacaattgcgagaaaacccggaccattttgtgcgcaacaatatcgtcgttgtcatctgcgacctttgcattcggtgggtattttcccaatttaatactgcataattaacgcattaatcggaatccctctcatcattgtagttacacttccgaagtcgaccggtacagcaccattctcgcctcgtgcctttgggacagttccattctcatacgccgccaaacgttgctgctgctcaccaatctgatcaaagaacagtacctcaaatgggaagggacggttcgtctcgctgtttctttattcggagaattgcattttgattcgatttaggtcatttaccgttttgtgaccactcttttggacccagagcagtgcattgaagaatatgccaatttttgtttggtattttattatttcgttcgttttttatgtttcattttacagacggacattttgttgccccaatttcgtgagcggatgttcttccatcactttttggaatgcatgttcaatttcaacggagttcggcatgtctcttggatccccagcggttgggtgaattcatcggtgcctttctaattcattttgtgccatcattctcagctggctatgaactgagtgaagaggtacaaaagcgttgttccctcgaaggtcgcgaattgttcgactcgcgaatgcgcctttacaaatatatggttttgctccgtgctttatactttacagcaaactgtttcagctgaacactttcgaagaccaacaaaaggtgtacattttggagaagatcggtttggagatatttgtgccgatcgttgagggtcgactgaaactttcggatgtgaaagtgcgcaatttgttatttgatgcttttaaggtgaacagacgcaatttgtctatttgttagccaaagaatcggaattaagattatgggcactgaagagataaagttgaaaatgcaattgggcaaaatggacgcggattacgagggggacgacgacgaaccgcccgaattggttaaggtgaacgagaatttttgaaaaaagaagggggatctgataaagaaagtgacggtttacaccaaggggaatttttgaaaatttaggtttaattgttaagaaagcaaattgaaagaaactttagactgctgctaaaaaattcatcgcgacgacatttcgcaaaagcattgcggagacggtgatgccccacttattcctgctgaagtcctttctatgcgagaagcgaagtccgttggccaaaaattgttattcggtcattttgtgagtgaagtgaagcgcaatttacaaaactttaacaaattggacagggatttctgtcgggagcacgaggagcagttggacgcctttttggctgctgacccacagctgagagcggagatcaaatgcgacatgagaaggggcgtaagacggaagaacggatgaaaagaggaggaggaggggaagaaacggacggaagagggaaaaagacggaggaagcaattccaacggagaggggagaagagagacccgccttaggaaacgaatggcattgtgttgcatctgatttccttttttctttttgcaatgggtgatttttgtttcttacgcttttggatatccgcaaaatttaaaaaacaaattaatgggatacgaaggcgttaatttgtttgtgtttctgtataaattatgaattaaatgcacttgaaaatattgagcattgtgctgtttttctaccggtattccgctttgaaattcttggccatcactccgtgttggttgttggccacacatgcgtaaatgcccttaattcaattgttccgttttttcgcccttgtggtcagttaatgtgccgaaatgaaatgtcactcggtgaaggtgcatccattcccagccaaattggtcattattggctaattacccctccctccccatccttgcctggtctcccattgtggccggatcgatctccaatttgctctaaacaaaacttgcaaatcagtcctaatctggcgaatgtatggacaaacccaaatttcatcctttcccagcggcttttcgtagtaatgggcgtttcgcttcggttgcatttccattccctctttaaaccatttgattttgggccgagggtccccgcgagctttgcaaatcaatctgaaaaatgggggaattaattcacagaaatcggaagggcggaaggacctcagtttgaaaccgagtcggaacacttggctgaagtgggagccggtgacaatgtgggcactctgccaacaaaagcatttgcttaattagaccatcgacggcacttcccaagggacgggcgaaaattcaacaaaacaatcggcggagcacagaagcgaaaccacgggtttcgagacggaatgccattggactacggtagtgaaaattcgattcgaattcattccgaggaaaagttaaatgtaatgttaaaatcagcatattatcctaatctttgattaaacaaatctctttacgattgacttccccctcattagggcagcgttttgtacagactttcattctgcccattggcactctcaaaatggcatttccaatggcaatctgtccttctgtcttcccctcttttcattttcttttgctttgtgtgtctttctctcctccctttcgctatttctcggtctctgcttctctcctcctgcactttttctgttctcttcgctctcttcctttcactcttagccaagagaaggaaaagaacgacgaacaaaaggaggggaaggggaagagaagagcaatgcggggagagagttgaattggggaagtcgcccccggcgcggggagtcgtccttttcagccccccgccttttctcccttttctctgtccgtccgtcgctcatttccttccttaacattttctgctgcttttcccccattagccctccaattacaaattaattccttctcaaagttcatagaattcgtccaaaactcaagaggattttccccacaaaattcacgccaaaagaaaggctcacgcgattgtccgtcaaagtctgttggatgagcgaaaactcggccacctgcgcgaactgcagcccgcttttg

SEQ ID NO: 4674 - DNA, 1297 bp, Heterodera glycines
cgtccgtccgttgttccgaatgctcgcggtcctccacctttctcgccccgtcccctcgggcgccctgcgtccattgaaagcactgcgatggctaagcgccgcgtcgcacttcgacttcgtcggcgatactttcgcttcgttccgttacctcgccttccgccgtttcaatgtccaaagtgcgctttgctcacccgacggccccaaacgatgctcaaccacatttgtgccaagaaacccgcagaattcaaaaacggtgggccgaaccgtacccaaaagataattataattagaattgtggtagtgacttttgcagtcaatcaaactgtcgaattgagctttcgcttgcgggtcagagacgccatgtcagtgatggaacggattccgaaccctcaagcgatgcaatttcgaacatgcagtgaacctttgcgtgattccgatcacttttcgcttcagcaaccgttgaagttgaggtaaggttcatttttcataatgtttttctttattttttaattccaagtgacgttgtgctaaagcatctgcagaaattgaacgttgtgcaaattgtacaaacacaaaaagtgcctttctgtcaatttgtgccgtgccattcgctttcgagaacgacggagaaagaacaaagcacaacaacaaatcaaagggatgcgtttgcctcaacttcaactggctttttctgctccatttgcgcgcgtctgttctcccgatacgccgattgggacgcgcatttaccggacgaagagggcactgccggcagttgcccctccgacggaagacacccaatgccaattgaggcaaacactgctttgactgggggtggggggggggtaacaaaagcgaacggccgaccgcttttgatcttctgagtgcttttcttttcagtgtccttcgggtgaaatgattccgcgcgacggattgccaattaattgcgcgtcgtcgtctcttttggcagatgaaagcgacaaaagcattggtcagcagcaaagcagttggcgttgttctgcctgtgccctgcagcaatttgccacccgtgccgaattccatgcccatcttttaaaatgcgcattggcaaacaccatcttttgactgatgtctttcgaaggaaagagaatgcctcaaatttttgtttctttttttcaatactttccatttgattaatatttatacaaaatgtttttaagttttgtcaacgaatgacaagaataaattcattaaacatttaatttattaaaaaataaactgctgctggacagatcaaatgccacatgaaatttccatatcg

SEQ ID NO: 4675 - DNA, 1116 bp, Heterodera glycines
  unsure (1)..(1116): unsure at all n locations
gtatttgctctttttatcccccatgggggttaatttttcaacctcagaggctgggggataattggagactggtggattaagatagagggattatttttcaaacgcctcgtagactggaggataattggagattgggggattaatggatatgggggataaaaagagcaaatacggtatctgcatttatttattttttcaattttattttggtttgttttgttttggctgtccatccattggtttccctttctcctttaggagcgtgccctcttctttgagttggaagcggtccttcagtttgcccagcgttccgccgattgtttggccatttacggcgctggtgctagtgccgaagttcgtgcagcactgcaaaattgtgatgatgctgacatacaaaatgcttctttcgccatcgtccgtcaattcgtccgtcgcattcgcaaatattttgaaacggcgcaacgaattgaaaaggtccgttttttcctattgaaacggacaaaacaaactcaattgataggttcgttttctaatttaggtggtccctgagctgttgtgggagctctgttccggccctttgcctcccgttgagcagctcgactcggcccaggccctctgcaaacaactcgcccgactcatcgatttcgtctttcattttgacacaatgaaaatgaacacacccgcgatgcagaacgacttcagttttttcaggtgctctcgctcttccaattgctcttttttgactccttttccttaaggcgagtgatttcgcggagcgaagcggcggcgcgcgaagcggagaccgactgttccctcgagttggccaacaccatttcgctgttcctcgcctcgcccactccgatgctaaacgcactgacaaacgcaacagccggtgaggagaaaagaaaatgggagaagcggcctttaatgtctgcgtaattgcattgtgttttgtttaaggttttgtccgagaccatcccgatttgccggtgtctaacacaacagaaactcttaccgccattgtttacgtatgtcaattttaacaaaagatagccaaaccttacaattaaatcggtccgacccctccccacgancgctacctttgttttttttgtg

SEQ ID NO: 4676 - DNA, 2499 bp, Heterodera glycines
tagtatttttcaaaatcactccaattaaacacaatattaaagggacttttttatataaaaacaaaacaaaaaattaacaaaattaagatcaaatttgaacccgaattggacaagatgtgattaagtattatttgtctagttataatcacaactctttcaaatggacatgccaggatgcctattcttcacatgggatttcaaatggtccgaacgagcaaatcgcatttcactggaacaataggcgcattggaagggtcgataaccggtgtgtcttcggtaatgcctgaaaatgacaattttacttgtgacagatacattttaagacgagaaaaattttaaaaataatgattctccgtcctttataaactaaggcattttgagcattattctgaatttgccaatggttttcttgaggcgcaatgaccttgtaagttcatcgctgcgtgcaaagcaccacccgcagtctttccagtcgcatctgaacggcttttcgccgctgtgggttcgcaagtgcgctttgagatgggacgacttgctgtacgcctttccgcatcccggatgggcacatcggtgctgatgccgtgccagcaaatggggcagtgtcttgcgcggcttatgccgctcattcgcttcattttggacttgcacttcactccgtcttctttcctcaatcagtgtccattttaggctgctttccttttgctgctccatgttttcaaattggtcttcgcttggctctctccattcttccctttcttcgttcttgctgttttttgccattccctttgttccctcatcaaattccattttgacagcactttcgttgttttttaatgcgtcatcctcatttgatgccaaattgcgcctttttcttggggtgggtggtgagccgagtcgaattggtggcgggggcactgcgagggagtgattggagagggaaagggaggaggcgggagacgggcattccaatggcgaatggtcggcgagttgctgtttatagcttaagaggcagttttcaattttggcatgacgtttttggctcagccacacctttccgagatggaccattcccattgatggaattggctgtttttggtttgcgccgattgtgctgccatttcgagcgttttgctgctgttcatcatgagcatttgttggacgagcggcgattggagcaattgttgctgctggtgagcagtgttcagtgcttcgatcagcaatggcgaatggagcagaagcggcggaagaagcggaggagagagagtggcggacgatgaaaaaggggcagacgaaacgggcgggggaccatcggccgaatttgagcaaaggtaagcggcggaggaacagtgggaggacggtgacgcaatggcatggatggaattggacaacgacgaaatggcacaaggcatttcgttttgaagggaaggcacaaagggcgacgacgttcggcaactgacagctgcacaactgctaattgactacaaaattgccttcctttccaacctgtcgcgttcatttgctgttgctgaagcagcaacagctgctgatggtacgactgacaatgactgttgtgttgctgctgctggtggtggtgaattagcatcggtgtctccaaaggttggactgagcctgcggcactgagaagcgagcggtcgaagggcgaaagagttgaggcgactccgcccagcacaaattcgagcagatcttgtcggatctgaaaactgcattcttaggcagcacataaattgccattcgttcgattggaggaggcggcggcattttgaagatttggggagggaagaggggttactcattctcactgatcactcaacgatcaattgcttccattcccttttacaagccaataattaatcatataatacgttttggttaaaaatacaagttgacaataatttttatttataacacaaaaaagcacctaccctagagcaaaatcataattgaagtttaaaaaggaagacattttttcctttggaatgcaatgggtccaatggtctccccccccccccctttactcctctctctttctctatcggaaacagaaaagatgatgtttagtaaatcttttcaattaaaaagtgactgtagctaaagagccaaagggactgaaattacccagatgaacaaatcctctaaatgtatgggagggagggacatttgccattgcgcttataaatcagttaagtgcttctttctttggttccgccggtgggaatcggccgccgtttcatccttttatgagtgttttctttataaaaatgccaatgttcctccatttgtcttattattatatacttcgttgtttgctatgctcgccgccgttggattttgtgataaagcgatttttggctgggcattattcaaaaagatcggctcattgctgacgatcgccggcggtaggggagagggagaaacggtggaaaacattgacagggccaattcttaagaggggcagaaacgaactttaaaaatgaactg

SEQ ID NO: 4677 - DNA, 1160 bp, Heterodera glycines
tcctcggcggttgctgctgctgtttttgctgttgctgtactatgcacggcgcattcactaaacataaaaaaagatttaccaagattagtccgggacaaatttcacattcattttccccggcaatggctagggatttcattttttcaatttttcctttaaaaatttccgtttttccaaaaaaattttgttttgaaatttacagaaagaaatttcgaagggaggggcgagctgttcctgcaactcgagctagcttttcctttggcttgtcgtacttcctcaacctcgcttactcacaatcaaaatttcaaattgccatttcgtgaaaaatttttttttttaaatccggcatttccgggcccttcaatttcccctattttatttttttcagtattatatgaattgcttgcatttttccaccttggattcgcagttggcgtattttgcgccgccgtttcatctcccggtccggcacctcaaaactgtcgtcctcctccaacccctcggcaccggcacaatcggccaacaagccgctggtccggatgaacatgaacaccttggcgtgaggtgtcactggtcagtagcgaaagtaaaagtcttggcgctttgttttatttagaaaaaatttttaaaaaaaaatttccatggccggcgccttttggcactgccaaagccttccccaatttaaaaacatttgaaaatcttggcataatacaaagtcaccatccgtgtcacattagctgctaccttttccattttgcccggcactttgcacccctcgaagtgagcaaccgccgttttgctgagtgccaccgccgaaaaaaccaatcgcctctctctgttttaattgggagaaaatgaagttacaaaaaaaaaaacagtttttttaacccacgcccaatttcccaattttcacggttttttgaaaagcctaaccatccccgttttaccggtccaattcgacaccaaaatttgaaaaaccatttttgcacactttgcgttcaacgcgtcgcacaccgtcgcgccgccgcagcgacattttgcgctggccaagtcagtaccgcctcctctgccaccaccattttcggcaccgtcctcctctctcccatttttgtgcctgtaatcattgtcatcatcaatcggcttcgttggccaacgctttt

SEQ ID NO: 4678 - DNA, 2610 bp, Heterodera glycines
  unsure (1)..(2610): unsure at all n locations
taggncggggaattatatggaaatccatattttttttcctggactgtgggggacttgaaatgcaagaaaaacatgtttttagcttggtttgaagcttctaggatggagttccatatccatatttttccatatttcgcgatttatgtccatatttccatattttggcattttaatacatattttatgtccatattttggaatgtttccaaaaaacctctattagaacggcccccagcagctaaattggcctttttgagcccaaaaaccggaaaattttccaaaaaaatcattttttcgccaaattttctcgggaatattgaataaatttaaattttcttaaaaattaataagtttatgtcaaaaataagcaaaaaagataaaatttcacttttctggttgatttttcgctaaaaatgagtaaatttcagctttatcgtgtttttttcttctaaaatcatttttaataccatattttgcgatttttggtccatattttatggccatattttgcgattctatatccatataattcaccgccctagtcataaacattttaaaaagggtgggaaaataaagagatttgtatttgggggtcaaaggtcaaaacagacaaacaaataacaaaaacaaacaaaaaacgaacagaggcaaagtgacggccagcaacgcctcccagcggaggttaatgagagaaaaatgggaaaagtcgggggacggagacgcaacgccgccccatccattctccaccaacaattttcccaaccaaaaaacaacattcgtttatttgttcactttttgtcatccatcaccctattttcttttgttttttaaattatttttgatgctgaaattttcgcgaggacggaaaatcagggaaagaaaaaatagggaaaattcgattttctcttggttttcacaacatattttgaatgaaataaataaataaatattgctggcaatctcattaatctttttcagggacgacaatattataacaaattggtgataaacaaaaatatataatcgcgataatgaaaaggatgacaacaaatcggcagaagagacagagacagaagtggtgaaataacaacaacaacaacaacaattttctaattttttttttaattacacatgatattattccatggctgaattgatcctcaatgaatgaatgaatgaacggattgcccccccccctcccgatcaatacacagtgatcagtgtgagagtggggatgatcagaattgtgtgtgcgcgtgtctgtgtccgctccgcttctcatctcttctcgctgccgcctgcgcctgtaacttttgctgtcccgcttccgcctcctccgccggcacccttcagtttggcaatgaatgcctccatttcggccaacttctgtctgtttctctgtgcctcctcctcgctcattgtctctcgtcttttcactctccctgctccgccctctgtttgacatccgttctgcgactttctgccgttttcgccggcggcactgtgccgtcgattggtgccgttttcgctctgccttcgcttccgccgatcactgttgttgagcggaccgctgttatgtccatcattattgccattgtcgtcatcatggtccgtgtgttcgtcgtcgctcagctcgacgagttcaatgtccgtgccgccgatgttgtcatcatttttgtccaaccgtgcgatgccgtccagcgcgccctggtggtcggggcacagtgccaacagttggccaaacttggcacgagcgtccgccaatttcccatcacgttcaagcctaaaatgcaaaattaataaaaaaaaggcgtaatggaaaaaaatactacttttacaccagatttaagcaaaaaacggttcgtttttcattgaaaaaaccggaacaggacaagatttcgcggacaacatttttttagggaaaatttcggcgaaaatttggaggtgcagcaaaaaaaaaaaattttttttcatattgtcggaggtgtggaatcaatcagaaagattaaactatgcaataaaattaaggagaaaacgtactaaaagttgagtttcaattttcattacgttataactcaagtcataaactgctgatttcaatcaaaacgctaaactatcatgaaatgcggtcataatcgccacccaagaagaaatatcttaacaagactttatggtcaacgacaacagagcaccatcatcaacaatacgaaattgacgcatgaaaacatcaaaatcaacggtcacttctttttcgtgatgcgcgatttctttgctcatccgttcttctttttcttcggtgcgaccaccttcttccctccactgtctttggttttgccaccttcctttgctccaccaacttgtgccgacgaagtgcttgctccaccaacttgtgccgacgaagtgctgggacgacggaaacaacctgcgagatcattgtagttcaaagagcggagacgtaagtctaaaggaaaaagtaagaaaaaggtgtattcggcagagttcgtggatttgagtgaccgaagcaaatattgggtatagtttggtttgtccactccccccccccttttttaatggaaaattttcaaaaaatcgtgtaaacaagtttttatg

SEQ ID NO: 4679 - DNA, 2371 bp, Heterodera glycines
gggttgtcgcgcacgatttggatgtgctcgctgtgttcaaatgtggtccgatcgaagtccctgaacggcgaggggtgaaataattgcgttgaaattttaattttttgcctatttttttaataatttttcgattcgaatttggaagaaagttattttatattataaaaaaatcatagccaaaaatggcttcaaaaagtcattaaatacgtagaaaaacaagtatttttgaaagtgtcactaaaattgggaaaatctctcctccatgaaaaatatataaaattgaatattcataaaatcagaaaaacaacagtttggaacggctaaatggttgtcatatttttaaatgtactacaggaatggcacatttagtgttaataatcgaaatgcaaaaacctgcaatacgccgggatgccttgctgtgtaaggattgcctcaatttgtaaaaaggggaaatgaatcgtctcgtcacaatgaatgtcaaaaaaatgcaccaagaagcaccgtggtattgtcagtagaagaaaatggccgaggggtgacgggggttggcaatttaaagggttatgaaagagaaatcccatttttcatttaaaacacgtcatttgttcgaattcctcgcccctcaatcaagaaaatggtactgaatcggccacgttaacgctttttcgttgtagctaccgttttgaattgcatgaatcggaaagttgggcccaaatgtccgtccccgtccacccacgtacctcgttctcgtcaatttccaactccaactcttcgctggcgggcgcaatggacacgacggtggctcaaacgggtgggggaaacgaaattttggggcccaaccgcaccggcgcacagaaaggagagaggaaagagaccaccaaacacttactgcttatgtagtcgctgatgttgtaaaagcgcttggtccggtcaaatgggacggggacctaaagaaatttgtgaaaaacaaaatcaaaaatggaattaaaaagggaatcatttgccgcccattttccgttaaaaatattcgaaattcgggcattttgttttgtttgaaaagctaatgttcgcaattttttggtctggtttaccagttcgctcgtgtatttgttatattttttgaccaaaagccaaaaaatgagctattttaaaatggattgcttctcttccttcaaaattacttcggctttcgattagaaaaaaaagtttctttcaattattttctcgacacaaaaaccaaatatagcgaaaaacaaccaatcaaatgggttgtcagatttgcaattatcttcgtagttagaacaaatgtgcaggaattccccaaaaattcgcagaaatgcgaaaaaaagagagagaaaaacgcgcccaccaatcggcccttcataaaggtgagtaaagtgcgtcgaaagcggctcaacatgcacaccaactccacgtggagcacggcaacacccggacgcacgacccgtgccaaaattcggtccaacgggcgaaggtcggcaaataatttgcgacattgcaccgcgggcggaagcgcgacggatgccaacaaatcgaacgggggcaacacgtcgttgtcgctgtttgaggtggagaaaaaatcggcagtggcatccagatggggcggtggcaatgtcgcggaatacgactgcggcaactcgctctaaatttgttttgctccgttaacaaacaaatgcaaaatttgcattttgcagtgattttttgcgaaaattccaaggatttccccgtgtccatttccgtcccatttctgctgacctccgtcactgccgctgcttttgcgttgggttccgtgccaagcacatgcgactgaccgacgatagcgaacagtcgcaagtcgtaatcgccattatttccgtctttgtgcaccattgacgaacgtctcccactgccggaatacatttttaggctgtcgatgtaaacaaaaagcttttgagattttgctgattctaaatggccttaaaatgacctaaaaagtgttctagaattttttaaagattcaaaaatgctttttgacttttttataccttttggaaccgggtgaactatagtgaacgccccgtgaaaaaatgggtcaaatgatataccaatcgattcgtctcgaggagataagcatggaaaaatatgtcccgagttgcggaaatgccagaaaaccggtttttgaatcggttcaaaaatcggtttatacatacttgtcggtttctatatggcgcggttcaacttcatataattgtttttagacttagctcgtcaagagctttcgaatggtaccaaatttatggggatacgatcgtttaaaaaagttatagtgcgaaatctctcaatttttcgagttttgaatcggttcaaaagc

SEQ ID NO: 4680 - DNA, 5422 bp, Heterodera glycines
  unsure (1)..(5422): unsure at all n locations
tcacgcatggtactgaaaggggaaacagcagatgagagataggnaagatttaaagaaatttttaaatgcccgaattaatctaaaaatggacttacttttaattntaattttaataaaaaaaatgtaaaaaaataatttaaacattttcaagaaaaatgagaaaaagccaactcgctgaggtcaattggaggaaaatctggtgagaagacgcgacgatacattggctcaatcatttgttggacaaattgctgagaaataattaaaaaattttcgcataatttctttaatcagagttactattatttaattaatttttttttctcccaaatccataataaaaaatattattatgtttttcatttaaaattttgaaattttactcgaaaaattccaatttttggatgatttcgtaacagtagaagcacaagctgtgcatggttattgaatacgaggaatggcaaataactgtgctcgttcggcaagtactcggccatgcgcaacaccaatgagaaggacagaccaccggcacgcgcaattgtgaaagtgtcctccaaaagtcttgcacgggtggccatcgaaaatgaaaaagcagtccaatggcacaattaatgcacaaatggtctaataaataaatcacttcaatttgcgtgtgattgttcaaaagggtgcagatcagttcccgataagtaccgttgtcgtattggatacggtaataaccgtgcgcattcgcgtcgattagaacgccacggggaacattcactacaaatcattgctgttaagctatttgaagtttttactttggggttcaaatggaatttatcaaactgaatgactaatcactttaaccgacctgagccattctcgagaagccacattgtccgtttgtgctcctttgtgtccaagaaaagtggcactttccaccgggaaggattcggcattgagggctccaagtagaagaactgctcctgatcagcgaccagcaaactgctattcctcgtcgacttcaagctgatcagtggaaacccgttttgataggtccacgagtccataaactgagcagaaaattagggaaaagtgatcggagattcaaaatgaaaggccaatcgaacaaaggcacaatgaaaacagagggatctcaactgacaaaactccactaattagtaattacctctcccagtgaaaaattgacaatggataaagcggcttgatcactgcgattattgctctcaattgtcgtgctaataattgggaaattaaatttggcaacaaattccgattttgggacctcaatgctcggagaaggtcggcggaacgcgcatttctgtaggcgaacaagcggagaaatgaacgaagtccgcgcttgaacatctgctcgcccacctgtgccgttgtgaatgattgattggcttacggcacttttacgcattttgatttgtttacccaattgattaatgtaatccctaattaatctataaccctttagccgttaaaatgttcaccgtcttttccaccattcgcagaaccgcggccgccttcagataagtgatgcggtcaaagcgatgtgcaacttcgcgcacggaagcaattttgtagctgagcgcgtgcgcttggtgcgcaatttggtcaaagcgaaacgctttcactgtgtgttcatagaacaattggctcttcaaaagcgaaacatgccataaattaattataaagcctaatagtgaccaaaactaagcttcttctacagtttaaaaagtgcccagaagtaactttttttattctatgggtttttttgaattcccatggaatcaaaaaaggacatctcttttaaaagcgccgtttaactgttctcgacgttgaattttcggcataatcggccgctttcatgcccataattgtggcaaagccttcgttgagccacaaatcgtcccaccattccatggtcaccaaatcgccaaaccactgacaaaaaatatcatttattattagagactgggttttgttgcatttgctgaaatttttgctaacttggagcgtgctaataagcatgaaaacgcatttctaacttggtttgaggcttctaagttcaattttttcttgctgatttttgcttaaattggtattttcgtgcttaatgatgagcatgtaatttttgtgctgaatttagcattttagtgcttatttttgtgcttaattgaaaaattttctctcaattcatcccccaaaatttttttccttgacaaactttttgatttcaaaatgtcaatttttgctaagaaaatattagaattgtcagtgggaaaagaaaaatggagaattattgttaactgataaaatttttgcctaaaaagcaccaaatttttatgctttttttcgatttttgtgcttattttgccattttcatgcttatttcgtgcttaatttagcattttttgatgctgaaaaatccggtctctattattatataacgctgaaattaattttaaagatattcaaattaggcacttgtttttcatttcccacaagttaaatgtccttttttacatgaaaagcattcaatatccaaaatgaagcatttctaaaaattttaattcgtatttcttttccttatttgatacgtctctcactttttcattttgtgcccttttttcttttctttttttgattgtttctctttaccatatgcgctatttcatgtgccaatacatcggtgacaaattgtctctctctttttgcctgcactccgtccgtatacactaaattctgttggcgtgccataatcagtccccaattttccattgctgccacacgcaaaaatgggacgccaaaaatgtctaaaaggaaaaaaaagaacaaatattaaaagcattgcattttaataccataccaagctttttcaacgggtacggtatgtcaaaatattcctcaaggaattccaatgatcggacagaaacttccaacgcatgttccgtgtgcgcaagcttcgatggttgcacccaaactcgaatcttttaaaccgtttcatttccattcagtcgattgtttttagtgtttggcattatgcccaagccaaatctcactttggcataccgtaacatccttatagttggtttctttgtgcttaaagtcgctgacagtaagtgccaaaagataagtggccattttaggagttcgttcgaacagactcaagctccaacccctggaaatttaaatttagggcgaaaataattcccggggcgacctttccattctccgaaaatgggaaagtggcgcatttgacagtacggtagtgccctcaggatgttggaccgaaatggagaagtccgccttgaagctgggttcgtcgaagcatggcaaaaggcgacgcgcgtccagcggttgcatttgggtggcggccaacaatcttgatcagcatttgtgatcaatctcagcgggataagcaatcaaacccatatcaatcgtaatgcgagtttccaaatttttaggattttgccctttaaattcaaatttcggcccgttaccgtatctctccgtcttcgctggtgtaactgccccagaacagtccgccttcgtgtgcttttccaatttttgctttgtaatcgatttccagcaaatacttccgaccgggcaaaagtgccttaaatgagaaataattattaaaattgcttaaaaaggcatttaaatattgtaattgcaatatttttccgattccgttacagcttttctttttaatcattactaattaattggatataatccgaattgccatcatttcttattcatttgctgctaattgccttgtccaacttcaactccaccaaatcgtttcccccggcaagttctctccactcggacactcttggccccgtcaattgacgcatttcgtccggccaagtgcccattttgacgtgctctaagcttagcgcttttgcgtgtagcatcagcacatcggttggcgctcgacacaaaagcaacagacgcaaattgccgtccaccgacaaatttttggtgccaaaatctaacagagaagggcgaaagggcagatacacctaacattttgagaagcaattaacctcaaacataatgccattgatagaaaattggcgaaaatattctgtaccttaagatggagttcataatgaatgggcacaacatcggtgggcaatcgaaccaaagggtcctccagaaggggccttttgtgatgacaaatgtttttattttgactagaaaatggaattgagacttctaagttcaccaaaactaattctctctcctcattattttcggtaaaaaacactaaaatgtgaagctaagaacagtcaagggttggggaatattcaaacggagctttcatgaatccgaaatcagtgattagctcaaaacatgaacccggtcttgatcagttttaaattgagtgcggtcccgatcagttaatccaaaacggatcaacaaattcagtctgttctcctgggttttaaatttgacccgattgactgtgcccacaacatacttgtcctgctgtccaatcattctttctgatcgatcattcggagaagggagcaacaaataggagagcagcaacacggcgatgggcaacagcggcattagcaaaacgacggcaaagcgaagggagcaacaacagtgccaagggcatgggcagggacaggtacaacccctgcggccgattgggcgcgggtccggcgccgtttctctctctaattgtaagcgatcatttttggaacaatgtgaacagtgacttgacaatacactactttgtcatcacagcccctagtaatattaatgtctatttcaatttactaatttttattagccgtctttttaaaaaactctccctccagcggaatccgttgcggcgggagaataatggcgaaaaacggtaattgcttgtagtaaagtactgtagcacctgtcatcactgatgtcgtggtgcactcttcgctttgacggcgtacaatcatcacggcacattcattgaccgttgaggaggcgatggagcaattgaaagtggccgcgctggcacgcctttccgcagcggagaaagtgccttgaggggatttcaaaaataaaaaacacaatcccatataatcacaaatataattactgtcacttaaactttattgaacaccgcagtcactctcaactaatttgtaagtgatcgcctaagccgaaaatacacaaattaggggccaaatgtttacaccttttttcataaaaaattattttaaaacaaaagttagtgttaatttgtaaaatgttttttaataatctcaaataagcgtcaatttcttagaagaaaatggtcaatgtttcgcaagggtcaaaaagtatgtgccaaaaaatgagtttggcaatgccaactttacccgtatgaggcgaactgagtgaatctgctttttgtgctgtgcatgtc

SEQ ID NO: 4681 - DNA, 3690 bp, Heterodera glycines
  unsure (1)..(3690): unsure at all n locations
gagtccgtgggacggcaanttgaaacatgggggatggtggcaaaaaaatatattattttttttgggaatgagtgccaaaatgaaagtggccgaaaaagcgggggaaagggaaaaaagggaaaggggaggggaaccaatttgcattccaacgtccccgggggagaggaaacattttctgaatgaggtgaagggagggtgtggacccctttatatgaataattcaacggtggaagaagacacatccccgcggcacggcaatgatataattagcatacaatttggacaaaagtgggccgatgggtaaacaaattttgccaatgccaacggctacgagcccattttggtaatagtaaagatggttgcccccttttttggagaaattttttttattttcaaaagtcatgaaaacatgtttccaagggttttcgggatcgctgatcacgaatcgagcatctatttcgcccaattccgaactaatggcccgatttcgaacaaaaagtcaaaaattcaattttttcgatttttaatttttagtctaaaaatgttttaagtgatattttatcgaagcagagatgacttttatttcgtttccgtgtattcaaataaagttttgaacagaactgtgaaaatcgaaaaaattggatttttaatcgaaatcactaagaaatttgctaaaatatgccaatttaaattagaaattcgtttcgaaatcactaagaaatttgctaaaatatgccaatttaaattagaaattcgttaattcgctttaaaataatttttatcaattttatgattttcaaaaattttttgccaaaaagaatgtaaatattaatattaaaaagtgtgtgcaaataattcaaaaattgtgcaacgcaaatcaaaggataggctttttgaatcggagatgatttttagagcatcggagaacaaacaccgatcgcggaacaaagtcggatcatctgcgaaaagcctacaccaaaaagccaattcgttttaattaaactattaaatgttaatgtcacctcaaaagtttggccatttgtttgttggcatttgccgttccgatttcggcgtttgccaaccgatcgatcagtgaaatcacttcaaactttgcgcccgaataattccctgttttttcttcccatttttcatggctttcatttgcacagaaaacgcagcgccatttgtggtgttgtgttttattttgacagttttcaactgctgaagaagaacactgcttttcctcactgttctccaaagagattttttaaaaatgaatccaatttttgaattgtttaggaaatgccatactccgaaaatggtgcaaaaattcggtatgaaaatgccatttcgcccctttccatttgccgccgacgttttcatttgaatttccgcggaatttttactgctgttgctggttttcgcgttgcctgcgttcgtgtcgtattcattgatttcgcccgctttcactaaaaatcttcggtaggcaatcagtgcgccgtgctaataaaaaaaatacagtaatgagcaattaaaatacaataattagcacattactgtacctccttttcggacataaactgttcttcgtcgcttccatttcccgtggctttgcaattttccacgttctttggcatttcccgatgatacaataactcatcgatgacggccgaagtgtacgcgattgcttaaccaaattgtaggattactgtaaccgtaattggatttttaaaattgcattatttttcaatttgttcacttttcctcgatgaaattgattcggcccatcgttcactgctcacaatcggtgggatttgttctcccaaatgaagttggtcaaatgacttttgtctggcacggacaaatgacttcaatttgagtttattcgcctgcgaatacgacggaaaatcactcagagaaacggagcggaaaattctttaaaaatctttaaaatattattataatattttaaaagttgttaaatattgttaccaacctggggaaatttcttggctttttgcaattgttttgcggaaattccgtgcgaattctttgccgatgttccaattgtttgtcattgggtatttggcatttgataaattcattgaaatagcggttgctttggtcaaccaacaatttccctgtgccgtcccatttcgccattttcgtgccattctttaaaatattttcatacggcgaataaccaacggaattttcggcattttcgccgcactgccaaccaaaggcagtgagagtttcagcaactaataaataacaggcaattaaggaatgtttgtttaattgatttctcattattttccactcgcctcgtccgtttccgtttgccgcaatattcgccgcccaaagagcgaatccgcggacacaaagtgaccgctgctggcgcacacaatcgcaaagcaagcggaccaattgagcaattggaaagcgacaaacggcggaagaggaagcggcgagatcaaaggaaaaaagatgggcatggaaatggtcggaattggccaacaaatgggccaaggcgaagagcgaagctgaaacaagaagagcaaaaatgaaagctaattgaaaggaacgaacatttgatttgtttttggcaaatttctttgccaatcaaaaagcttctcaatgttttgatgatgtcatcgacggcgcattcggattggagaagtgattggcccgcttgtgtcctaattaattgcccatacaaatgctcgggactgaaaaggcagggccgacatttgccaccttcgctaaacaattaatttgttgaaaatgataaagaatggatagacaaggatttatggaatagtaaggacaggctagaccggtttttaaaccttttttatttccaaaaaaaaattaggggtacaaaacctgattgggacacttactaattagatgatactctcgcaaaatggccatccattgagcgtttattttggaaggtttcggcgttgttcaaaaacaacgactttctgatgcgttcctccacaatgtgcgcgtaacgcaaattgaactgcttaaatataagaagcaactgaacatcggttcattgctccttcgaaacgcacctttttccatctccgaagcgtttccctggccaattgttcactttcgcaaagtgacaattcgtcccaatcgccgtacaaaaacacccaaaaatgacgaattattaatttactcaattaagtatctctctgtttaatcacctccaaaagcgtgcccaaattgccaagcgtactaaaattggatgtccttagcaaaagtagggccgttttacgcgcctccggcggacatttctataaaaaaatagttaaatgtcctaattaatggataatgggcaaatctcgcatattcactcccgaaaagcggtaaaacagaccgggaaccaatcaagcaacaatttggcggcacagcgaacaattttcagcgaaggattggacagttgccgaaaagccaacgaaagtgcccaatgccaacaggggaaggtgggcaaatggccaagctgttcgagagagatgaacacatccaggaaacgggtggcccatttttggatggactgtaataatacagacaaaataattggccgtattatcattaaaaggattatgaaggcgcaaaaaacccaagaaagagtaaaagatatgcataataataagccatgccaaagagcca

SEQ ID NO: 4682 - DNA, 2113 bp, Heterodera glycines
  unsure (1)..(2113): unsure at all n locations
aaaaaatattcggttagaatacgagaaataatttgaaacgaaacactggttactatctgcatatatctctgcgaaaattccagatnctaaaaaatcagctatcccatcgagagctgctatcaggcgctctcagaaaacagtaaaaacgctcctattcatgcactaggcgctgagatatatgcacttgactttctgcatataattgccattctccgcagcaaacttcgcgttctcaagcgtgaatagttaatttttttgtgctgaactgtgttagggttctccttgcagtgcgctcaactaagtctcttggagttagagcatttttcatggtattttcaagaaaattgtgcaatgtgggcgacccggaacattttagacagtttccaaaccaaacactcatagtaaaaaattatttcgttagaatacgagaaataatttgaaacgaaacactggttactaatttgcatatatctctgcgaaaattccagatccaaaaaaatcagctataccattcgaaagctgctttcaggcgctctcagaaaacagtaaaaacgctcctattcatgcactaggcgctgagatatatgcacttgactttctgcatataattgccattctccgcagcaaacttcgcgttctcaagcgtgaatagttaatttttttgtgctgaactgtgttagggttctccttgcagtgcgctcaactaagtctcttggagttagagcatttttcatggtattttcaagaaaattgtgcaatgtgggcgacccggaacattttagacagtttccaaaccaaacactcatagtaaaaaattatttcgttagaatacgagaaataatttgaaacgaaacactggttactaatttgcatatatctctgcgaaaattccagatccaaaaaaatcagctataccattcgaaagctgctttcaggcgctctcagaaaacagtaaaaacgctcctattcatgcactaggcgctgagatatatgcacttgactttctgcatataattgccattctccgcagcaaacttcgcgttctcaagcgtgaatagttaatttttttgtgctgaactgtgttagggttctccttgcagtgcgctcaactaagtctcttggagttagagcatttttcatggtattttcaagaaaattgtgcaatgtgggcgacccggaacattttagacagtttccaaaccaaacactcatagtaaaaaattatttcgttagaatacgagaaataatttgaaacgaaacactggttactaatttgcatatatctctgcgaaaattccagatccaaaaaaatcagctataccattcgaaagctgctttcaggcgctctcagaaaacagtaaaaacgctcctattcatgcactaggcgctgagatatatgcacttgactttctgcatataattgccattctccgcagcaaacttcgcgttctcaagcgtgaatagttaatttttttgtgctgaactgtgttagggttctccttgcagtgcgctcaactaagtctcttggagttagagcatttttcatggtattttcaagaaaattgtgcaatgtgggcgacccggaacattttagacagtttccaaaccaaacactcatagtaaaaaattatttcgttagaatacgagaaataatttgaaacgaaacactggttactaatttgcatatatctctgcgaaaattccagatccaaaaaaatcagctataccattcgaaagctgctttcaggcgctctcagaaaacagtaaaaacgctcctattcatgcactaggcgctgagatatatgcacttgactttctgcatataattgccattctccgcagcaaacttcgcgttctcaagcgtgaatagttaatttttttgtgctgaactgtgttagggttctccttgcagtgcgctcaactaagtctcttggagttagagcatttttcatggtattttcaagaaaattgtgcaatgtgggcgacccggaacattttagacagtttccaaaccaaacactcatagtaaaaaattatttcgttagaatacgagaaataatttgaaacgaaacactggttactaatttgcatatatctctgcgaaaattccaga

SEQ ID NO: 4683 - DNA, 632 bp, Heterodera glycines
atgattttgcggaataaatttaaattctttaaaaaaaattcttaaaaaaacattcttcaactttttattacaggaatttcatttcttgtttcttttttttatgtattttatttaaaaatttaagttgaaaggaaaatttgagtgtcgaacattggcatttcactcatttttgtacattctgcttagttcaatccattttcttaacatgtctttggcatattagttaaatacgttcgtattggagactaattagcaaataacaaatttgttaattaggtttctctgtctgagactaattagtcaaccaaataaaagtatatttacatttcttttataataattgaagtttctaaatacacaatatagtcatattgagattttataatcaatttaaatcaaatttggtagaaaattttgagtgttcctaaacatatgaccatgactgtacgacaaacgacaaaattttttaattctgattgatgataaacgacaaacggcgtatactaacgacaaatatattgtttgtcgtttgtctctgtcgtttgtcgttcgtaattctgaaaggcccctgacgcattctccgggagccacctgcgaggtaccgggcgcctttccgacactaatctatctaa

SEQ ID NO: 4684 - DNA, 6796 bp, Heterodera glycines
  unsure (1)..(6796): unsure at all n locations
aaaagtgggtttatatccaaaaacaattttgttattttcttttttttttaggtgatcaaacgataaaagaagtatcgcgacgtcgacgcacggattctccgactcgtccaccgttataacgacatcaataacaatcacttcccccaaaatgatcacaattatgcaaatgtcaatgtgaatcccgaaaacgttaacaattttctcactggtgtttcccgaaactatgaaatgcgaccttagtttgtctgaaatttgatattttttgttatactatttatgtgtttttataaaattttaattattttttccgtttgacgcacatccgaccaaactgacaaattattgtagaagatactagccgcaagaaataaaaaagttaagaaatttgtccgaattcgggttcgggattcgaaacatggatgttttgcacaaatccgaccaatttcagtcataaacaggtactcccgcgaaaacgtaccccacgcgaaaacggccacgcgaaaacgtaccccagccacgcgaaaacgtccccacgcgaaaacggccacgcgaaaatggccacgcgaaaagagtcggggtcgttttggcgcccacgttttggcgccgacgttttggcgccaaggtcgttttggcgccgacgttttggcgcccacgttttggcgccagggtcaggtttttaaattttgtctatgtttgaataaatgaaaatatgtattcgtcagttttctgagtcgctaatcacgaatattgtattcattttgacaattgcgaagcccggactcgatttaaatgaaatacaatttttgaacatattagatcaggccttctatctgttttgttttatcaaatgttttaatatggtgggtccaaatctgagaaaatgatttaccagattctgatttagggatagtgactattatttattaaatataccgttaaggttacctatgtttataatcactaactcttttgaaatttcaaccgaaaaaatttaagagtttaaaaatattcaaaatgttttgacattttttgaagcatagcgaagagaaaaatttgaaaaagttcttgctaagtcaatttttcatgttgaccaacaaaatgttcacagcaagttgatcatatcactccttcatgttgatctacactagagatcaacattttgaaaaaaccgtagttctacctgtttcaaaaaatggcctgtacctatttttttctgtacataagtacaggaaaataaatgtacaggaaaaatccaggttgccgaaaaatggcctgtgcctgtacctggatccaggaaaaatacagggctggatccaggtacatgttgatctctaatctacacccataaaacacagtcaaaatcgggaagtttcaaaaaaaaattctagggggttgtgaattttttgaaaatttgaaaaacccattggaaggtaaaagtttttcacttttttttgtaaaatttttgatcaaatttttaccttttttaatttttggcttcgcgccaaaacgtgggcgccaaaacgatcctggcgccaaaacgtcggcgccaaatcgtcggcgccaaaacgtcggcgccaaaacgacccagtcccgttcacaacatcgctattcactttggcattttccttgacatatttcaccatttcgtccggcggtgtgccactacgatgacggacggccacatagcaatcgaattcttggaaaaaattaagaatatgagaaatcattttaaattttgtgacaacgagaaattcgggaagagagtgtatgttcataattaatggggtgcggatttttaggagcgaaaaagcctaaaatagaggcccaatttaaaaaaaatgtcttttttttgtcttcaaaaaacacaccagcaggtccaaaagggtggtggaataatcatgtgtaaaaacgacataggatttgtttttgaattttaaaacatggatggatgataacaattcgactccttccccgtcgatcggcggcaaccctgggctactgtatgtttgcttacgataattaaattttaaaaaaatttcagaatttccatactgtcaaaactggtggtgatgccgcattgcagaaacacaagcagcaaaagcaaaacgtttcctacaaaggcagagcaagacgtgtggtgatgcgtaattattaattcattaattagttaattaatgggctaatttactaaaaaaaaaaaaattcaatttcgttttttaaaattgtaaagttgttgttctaaaaaagagtgatccccactcctatgttccaagtctggcacgtaaccctaaaatccgttaattgacaattaaattttttgcaggaaaaatatccgagagctttaaaaacaaaaaaaaagatttttcgttatataataaacagtgggggaaaagcaaaaacattaacacagcgctcaaaatgatgctttttaattaattcaattttctctcttttttccaaatgccataaaatggtgaatcatcccattcattttttattttgctcggaattttctgttttttttcatagtattaaaaaatgtgatgatttgtccacttttctctgctgattgtgccttaaatcaaatggttagcttttctaatagctttccaagcaaatttctgtggtcggaaatgggcaaaaaaaaaaaaaactcatcagcaattcaataaaaaatgaaaatggaaaatatgtaaaatgatcatgttgaaatttgtaaataaaaataattaaatacgatttagttaaatttttttaatttaattctgggaaaaaataaatttgaatgaattggcagcacactaattgactttcacaactttcacaattgggtgctaaagtagagaccggaaatttcaaacttgcagatccagagctgcgggatagaattcaatttttttgtgggatgtgatcccgcgggattaatcccgtaaaccccattcagatcagtttaagatgagttatggttgataaaattaaaaaattaatgcaaaaatggaatattgaaacaatactttccactttccataaggccaaaaattcgaagtatcctgcaaaatttggtgcgattctgatcacattaatgatttttcaaaaataaaaattaatgcaattagtggaaaactcaaacactgttttccttgaggccaaaaattctatattccactgcaaaattttgaaaacgattctgatcaatttaaatttaaaaacaaaaaataattgatgcaaaaatatgaaaattcaaatatattttcgtttaaagcagaaaattttaagagttccccttcaaattcaggtccgattttttttaatcactttaatttaaaaaataataattaatgcaaaaatgtgaatatttttttgggttatttaattttttttatttaatgaataaatttaaataaaattatttttgcgcataaatatttatcactttttcacatacactgatcaaatacaaattgttttatttgtcatttttttttgctcatttgatcaaattcaaatcacgagatttcttttcttcttctcttccgtatgttcctcttcttcatccttctcatcccttcttcgctttccttgtcatcattgtgccgtctcacttcttttcctcctcggaagaggaggatgaggcaatgataaagcccataaaagagtcaggagtggcacttttttcgtcccattttgccgcctcatcattctcgtcctcctccttggcactgtcctccccctcctcctcctcctcctccgtcatgccacttttctccaccttcttggccccgttgtcgtcctccgtaatggctaggggggtgggaaaattcataggtttttaagtatttttaggcccctaaattgttttttttgcacccctaaaaatcccctccctaggccccaaaattggttttcccctaaaaatccccgccctaggcccctaaaaatccctaccctaggcccctaaattggggttttttctcccctaaaaaatccccgccgtagacccctaattgagtttttctctccactaaaaattcccgcccgaatcatggcaccactatttttatcggttgttgcgtcaccaccatttccgttcgcgtccgttgtggcactgtttccgtcgtccgtcgtgtctccgccggtctcgcccgttttggcacttttcgtgccattctccaccaccgccgtgccaatggtgccgttgatgtccagccccatcacattttgcagctcaatgttcgcctcattgcacatgccattctcgcaaatggcacatttcgatttgcccccctccatggcgcaaagttcttccaattcagggtgagagcagtgaccagtgttgttctctccggaagcagcagccgaagaagcacataagttgaacacaaaaacggggttcccttttgctgtaaaattaaaacaaaaaaattgggtaattaaattaataattgaaaatggataattaaaattaactaataaaatcatatggtagcgggtagaggaatactgtaataaatttatttcatatggaatttaaaaacgctccttaatttccctaattaaaaccatcatcaaaaaatacgaaacattaaatccttaattatcctaatgaaaatcgcaaaaaaaaaattaattttaaaatcttaaatccttaattatcctaactaaaattgccaaaaaatttaatttaaaagtcttacatccttaattaccctaattaaagtcattaattaaagaaaatttcgcaccatcaatgcacgcgtgggtctggcacccatagaatgagcccgaacaatccttggagatccgacggtcgctcacattttgcacatcctcaatctcccaatatttgactttttcatggaattggtcggacacattgccatggtagcgggccgcgtaaaaacagttgtccgctgaaatttttaaaaattttttataagtttttttggcattttgccttaccgcgcgagtcccacaaattagcgaaaaagtctccgacggccgacagattgatgaatgattcagcgctgggcacagcaatgtgcaggatgatgaaggtgatcaacacgagcacaattgttgggtatttgaacattttgttgcaagcggagggttcgaattgttggcgtagtgttttggaattggattttctttaaaaatgaaaaaaaaatttttattttgaaaaacaaaaattaaattaattaggaaaagcaaaaacaatttgcaaatatttcctcccaattaagacgagaaaaacatttagtttttgagcatcgtttttcctaacccaatttgtgatgaaaattactgtattcccgaaaatagagcccaggggctttatttttcaacgcactaagaagagggctttcttttttcagaggggctctaatttggggtggggggctgtattttcggaaatatcaaaatttagttaaaaaaaagttttttcagtttggataagtgataagccacccccattgaaataatccccaaaaaaacccacattttttgtctaagacaatctaacccataatttttggtatatttcgattaaaaaaactaaaaaactttttattcgaaacctaaaccattcaaaaaataacttttaaataaaacattttttgagccataaaaaatgagcgaatgaacgcgtttttatattgacggctgatggtagcggaaaacggaaaaacgctgccgaaggggcgggccgaaacaaaaaaaaacggagaatccgccgccgtcgatgaaccaaaacaacaaaacgtcaaaaagtgaatcatccgtttggccaaccgaacaacaaacagcaaaaacggattgaataatggacacaaaaaaatgttgaaaatagggaaaaaacacggaatgatgatgatgaagcagaagcaaaaacaaatgattcatcaacacaaaccatcgaaaaacgttaacgatgatggacggggacgacgcatcccaacttgggacaaaaagggtgaataataaatgcatttttacacagaatttgattgagcagaaaattgtttcgaaagattttttttaatgttgggatttagccggagggacggcatgaaattagggaacaaaaccgggatatgcaggaaataaatcgcaggaaccgagaccaggacaaaaaaaaagcggggataacctgtgccagtcgaggcgtcgccgattagatccacagggtgattgtgatcaggattagaaaaaacaggcgtgatttattagggacagggaattagggtcgagaccaagatacatactaaaaagtctggaatttactcgtaatagacaagaaaatgtttggaaagctaattcgaacgtaggttgccattttttaattttgagagaattatgggctcccaaattttattaaaaatttatgagcctttttagaagagttactggtagccaaattttgcggaaaattattcgttaattaattacttaaaaattaaaattcaaaattaataattatttgcaacattttttaaattaattactttaaggcatattatatctatattctttttttaaaaattagcacgatatttttttcttttttaaatttttttgatgaaattttgtacgtctctgattaaccgaattttgtttttttttaataaaatttttgaaaaatccaatgatttattanaccaaaaaagtgatcaaaatttttgtttnaagcaaaaaattattgttttcagtcattctttcgctatcacattcattcntgtgcttcagcttcctcatctcccacattnggtgtccactgggtcttcacttcttggac

SEQ ID NO: 4685 - DNA, 2478 bp, Heterodera glycines
acaaataggctgaataataaatcactttaacacagaacatgaatgaacagaaaaattgtttcgaaagcattgattaatgttgggaattagccggagggacgtcatgtaattagggaacaaaaccgggatatgcaggaaataaatcgcaggaaccgagacccaggacaaaaaaaaaagtggggataacctgtgccagtcgaggcgtcgccgattagatccacagggtgattgtgatcaggattagaaaaaacaggcgtgatttattagggacagggaattagggtcgagaccaagatacatactaaaaagtctggaatttactcgtaatagacaagaaaatgtttggaattttattaattttttattcatatttttgttcagtaatttttagaaacattaatacctaataattaccttctaaagaaaattctcagaagcgaaccgaactttacaaaaataattctgaaaaaggcaaccttcatacatttctacgttttcggcattgtgataaaaataaaaggcttatctgtttcaatttaaccctctaaatcagcagagcatccaattttaccagcaggagattagctaattcgaacgtaggttgccattttttaattttgagagaattatgggctcccaaattttattaaaaatttatgagcctttttggaagagttactggtagccaaattttgcggaaaattattcgttaattaattacttaaaaattaaaattcaaaattaataattatttgcaacattttttaaattaattactttaaggcatattatatctatattctttttttaaaaattagcgcgataattttttctttttttaatttttttgatgaaattttgtacgtctctgattaaccgaattttgttttttttaataaaatttttgaaaaatccaatgatttattaaaccaaaaaagtgttcaaaatttttgcttaaagcaaaaaaattattgttttcagtcattctttcgctatcacattcattctgttgcttcagcttcctcatctccaacattggtgttccactgggtcttcacttcttggaccttaagcaaatttaggatgtttttcacaaaatttcaatttaactcttcgccaaaccatattcctcctactcctccacccagccacctcacgaaattcgaaaatttgccacctttttattgtcagtcagcctcgctctcgtcatgtttttttttccgagaaattgaacctcaattctacccttgccatgttttttttaaatttttcaccttagctctcctcgtctttatttttttcgaaaaacttaaccattactctctccccttgccatgttttttttaaatttttcagcttagctctcctcgtctttatttttttcgagaatttttcaccttatttaaaaaaattttcattttcacattagctctccacttgtcaaatttttcgaaaacttttcacattctcttgtcatgttttttcgaaaattttcaccttagcccccctcgtcagtgtgccattgttaattgtctccaaaaattcttcggaatggctttcctcccatgcctgactgtcgtccaacatgttctcgtccgtgctatttttaagcatttgcgcaaaagaaaaaacggttgacgccgaaatatttggtccaattgttgtgccactttggacttaaaattaaattggggaaatttcaaaaaattatatacgaattagcaaataaatttatatatttttttctatttttttatgatgccaaagtaccgaaagcataaaattattagcgaattgaagagaaagaaaataaatctatatcataattaatattattaagattttgaaaaatatttttattaaaaatatgcacttgaattcaaaatttccatttttgtgccattctgaacagaagtgttcagtaaagctggcgatgaaacagcggcatttgttgttgagctctgtggtattaaatttattttcaaataatcacatttaactcaaaattcatgatcaaataagtcattcccgagaaagtctctttggccaaaaaaaaattggtaccaaaatttaaaaaatttggaaaaattgtgcctgtatcaaaatttttttatttttatatttgtggccccaatgttcggcactccctcctccatttcccaaaacgaacgacaattttttggggccatacaagtgcagtagtatatatatgtaaataaataattgtgtgtttctaccataatcatcatgagaagaagggcaaaagtgggtacggtggaagacaacatttttaaatggtaaaattgaaaaatttatcaaattttaaaaaataattaatgtgtggaaaataaaaaataatagcaaaaatgtgtgggttttaagggaaaagtgagcgcgagcggcgattattagtaagcttttgtaagtgtgctgctggtgctgcgcgacagaacaacaaatatgtacgtataatccgca

SEQ ID NO: 4686 - DNA, 5674 bp, Heterodera glycines
  unsure (1)..(5674): unsure at all n locations
tcactccttctacaccccgaccccgancctgtcaaactggaaaaatgccgtcaactggagggctcaatttgatcgcgtcgtcaaggaaattcgctcgatggaaatgcagatggacagtctacgagattcatccaatgcttggatcgaacttctcggtcgtctgatcggagacgacaaagacaacggcgaaaaagaatacgttaaattcgacaagaatgaaaaaatcgccgaccgatacgacgcagcaacaaccaaacttcgggatttgcgagatctcgaagcaacgctcagtgccgcagccaaactgcacagaggcagagccgacagagaagcaaaggcggatcaattggccaatccgcagcaacaagcgcccatgctaccagcgatggcagcaccaatgacagtgccaacattcacagcaccgctctaccaattccagccaattcaactggataaatttttcggccaaaagcgaaaatggcccgaattctacgaatccttcaaatcggcaatcggcagtcaatcaatcagtaaagcgcagaagctgaacttactccgcaatctgctgggtggagaagcgcgagaactcatagcgggcttccggctggaagacgcaaactacgagacggtccttcagctgttaaaggacacgtacggagctccggaggaacacatcagaagtcttcacttcgaactggccaatctcaagccgtgccgaagcctccgtgagaccaaagactttctgcttcaacttgagcggcttacaagggagctgaacaatgccggagaggacatcgaaggtcctcaagtgttcctcatgctggagaagaagctgactccaccattcctacgaagcatcctcacaaagaaaggagaggatccggcaaactggacgacaaccaaattccgagatgtgctaaccgaagcagtccggaaagaagtccaaatccaagaagtgatgggagaatatggccatcactacgtccaaccaaaagcagaagtcgtctcagcagcacctgtacaagcaccgagaacaccaaaccaaaggtcacgaaggcctaaccaaccaatggcactgcgtgatatgacatttatcgcctcatcactggacgagggtcacaaacatcaagggtatgtaagccaacagcacacacaacaagcaaagaaacactgccaacaaatgcgaaaccaagtacaaagcctcaaaaagggtccgccatacccctgtattttctgcaacagcaatcattggcatgacgaatgccaaaacgtcgacacactcaaccaacggatcagcatcgtcagagaaaagaagctgtgcttcaagtgcatgaagccaaaccaccgcgcatcaaattgcgctcgaccatctaagtgctatcactgcaaacgtcggcatcccacggcactctgccgagatcagtacaaagccaagaatggcatcaacacgcctagcacctcttgcagtgaagagaagccaaatgccaacgatggcaagcgatcaacagtgatcgaacaacaacaaatgtgtaatgccatccaaagcaaggaaaccagagcgttgctaatgacgacaaaggcaacgatcttcaatccgtcacggccatccctcagcatgatgggaaccatcttcattgacccgggaagccaccgatcattcatctcgagcagtgcagctgaacaattggatctgaacgtcctcagcacggaagaatgctacttgtccagcttcggtgaacgagaaccgaagcgatacataagcgaccgcgtcgcaatcggcattttatgccccgaccaggacaggttcattttcaacctgaacgctttgaagttcctgctgaatgatttgccggtactacaactaaacgcattggataatgacgaacttcaacaaaagaagctttccctgccgaatgagtcacggcaaccggacattctcctcggaatggacgtttggcaccagctgaatgttcaaccaattgaacaactgccaagtggatttacgatttgccaatcgaaaatcggcaatatcatcagtggaacagggcgaatcgagctcaagcaaccgtccaacatctctttcgtgctaatggtcaacaacgatgaatcgccacaaagcagtaaagcggctcagaggcagaaaaacattcaacaaaaagaaaaggacgaactgagacggcatcaacgcaacaaactcttgtccagcattgcaacattgcgatcaagacggaagagagaatcggctcccatcagctcaaaatcaatcgtgattgatctttcatcagacagcgacgcatccggcattgagatcatacaaaatccagtcagggatagacaagccaaatcaccaaatgagcattcaacggcaccaattcctatggcagtgcaacggctaacaccaacaaggaagagttcatcagttgccaagcgaccagcattttcttccagcaaacaaccaaaaggaaaagtagcgaatcccgcacaaacaagccaaacaaatgaactcaacagaaaaatgaaagccttgtcgccaaccgcaagtggatcaggcgccaaccatcattgcgtcgctacattggccagaagctcggactcaacaacagtaattgataagggcagtcaacagaattgcccaaacatgagctcggcaacaatcagtaagacaccatgccaacagcactcgtccgagaagacgttaaactaagctaatcaccaacaatcgtccgcaatgacgttaaactagtctaagccatcaacaactgtccgaaacgctaatcacccggctgccacgagtccggaatgacgttaaactagcaaagcatcggccaacccacacaacaattgtccgcaatgacattaaactaaagaaccaaccaaacaacaaatgtccgcaaagacattaaactagaaaagcaaacaacacatgtcctcaatgacgttaaactagagaaacaaaccacccaaagtccgcaatgacgttaaactagcaaagcatcaattgtccgcaatgacgttaaactagcaaagcaccggccaccaaacaaccattgtccgaaaagacgctaaactagcaatccatccgacggtcagggtccgaaatgacgtcaaacaagcaacgacaattggtccataaggacgttaaactacgtcaccaattcaagcaaaagcactcgagcatgcagctgacagcacgtttccggaagcaaaattcacatgtcctcaacgattgaggaggttcagcagcgaatgaaccacaacagaccgcaaccgcggaggtcacaacagaggggactaaggccaactcaagcgcctaaaatatgccaatccgggatggcacagtacaagcagggtcgagggatccgccttcaccctgcgtcttctgcaatggcactcactggaccacgacgacgactcagcgaacaacccttgcaacgagagcaaggacacgaatccagtacgtcaccaggacgagaacgcagaccacgaaagagccaacgacacgccccagatcgcgtaagcacgatttggaaactcaagagcacggaaaattcacctttttgccgtcccccgccatcactcactgctcaatggctcaacctggcaattgagctcttcgcaaaaaatcatcaagcccgagcagatcacctttgcatggcattgctccttcgtcaccatcgagaaggaatttccaccggtcaacaagcggatctgcaaacaaatggccattcaccaggaatgcccattcgtcaagtctgaaatgacgaatcacgaagcacaattgtggtcaacgaacgacgaattggaagtcaacttccctggaccaatcgccggacttttcaaaggcgaacaaatcagcacggcgacaaactgctttgctcaaccagcaacacttttcgtaaaacggcacaatctgcagatgttttcgccagtccaccaagttcagaactgtcaatacgccaccgaattctgccaactgcccgacaactcaactctgatttggaaatcaacctgcaatggcaacgaatgccaaacatgcgactacgagaaggcggaagtcatcaacggaaaattcactgcggcctacggagaatcaatggccacttggatctccgaagatcaccaaaaggcattaactttcgccaaaaatgcgccagaactcatcgcctgcgatggcacacgcatcgtcatgtccgaacagaacttcggaattgccaaggagcaatacgacgacattgtcaccaccacgacaagatggaaaagaggcatccgaccagaacagctcgcatcacagctctcggcatcccaagtggcaaatagaaggattcaccatgcgctggctaaaaagcctgatcgacgaagcaatcacgtggtggattcgagtcgcctgcgtttattcaaccttcctcatgctgcgcgacattgttctcccatgcactctggcgtatttactcaatcccatccgagtgactcttctcagcctcgttggagtacgcccgcagtcgacattccgacccaccgttagcaaaccactcgggatcgaagagggaatgccgctgcgtgaactgccacgaacccccaaaccaccagcgcgcagggcagagcaccgatccatgtcaccaatcaaattggacatgattgccagaacggctcggtaccaacaaccacgaacacagtgccatctcgacctcacagaagactcgccctttgggaggccgagacgaaaagaattctgacgggccccatcctttttcgcgccggaatgtcggaattttttattcctatcgccgatcaatgatcggcggaattaagagggaggaggcccttcaccaatcccccgcccgccgcgcgacatgttttcgccgttccatccctctgtccccctttccttcaaattgtcaattgtttttgtgtgttcctcccccgccccgcgcacaaattaatgaccaatttgtcaaaccgcaacttttcgccgccgtccccaattcggcgaatgagactccaaagaacgatgaacccccaatttcccgttttcctcccaatttgttcattcgttcatttttgtgccctctttttcaattcatgcccaattttcggcccattttcgttctgctcaatttcgccactttttgttcaattttgctcgtatttaatgcgacaaatccccaccaattcctacaatcagaagcaccagcaaaggcaagcaatgcctcttccgtccctctctcagtccccctcatttcattgtcctttcccccggcccaattgtccgttccatttctgtcattcacccggtcccttcattcaatgatcagtgattggcccttcactcctgtcccatttcgctgtgattttccccaattgtgataatttccagacccccggttttggtctttgttctgtggccccggtgcccttcaattctttcccatcccggtccccaattcatttgtgattaatcccccggagatggccttttttcctgtgatcaatttgtgataattttgttcaccatttcaaatattggtttaattacccaagtttgaggctttttcccggaataaattttgcttaatcaattctcggcatttgatttggccggtcctcgtccctgcctgctcctgacccccgcaccgtggaattcatttggcccgaccccagagcaagtcgggacaaa

SEQ ID NO: 4687 - DNA, 2158 bp, Heterodera glycines
tttaagaaaaagacaaaatcaattttgcgcgaattggaccaaagaatgggcgacaatcaaagtgccgacgaagtcgaaacgcgccattctgccatggaatcgactgaccacaacacggaaagcacaatagccgaaatggtgggcgttatttaggcactataatgagattatcacaaaattgagattctaaccgattgtgaccggataaatcatcccccatagttccttccccgaaaatcttttttaaaacttttcaaacttacacttattgttagaagaaaagctcataagtttgtaacgcggcgttttcagtctgtggatttggcactctttctgttggaccgtcagccttcatcaaaggaggacccgcgctggtcgtacgccgctaatgcgcaaatttcaaatggcattttcccccttttcgtgcttataaatgttttttttgaacagaacagaaaggacaactccgtgaattgtcttcgacgaaaaagttcactttgattctgcggctccttggcgataaacacgcccattacaaggcatttttggcgtttcattccctccccactttttaaactttctttgttagatggctatccttttcctgcgcactttcaaccttgtcgaaagggtgcgttcttttcgtcaatttgtttttcaatggctttttatggtccttccatgaaaatgaagatgattggctcggtttaaagcaaactttagggtttaacaacataaaaataataaggaattattgttcctcgttagcccattggtataactgctagcatatttcgaggttcagttccgtcccgtcgatcgaacaaaaattcccttttccgtcgttcaaaaggcctcgtcccgctggagactccgtttcccaaagagtgtcttgatttgaacgaggccaaatcgaattgagccataagacgtcccactgtgccgttttcgttgcctttgggatgaatttgcgtttcatacatttttattggattcctgaatcggttgaattttttgtgtttcttctactgtcttttttcagcttgaccatccgctggaagccttccaaaatcgtaacggaaaagcagtgattgccgagttaggcgagaaattgtccgctgccattttctgcttccattggcttgccgaaaacggtgaggagtggttttgccgtgatcggatttgcattcgctttaactccaggcgaatcgctgtgccttgtgaattcggccctcaacgaattggccaagaaatacgtcacgcgctttggctttccgaagggcaacccttttctgagtgcggttgactttgtcttctgcaaagtgccccccttttgcctttgtctttcgcttttcacatggatccgtcctttttgcctctcaggtttcctcttttcacgaattggtccctgcggttgtccaactcagcgaacaatccatggaggaacgggcggatcggaccaatctgttggctgaggtggacactcctttgaatggcatttgctaatcattccatccgaaggtcggcgactttctcgtcaccctcgtccacggagtgaaagaggcgcgtcgcgagaaatgggctctgcaagttgaggacgaccactcgacatggttgaaccagcccgacttccttacccatttcataacgcatgtcagtcagagcattgggaataatcaattcccttttcggtggagtgaaaaatgaaagccccgactgcgaagtggccttatggtcaaagttaaagccattttttaacggggcgacaaaaaaggggacgattaaggggcggtggcaaatgtcaccgtgttggaggaccccgttcaaaactataaatgtcgatttgtaaacgaaatgggtgagcgggagggagggggtgtgtgtttatgacaatttcaatagagaaattacagacccacctgggcctggatcaaggcctggatttttcctggatccagatcagacctgtgcaaggggggtcagccaagaggtcttacgatcgactttgaccccccccccccatgggcgggttagagcccatttccattacgatcgaccattttcaaatttttttctagtgagacttttttttttttttgcttttaagctacaaaaactgacgccgcgatgaaaaataggccgagtgtttcaataaatt

SEQ ID NO: 4688 - DNA, 699 bp, Heterodera glycines
agattttaataaatttgggctatggactcttcgtctccacacgccaatgccgtcacaaaaatttcagcggatgtcctcaaaatgaacgtgtgttccattaaaatctcccaaacaaaaaaaatttgggtttcttaacggaaaaacattttagtttatgaagaagacgatcactcgcattgagcgtcaaaaaaaacagaatgaaagggaacggacgaaggagcaaatttcggcagggaaattggaagtgttgccgcctcggcattatccgacagtcgaacacatcgacgacgacccgaacatgtgagcgattttcattccctccaatgtcttaaattctgaatttcagcacattgggcggagtgatgaccgaatggcgttactccgttctcatggacaacctccgctttggccgcttctcatttaaaggacaaaaccccgaagttgaggtgaattatgccggtaataataaagctggtgccccccctttttttaaaaaatattttttgttttcaaaagtcatgaaaacatgttttaggggtcgctgaacacgaatccggtatccatttcgacttttttcttcaaatattgtttaaatactcagaaacgaactaaaagtcatcacttcttcaataaaatggtaatttaaaccatttttagactaaagtgaaattcgaaaattttgaatcttcgactttttgt

SEQ ID NO: 4689 - DNA, 4144 bp, Heterodera glycines
ggattcgtgttcagcgacctctaaaacccttgaaaacatgttttcatgacttttgaaaacaacaaattttttttcaaaaaaagtggggggcacttgctttactcttaccattatgccttttgaaagggcaaaatttctctattcgattgcttttcacaattagaaatggatgcaatttcacgaacgaagacgcaatggaatagaggacgaagaggaggaggaggaagaagaacgggaagaggaaggagaaaagcgaaggttggcaaaactgaaaaatgggggaaaggggaccaattaattggcaataacaaacggacgatgttttgctccaggagtcgagaagaaggcgaactcagtgacgaggaaggggacggaagcatagtcaaattggtggaggaagtgagaaataaaggccgaaaaagaagggacggacgcaaaaggcaaacgcaaaagatgggaaaacgaacggacattaaaaggagaaggaggggcaattgagaggctaatgcaattgttattatgctgtttatggtattttattataaataaaagtgaattgttattcctttcggtgtcagcagcagaaaacgccaattgtttcttttttcatgcccaaataaaaaggaaaatgaaattctaaacggcgatgggacgataaaatttgcaatttcagtaaacagctaaatttatttccgactgtgttccaaatcggttataaaacaaacagttatgaccacaatcgataacaaaaagagtgcttttgccctgtccttggccggtttacaaagttcctcgtacacttcgtccgaattgtacactctgtccacatttggcaacgaaaagcgtccgcgcggtgcggcgcgcaattggcgctccaacgcttccctttcacgcgcgtctttttgctgctttggcaattggaaattgttccctttagcgaatgcctaaaaataaccgaattgtgagctgtttttaacgtccttttgttgcctgattctgctgatgacatttattatcaatgctaatattacgctgacaatgaacgctgaaaataaagaaatattggaattttaataaaaatttacgaattattacattgaaaatgcggatgagacggactgaggaagaattcggagagacgaataaatgtataaaaaattggccatccactgcaatgaaaaataaagcttatagaaacatgcgctaattaatttaaaaagtgctcccattagtagggccgggacttttagtgactaaaaatctcaaaatagttaactaaaatagtgagtaaaaatgccaaaatagtgagaaaatagtgccaaaaagtccaaaatagtgacgaatagtgacataattttcagccaaaaattgagcaaaaataatttttattcactatttgcagttgcaaatgagtaggactgggatttttaagggcaaaaaatccaaaataggtacctaaaaaataatttttagaattaaaaatttttgcaaagaaagtgaattttgtgaaaaatttttcatttcttaggagtgatttttgaaaatttttatgtcgattcttaggggtgtattttttgaaaaaaaattttaggtcgattcttaggggtgtattttttgaaaaaaaattttaggtcgattcttaggggtgtattttttggttttattgcgtttttgttaaggaattttccaaaaaataaaaatagtgacaaaacgccaaaatagtgatttctagtgactgataatgacatcagaatcgaaaaattttaacgcagaaatgcgttttttgagctcctttcttcaaaacaattaagcaaaaaaaaagttttttcactagaaatcccggccctagttattagtgccattttttgtttttattttttagaactggggtaaacccaactcatccaaacccaactcatccatacccaactcatccatacccaactcatccatatacccaactcatccatacccaactcatccatagcacgatacgagtcgtcgccgtggcatttaatgccacgactaagaccgtacaaccaaaaaatactacgactaagaccgtacaaccaaaaaatactacgactaagaccgtacaaccaaaaaatactacgactaagaccgtacaaccaaaaaatgccacgactgagaccgcataaccaaaaatgtccacggtcaagaccacataagcagaaaatgccatgccacgaccacataagcagacatgccacgacgatgactcgcagcgttatggatgagttgggtatggatgagttgggtctatggatgtgtcgccaatcttttatttgcgccgcgcgcttggggttggggtgggccaagctgaggcgggattggttcccgctcctcttcaccgctctcgtcccttttttctctgctcactccgctcgctgtgccgtaaagggaatggcccccttttttcaccgttcgctctgatgggtctgatgctgctgaccgatccgatcagcgccaaagggggacgagaatgggaggggggaggggtgacaaatttggattggtgcttgagggaattgtgcagcaaatcgctgcttgcttaacggcaccaccgacaaggtttggggaagggcttgtcggacccctttgactcgacgaccacgggtttcgactcccgttccctgcggcggacactccggctggtgggagtccgctttgatcgatgcgcgcttctccggctggtgggagttgcgttgacgaacggccctgtcctttcgtcggacgatttggcaccgctcggctcttccttccttcactgccctgcttggacttgacgacgacgggagttcacacccgtctcttcagctgctcctactggtgggagactgaactgctcgaatttgccgctacttcgggtcactcccgaatttttcccaatggctgattggaggggaatttgggatccgggagggttgagggaaaagacgtaggcgaatgtgatggagtgaggagggtctttttccctccttaccgtgtcccccgaaaacgaattcgagacttcgattccgacacaaaatttattaaagaagcgatcgacgaattaaaaatgcgtaaatggtgaaaaattgatcgaaaagtccagcaaaacgaataaaagcgaatgatccgtgggggaaggaagcgaagagagcgaccccttgggcagggccgcttaaatagacattcgaaaaaaatgggcggagtgacagacggcccaataatgcgatgagaaaaatgggacaaaaaaatgggcagaaattgtgatgtgaaaaatgtgaacaaagaaatggcgcataaaaataaaatgtaaattggcagatgtgaaaagttaaagaaattgaaaagaaagaactttgtgcaaaattattttgcacaaagcttgggccggagattagccagccgatgagaaatgaatttgtaaagaagtgaaaatgggacaaaaaataggtgaaatgataatggctggtacgattaaatggagaggaaagtgatcaaaatcagcgattgaggaattgatgaatcgggagttcgcccgaacgtctcgtcccctttttgctctttttcttccggtatttcttcgtctttgacggtctggcccatgtgctcgtgcttggtcccgagaaaacggactccccgtaacggtcctcctcgtctgtgtcaagctctctcccgattctcggtccctcggcatccctgttgaacgcgagcactcgcgcacgccgtggcgggttggcacccgccttctcgttgccaatgagaaaattggcgacaaagtgatcgttgacgacaaggccacgatgcttttttatatgattttataaaaatatgaatttaaaattatttatataaattttttatcataattgagattgtaatatttatagtttttggtattaaaagtattggctacctttttgaatttaagactaaatatttaaaaatatattttttatttatttaaatttttaggtatttggttttttaactttttattatgaggtgtgtatggttttgccttagtgcaaaaagcaatttaaatttaaagcctatttttattcaggattcataatttttttgaaactctgtgttattggaaggatgtgagaattttctgcttattttttctgaagat

SEQ ID NO: 4690 - DNA, 989 bp, Heterodera glycines
  unsure (1)..(989): unsure at all n locations
tgctttttaaagtttaaaaagtttcccatttttcttttttatatttaacccccaaaatgcaggaactgactgacgtggaaattctgcacgaaagtgaggatggtgcgaagctgttggtggacgaactgatcaaaggccatgttgtggaaacactggtgcagcagccgctggtgaaactgaacgagcaaatccaagacgaagcggacgccgtttacaacgcgatgaatgtggtggaaaatgcgagtgattcgtttttggcatttaaacggggaaaacaattttcaaaaaggacatggactaatatttccccaatttgaaatttccccctctttttatttgccttttgtttcagttgctcgacttccatccccaggccaatgatttgtgcgtctcccagggcctcttcgattggctgatggtccgcgcgacaaagcgaaaagtgttcgacgccaacaaattgttcgccagccaattgttcgctatgctccttcagtcgtgcgagtcggcacggaaaaggctgacggagaaaagggatggcattgacatgacattgcgagtgggtaataccaacggaatgccatagtttaatttgtataggcacttgccgtgtacaaacgacacaacccgggcagtccggacgaacacgagcacatggaaaatttgttcgacgctctctgtgccgcgcttatgtacgtgccgaaccggcaggtgttcctcgacggggaaggacttcaactgatgattcttatgctaaagtgaggcggggagaacaatttgaattgaatttggcattgtttaagggagaagaaaatgtcgcgggagggcgccctgaaagtgttgagtcatgcgactgccatccccgacggtggccccaactgcgacaaattcgtcgaaatttacggtgctttttctccgtcctcattttcttcgctcatatgcttcaccatttttaaacaaaggtctttctacgctttttccgctgntttatg

SEQ ID NO: 4691 - DNA, 3845 bp, Heterodera glycines
  unsure (1)..(3845): unsure at all n locations
aggcagatcagcggcttgttcaggcagatcagcggactgttcaggcagatcagcgggattctcaggcagaaaggcggactgctcaggcagaaaggcggactgctcaggctgaggaggataaccggcaaatgaggcgcgaacttgagcaacaagagctggaattgtttatgttgtgttcccgtttagttcgacaattttgtgaggttggttttacagtgtattttatctatgatatatcaaataggagggggggggcgggggttgggaaaatgagtggttcggcggtgttataggcgccgcggttacttttttataatgtttaattcaatttgcaagattttgtccaaaatgactaggttttgggccaattttttaaaaaatatttagaactaaggacacttgggaactctgtcaaaatatgatgattttcagattgaccacaaaatcagcgccgaggacagaaaaaattttttcggaagatactgtgaggttacgacatggatggagcataatgcaggtgcaccagctgtggaagtgactcaacaaaaagaggcgttcgaacatctgtaccaatcaatcattgacggagcgtcgggcaacgactatgtcgcgacaacgggttgtgtggctgggacgtcatccgccaacgaagtggcggtcaccggatgtttgcctggaaattcgaagaaggatgaaaaaggcaatgtcgaaacaaagaaaaggaagagagaaagcgacgaaaatgaagaatgaatggtgtttatgcttttttaaaattggtaaaaagtgtttaattttttaatgtttaattcacttcaaataaatttttgactctaattcgaatgttttttgatatgccactgctgatcagttgatcatcaaaaaatgggcgaaatagccataagcagacattagtcacaatagtgatcaaaacagaccgatagagaagggtctctgtgattaattcgtatttggaaattgtgatcagagaatgcgatggcattgcccccctccttttgtgccacagatcgccgccacaatttccaacagcattcgctcgctgctgccgtcaatggtggtcatcggagtgagcgccttcatttctatcgctgtctatttattcaacaatattcaaaccccgaccgatggagcagaagacatcaatgtaaggaaacaacaaaacctgcccgttccccggtcacgaatttatttgcagagaattttttacctttttaaaaataatactgtcatccattatgagttcgttcggttatttgactaaattgttcaaagcgccaaaaataactatttacatttaaaaattaaaattaaaaatagtttttttttgcaacaattatatttttcaattcgtttaccaaaaaacagtcagctaaaatgttgttcaaaattgaaaaatatcttaaaggggtaaaacaccaaaaaatctcgattgaaaatgtgccaaacatttagccggtcaatgaggcattgttgagggatgtcgtcgaagcagcggagaatcggattgctgatgcgaatacgcgggccaatcgggtaagctattgagcacgttgctcaggcagatcagcggactgttcaggcagatcagcggactgttcaggcagatcagcggactgttcaggcagatcagcggaatgctcaggcagaaaggcggactgctcaggcagaaaggcggactgctcaggctgaggaggaaaaccggcaaatgaggcgcgaacttgagcaacaagagctggaattgtttatgttgtgttcccgtttagttcgacaattttgtgaggttggttttacagtgtattttatctatgatatatcaaataggaggggggggggggcgggggttgggaaaatgagtggttcggcggtgttataggcgccgcggttacttttttataatgtttaattcaatttgcaagattttgtccaaaatgactaggttttgggccaattttttaaaaaatatttagaactaaggacacttgggaactctgtcaaaataatgatgattttcagattgaccacaaaatcagcgccgaggacagaaaaattttttcgaaaaatactgaggttacgacatggatggagcataaccagctgagcaagtgactcaacaaaatgaggcgttcgaacatctgtaccaatcaatcattgacggagcgtcgggcaacgactatgtcgcgacaacgggttgtgtggctgggacgtcatccgccaacgaagtggcggtcaccggatgtttgcctggaaattcgaagaaggatgaaaaaggcaatgtcgaaacaaagaaaaggaagagagaaatcgacgaaaaggaagaatgaacggtgtttatgcttttttaaaattggcaaaaagtgtttaattttttaatgtttaattcacttcaaataaatttttgactccaattcgaatattttttgatatgtatgttgattttcatgataatgatatccctaaaaacaactaaagttcagttggtaattttttcctttaactcttaagttacatgacaaaaagtccgattgtggtcgcaggtggtggattggttggtctgtcagtggcctacggcttggccaagcgtggtaagactcttgcatcaccaaagtacaaaaatgtacagattgaaatggatgtttattttcaaggtgcgaaggaagtctttctttttgaacgccattggtacttttgcatttttaaaataattgttttcttggcaaatgcagcatcggtgctcacaattcgacacgcatcagcacgggaatgatcagtgagtgattgttggattggtaacactggggaatattggctccacaaaacaaacgttttttgaaaatagtaacccggggttttcgaggcttattttcacgaatataatattatttgcaaaaagatatgatattcgtgattataagtcacgaaaatcgccgggttggtctttaacaaaaagaaaatgattttttttgtggggtccatattttccattataaccgttggatttggtttcatttattgggggagtgtcggtcgaatttaacttgtgagctttccaacattaaaccctttagacaatccatgcttttacacggatcgctctctccaatccgtcgtacgcaaatcgcacgaattatacgcagaattggacaaccgcgggacattaggtaatccgtcaacaatgatataagagtctcaaaacgatgagactttgaaaaacttgacgacccctttaattccgacttcttcccctgttgttagggttcactcgctgcggtcgcgtctatttggcgtccagcgacgacactgccatccaagcgcggcgtatgttcagccgactcagcgccgacccggccaattcggcagccgaactggtcgactgtcccagcgaaatgctcagccgttggccaatggtggccacggaagacgtcaaagtcagtgggcgacatcgccgcaaaatttttgtgattttgaaccccaaaagggtggcgactgacaaccggcaaaaaaaaaaaaatttttttttaaattctttttcataaacgaggcgagaatttcgccagagaccattcaaaagtcgtaagttttcattgttttgttcagttggccctcttttcccccctcgatgccaccattgacgtgcagtccctttgccgtctgttgagtgaccgttgccgcgagatgggcgtgcacatccacgaaactgtgggcgtaaagcgagtgttgctcaacgagcggagaacgacttatgcagtggacacggacgaaggtgacagaccaacttcaaaaaaaccaaaaaattaagaaaaccanaaaattttctgtttttaata

SEQ ID NO: 4692 - DNA, 868 bp, Heterodera glycines
ggtggacgtggaggtcgagtacagtctcaggcattgtggctattacggtgggtttttgccaattcggcttgtgttggattgagcaaatcgcccattattccaaatgatggcatacacaattaataaacgcatagtattttgtgttttagcacttcgacacttgcgaatcgagaaattctacgtttattggggtcagtacacttttgaaacgcctttccttgccattttgaattgctttatttacacaaaaaacaggacaagacattgacagcatgacgacgcctgtcgaatgcggccgggttttcagggtggactttgaagtaagtcgaatcaaatgaaatgaagaattttatttaaagtattttttaaaattatcaaaataaaatatttcagaaagaatttatcggcaaagaggcgctgaacaggcaattggaacgcggggtcagcaaacggtttgtccaactgttggtggacgggcatgacatggacagggacccttggccgcacggggacgagcccatctacagagatgggacattggccgggtggacaacgacggccgcgtacggattcacactgggatgtcaggtgaaggcattttttacatggaaaatacgggcaaaatgaatatcgaagggattaaatcagataaaatggcacttcataaaaattgaaaactgacggagagtggggaaggaagggttagttggtatcggcacttttcatcattcatttgccaggtttgcttgggctacgtgcagaacgagcagttcggcgtctcctccgattacctcctgcgcggctcgtacgaagtggagttggccggcaaacgattcccgtgccggatcaatttgcactcgccctcatt

SEQ ID NO: 4693 - DNA, 741 bp, Heterodera glycines
caaaaagatcatcaatgacatctttcggctgcgtggaagacaacaaaggctgatcaacggagacattagtttttgatgactgttgctgttgcttttcctctccactcacaacagactgttttggttctccaagtataatgtcaaggacatctttcgactccgtggccggtggagacatcaatggacgaccaacggaaacattagtttttggtggctgctgctgcttcttctcctctccactcacaacagactgttttgatcctccaagcataatgtcaaggacatcgactcctgctgcattttcattaaattctttatgcacaactggggaggctttagcagctttagttgttgctgttgctggtgcaaccggtggcgatggtgaaggtgtcggttttgcagttgctgttgctttttttactgttacagttgctgaagttgctgctgcttgttgcgactgtgttactttgggatttattgctgctattgcatgttgcgactgtgttactttaagtgttgctgatgttgttgcagatggcggcggtggtggtgcgggtgctttcgttgaagtaactttgttatttgtattggactgattatttgctatagtgttcttatggggccaagctgatgaaacaggtgttaaaccgattgtatcagtcttttttccactgtttactgctttcactaccttctcagctgtaggaactgtactaccaatgctgggctttgttaccactg

SEQ ID NO: 4694 - DNA, 7351 bp, Heterodera glycines
caagcatttcgttgagaaacagttgtgcgcgattttttccacctgttttgggaacaattccaaaaagatcatcaatgacatctttcggctgcgtggaagacaacaaaggctgatcaacggagacattagtttttgatgactgttgctgttgcttttcctctccactcacaacagactgttttggtcctccaagcataatgtcaaggacatctttcgactccgtggccggtggagacatcaatggacgaccaacggaaacattagtttttggtggctgctgctgcttcttctcctctccactcacaacagactgttttgatcctccaagcataatgtcaaggacatcgactcctgctgcattttcattaaattctttatgcacaactggggaggctttagcagctttagttgttgctgttgctggtgcaaccggtggcgatggtgaaggtgtcggttttgccgttgctgttgctttttttactgttatagttgctgaagttgctgctgcttgttgcgactgtgttactttgggatttattgctgctattgcatgttgcgactgtgttactttaagtgttgctgatgttgttgcagatggcggcggtggtggtgcgggtgctttcgttgaagtaacattgttatttgtattggactgattatttgctatagtgttcttatggggcaaagctgatgaaacaggtgttaaaccgattgtatcagtcttttttccactgtttactgctttcactaccttctcagctgtagaaactgtactaccaatgctgggcttgtttaccactggttttagaacttgtggcgttggtggtgatgatgaatttggcgtttgtgctgcgctgctattactattactgttatttttcggtaattgttcttcgattttttgcttttttgtgctaatttctgaatcaatctgaagattctgtctgtcctggtccgctcttgggggagacgtagccaccacaactttctcatgcgttggtggtgaggttaatgtttcacctagagacctcttcctgcgctcactcggtggtgagggtgggcttaacagtctgggcctctcaatgaacgtattggtgttgctgctgctgctgcttgtttgggtgtcgttttttagctgttcaatggtgttgctctgatggcgtaatgttgcaacaataaagtctctcagctgttccacctttttatgggaacccttgggcaccggaaccctgatcactcgctgtctctcaacagcatcactttctgtgtcctcaaagtgaatgttgatccattgatcatccaaagtcccaatcgtggagtgccatgaatacggatagctgatgctgtgcagcccacacacccaggaaccattaaaataaattggttttggtaggcggaccctaaatttattgggctggttgtccgggtagtcagttacgttgcttggcaaaaacacaaagaaactatttgatgacatcacttattttcacatgaacgattaatatgtacattatgataagaaatactgatttttatacaatttgtgactcatgaatccactccctctccgggtaacctatgaatttgacgagcatctctgttgacccatcagcacgttttcgtttccgaaccaccttctcaattcgatagctcgtttcggcgtcctttcgaacacgtgccaactcttggtcataaaagctacccttgaactgttctcctttttcatcacgaagtttataacgcacagggttaacatggtgcagcacatcgtcaatttcgagaatttcatctccataatttggtaaataacctttctcaaactgccccttctctcgactcatgcgcacgtaatcattctctttgaatctcgtccttttctcgagctttctcatcggcgaatacatatcaccgtatattgtgtgccaaactttctgagcattgctaaaattcacgtcaatagggcgcattccgtgcacacggctcggcgctctgttgatcccatcaacaatacgttgcaccacatcaatccaatttagtgtttctttctgtgcaaagtacctgtacaaacgttgtttcacgtttcttatggctctttcagctaccgatgccttcacagcagaatggacgggttcgtgttttgcaatatcatgttcttcaaagaactccttgagcattcggttacgaaactctgtgcccttatctgtgaacacacgatgaggcgtcattggcatttgctcaaccagttgtttgaatgctagcagcatctcatctgcacgcttgctgcgcaacggcaccacaaataatcgcttggagagcacatcaacagctacaagcagatagcgatagcctttgttgtgacgtgaaagtgattgtaaatcggccaaatcaacttgaacatcagtcataaaacctgcggccacagtttttgacctcgggaaatgaactcgtctagggcgcagcagtgtatatgtgcggtgcccttccaaataattcacaacatctgaccggtgtatatcacttattcttttctttgcctcttctagtaatctactgacaccagcaaatgctgcaggtgaagaagggtcattgtataactgatcaagtgttttattgatcagctccacctttctggacggaatggcttcttgtaggtcggcggcttcggttttgtttgtggctgcggtttctttaatggagctgtccatgagtacaaaattggatccaatttaagcttctcctccaactgctttgatcttggtggaattttggtagcattacctgctcgtttgtctattatatactttatgatcatggacacattgctacgcgggtatggttttccagtttcttcattaataagagaatttccactaacacccattcgttcaccgtaatggttgcattttattaatattcgttctacgcgctgtttcatggttagtttatttggtggaatagaaaacagctttccatattttttactgtcatccttttgtgccgatgttgatgggacattgtagaactttggtgttggtgaatactctactcttgctcgccccttgcgtctttcaggtctcacacggcgtttgccacttttcttaccttggtgtttaattccatttctttttgttcgtggaagagtgggagcttcatctgcttcctcctcttctccctcaaatggctgatttgatgttgattgttcttgttgttgtagttgctgttgctgctgctgctgttgttgtggttctttttttggttctctttccgggatagataacttacttgaggtcgaagcttgttgcgatagctcttgttttggttcccttttgattatctgaggcggcggaggatacggcggaaactcatgcacttgttcatatttgggttcccttttgatctgagccggagcaggaggaggtggtggtggtggtgaatcatgtacttgttcatattttggctctcttttaccttgtggaggaggagcaggaggaatgatctgtcttaatgtcggtgtctgctgctgctggttcaattcctgctttgattctcgtttcggtgtagggcgaggcggaggcggaggaccagtacgttcatatgttaataggggttgtcgccttctggtttgttcccatttgggagatgaaggtggagagtaatatattttatttttttttttggttttttcaccatcaccattttcttctgtcatttttcttctgctcgcaaaactaaatcgggcagtgtccatttcatcaatttcatcctcatagtccggcagcatcggttcgccataatattgtgaaggagcaggtagcgtgtacccgtcttcaagcatgtaatcatcatcatcattatcatataacggtgctgcagctgcttcaacaagaagattccgtcctagttgtgcttgttgctgttgctgctctggttggggatgctgcagatgttgttcctgcaaatttcgctgtcttagcctccattggtgtacaggcatgtgtctccgcgttttccttgtttttggtggccggggtgggcgaggaggtctattattaggcggagaatgcccaccatccggcggtgagggtgggcgtagtgaagggcgagggtgctgatcgggtggaggggggcccggcgggtattgtggagcgtctgcaacacccatatcttcatcaccatcgtcccgcttaaatagtacacttaacccttttgacagttacacctttgttggtctgtctgaatgttccttcctcatgtgtaagtagcgtcttagttgctggttatactgaacatttttagcattcgcattcaccttcttcatctttgttcggtcgagttcctgtcgtacagcatcgagagtgatgtccccagtactggaagctgaagtgagcccccggtatagaacctcgggaattattaaaaatttattcgccattttttttgaaaatgagtacatgatatcaattgttcaactccttttattcttctcctccgcgactgattgctgatttggccatcgaaacgagtactggtgtgagaagcgctgcaaacagtccgccgactcctgctcctttctgtacaagtgtacgcttcgcaccctgttcacttctcgtcctgctcatgcagcgtacaaaatctgcgtacggcatcatacgttttctctgccgtgttgtcagctgaaagcatgatgtgactatattcaaacatatttcaaccacagccaacaattcatcgctctccgcattccgtatcattcgtctgagcttgttaggtgactttgttcgtgctaagcgacacaaaaaatgggcattttcatgtaccaacttactgattttggattgctgcttttgctgttgttgttgttgttgttgttgtacgcttctattgccttccatttttaggaatgaaaagcaccatttcatcgtcgtctttaaatatctttgtacgtagacgtaatacagggtctgaatgagcactcatgtcgatcagaatatagccgtatggttgatcagtagcttgacggtacgcgtccaaaaagtagtccaactgtcggggaaacagttgcacaccaaggttccgtactgcaagggttgaattcggtgaacgcataagaacaatatattgggcattttggcgagcaacctttatttttcgttcgaacaaattttgagtcacaaatataacggcaaagttctgatgatgagactttttggtgaacaattctgacagatacttctcatctatagacgtcaacagatcgtcaaggatgagcagaagcggctttgattggcgacgaataaattcttctggtgggactccagcatacacggatatgcctgccttttgcaacaccgggacagtagaactcatttcaccaaagcagtagagaatctcaaccggtgatggatcaattaagtctttggattccgcaataagttttaagagaaaggtgctttttcccgatgatgagggacccgaaattatcataccaaaaggcagttttaattgcaagtctttatctgtgaatgctgtagaagtgttcatttttacggttacaaataacggaaaattactactttatatacactcgtgcacacaaatattatctaatcagtttaatgtttcattattgactctattgcttcatcttcctcctttacgtcaaagtttgcttttacggtggacacatcatcatctgtttgatgctgttgctcctttgttttctcaccttccgatggtagaaagctgacagctgccgacaaaacatcaaccaaagtttctgactgctgagattttggaactggggccgagttggttgtagactgggagggaagaaatgtcgtcattgcagacattgtgtcaacaaagtccatgggttgagtatccattgtttgtgcaataatgggaggatgctgttcgggttgagaagggagcaatgttgacgctacagtcaaagaatcaatcagttcttggtagtcgttgtgctgctgttgcttttttggttttgcactgttaatattggaagaaacatttttggatgctgtactgtcaacagacgacacttgagaaacattcacagcagcagtgtgtgatcgttggacattgcctgtattttgtttctctatgtatggtgtagcagtagacattggctgctgctgtccgtgctccacattaaacacacgccccttgttcttgattttgaaaaaggtatacccaggcaaatcgtaaacacagtcaaacggcacgaaggcggtgccattgatacgcgtgcaccagaccgtcacaccctcctttgtgaccatgtaatccatttccgcctcggtggacttacagtgacggcatttgctcggaatgtcaaacggaatgactcttggtgttgacagccgttcgctcgacacagttataccattggaactcagggtaaaattaactgacgggatcatagcattaaaaagagaccttttgtcatcaatgttcaaagccattgttgggaagtgctaatttttagtatagagtgaaagataaaagaaaattaaccgctatttataccccttaaacccattgaggtctaatgtttgcataacctaatttctgtgaaattatgtgaaaaaacaatttattacgtaattatttgtaaaagttttgttagttccattttaaaaatatgaacgatacgatttttcaaaagctgtcggtgcatcaccatctttcatccttcaattcttggttcagcattcattctcaacaattgagtggaaactctcgttgtcggacacgctcgagcgctcactgtccttaaaaattaatacgttaagtcttaaaatttatgagaactaaactgaccactcggtcatggtgctgctgctgctgctgttcagcattcggttgtgcaggaggacgaacatcaatgatcagtggctgcggcctgcactgttgctgcagaggagggaaccgtgccaggcgatgagctcctatattctctgcaccattttgaaaaggtgctcggctacggatccgtcttctcgacatggttctcggacgatggttcatgagcagacacaattgcatcagctgtacacaacaaaattatttgttaaaaaactacaaaaaaatccgacctgtaggaccaacacaccaatgacgaacagaagcagaactgattgcaattcggacgtttgttgctttggctgctgtactccttcagcaagaaattgggtgaaattgaggacacttttatgtatacataaaagtggtttgagatagttaagtgtgcgaagacagtagagattttggggacaagtacagatatctgcagcgatccactgcatcactataatttttttaaaaaataaac

SEQ ID NO: 4695 - DNA, 3507 bp, Heterodera glycines
accttcgaagctctcaaatatgcgccccgtttgtccatctttacgccgatttcttgcagtgcggtggccaaataagctgggacgagcaaaaaacggagagagttcgtcggaagttcttcgacggaatcattggcactgaacaacgaaaggccatcgattgttttggccacggattggagagattggatacaatctctcaagacgttctgaaacaatacgaacggaaatgtaaggatgaaaatgccaactcacattcctttgcgcaaattgcgaatcgccaagacggcccttcagcaaatcatcgacgacgcactcacaacaatcgaactgctggtcgagcgatttctcggactgactatgagacattgcacaaaaaatgaatacccctatgtaatttgtttaaaaattaagtgaaccaaacaaaaatagtgggaaaataaaattattattttttactctctcattttttacgtacaatttttttattcggtagagataaaaataaataatgaaatataaaatttggtttaaattggaaggaaaaatttgtatggttctacacaacatttggactgaaaatgcctagaaatatttttttggtgccttttgcccttttaaaaaacgctttacacaccccttgaacattgtttattaaaatgcactttaccaaagtaataaattaaatcagtaataagcaaaataaaagtgatccaccagtgttgccagtcaatttgaagcaaaaatgttttgtgggaaaaacaattgatacccttcaaactcgtaagcttggagaggggaaaggaacaaatttttcgcacaaaactgtgcaatttcgggaatgaatatcaatcaaaaatttcgagtggtagtgagtcaaaaatgccataatttcaaagaagcggtgtgtttttgattttcacgcggaccaaatatttcagacgaatttgcgattcatcgtagacaatgaacctacaaaaagttgaagattagatttatcaaactacctaattatctcactcattgtatagcaaagaatgaccctccgcgcctgatttgattgcttttccacatggaactgttgctccgtccaattgctcgaattcggatggatttggcactgttccaccaactccttaaaaacaatgacatagacttacatcagaataatattaatgaaatttaattacctttcacgctgtgtttccctcttttcggttttctcaattccttggcatctttttcttcctgaatttcgcccaatgcgacttcacacaaaagcagcagtccctcgccattaatcacataacaataattggctgattttgacacctaaacgccttcctttttgttattattcacaatcgaatttctattcaaaccatgtccgccaggtaaattccttttccaaacatatatccagtctaaagccacaaaaaaatggtgagaaaaattaatgcaaggactgaccactggcgcttcggagggcgcaatgcgaagcccctggctgagaatgcccacgtaatttgagagacggcctaaattggcaaaaatgttatttttctgaatttggaagtaattaataactcactcccatgccaaagcaaatgcaaattcccaatgtcccttttgaagcgtttcatttccaattcgcgttcaattttaagaacctaaagataaaatgggttttaaattatcacagaaaaggaacaacaacattgatgatttccaattggaccccgtgagtgggcgcatgaccaacttcgacgtatttctttatcagcgaaaactctcgcgaattttgctcaagaatcttaagagaatgttgttgttctgtgatttttttaacggagtacgtacttccattttgcagttgagcttttcatagtgtaaatcaaatgcgtctttgtcctttggttccttttcctctgacttgagcaaattgtaggcaatttcaatctcaagcaaattgtccaacatgccacacttctccttcaagacgttcaaattatcgagaattggcggggacttcagcccagtggcgtgaggaatgagcgtgtaaaatcggttggtgaagtccacaaagactccccgagaagtgggctgcgctttgccatcctctttcctctccagaatttgttgcaattcggtcaaaactttgtacgccttgagaacgtgggaacggctgaggcgaccaagtggcattttagtaaggtcaatctgaaaaaaagcaaataaaacccaatagaaaagatactgtcacacatctaactcccgcaaagtattcgtgaatgcgttgacatcgaatatcatcgaaagaagttctttcaccggacgagacaaacgtgacttggaggcatcaatgtccaacttttgggtttggttctcctgccaaaaagcgggtcgaaaaatgtttcatttctcattgcaccattgtacctttttatcggcaaaatccacttccacaatgtccattccgctcggatttttcttaaaattgccagcgatgtacgactcccacgtgttcagtgatttctcctcaaaaagccttaaagcatttgagtaaatagcataggattgtaaatgttttgttctccttaccttttaaactcatcggtgcactcttctatatcagtcccataatccatcccgtttttgttcctccaattaccgtcccaactcttccccaagcgcggaacaaataaaaactgacaaagcaacaaaaaaaacaggctaaaatcacagggaagcaaacttcgatccgaaatcttctttgacaatttgaagtttataataggaatttttcccccgtgaaatgtcaacgacggacaaattggcttgccaagggcgttctgatgcaagggtttcggcatataagaacgacaaattccaacataaacccactggtttttgggtcgagatagacatgacattcatccgcaacttcgcatctcggatctggttgtgagatgataaatttaaagagaaagtgaaaattcacgaaccaacaacaaatccatgcttttcaaccaacttcttactgccagacgcaccactctttgctatatgtttaaacaaattttaaggacaaatgacaaaataattctatttgacttacggtttgttgctcgctctgccgtgttcaaacttttaaatgccttcggtttcacaatgatttcttcggtcagtgctgcagcagggtaaagtctggcaggaagcagctgaaaatgttcatttcaggaatatgaattcgggtgacgatgaactagaagaaatcatggagaaaggaacccctgattttgcagtttttatttcaggaaaatcattatctgggggggaggggggggggggggggtctcgtgacactgagcacgaatatctaccgtcaggtttttatcaaatctatgactttctcatcagaggccgaaacttttttatgatcgttcaattgcttaggggcccctatgcccactgtttcatgattgtcgataaacgcaccgctgtcttcaa

SEQ ID NO: 4696 - DNA, 1703 bp, Heterodera glycines
aaatccatgcttttcaccaacttcttactgccagacgcatcactctttgctgtatgtttaaacaaattttaagggcaaatgacaaaataattctatttgacttacggtttgttgctcgctctgccgcgttcaaacttttaaatgccttcggtttcacaatgatttcttcggtcagtgctgcagcagggtaaagtctggcaggaagcagctgaaaatgttcatttcaggaatatgaattcgggtgacgatgaactagaagaaatcatggagaaaggaacccctgattttgcagtttttatttcaggaaaatcattatctgggggggagggggtctcgtgacactgagcacgaatatctaccgtcaggtttttatcaaatctatgcctttctcatcagaggccgaaactttttatgggcgttcaattgcttaggggcccctatgcccccttttccatgattgccgataaacgcaccgctgtcttcaatgttttcaagaacttattgccagatttcatttgttttggaatgaaaaaaggccttctttcgggagtccttgtggtgtaaaggcatctggtatattccgacaaagttccatagcatttgtaagaatgggtggtcgtgctaaaaattaattgacatggaaaataaatataaatgtgacaacacctgtaattcaatggtccgttgcactgtggacatggctgagggacaccgaacaccacaaagtcgaccaacttatccaacatcgcttccgcaccgcccttcttcggtttgaaatttccgttcgcttgcagtaattcctcctaaaacacttttatttttgaattaaagttaattgtgagataaaaatttaaacattatgatatttgaaattctttaggtttcccatgccccctttttgagttattcttaaaaaatagaaatgtattagaacgaaccatttcgctgctgtccaaattttctcgtaatgcaattcgagtattccataacagttcggattgtttctgaaaggcaaatttagacttgtcgggttgatttaactaaaagaattaacaatttattaatgtgtgtccgtccacctttagtgcctctgtttgttccttattttctccatcacttttcatccttttgctcgtcggtgtctccgtctcactgatttcattctttcgtttaattctaatacaaattgttattttagggaagacataaaaagcgtatacccttcctcagcgggcgtttgtgttgcttttggaaataactcatccaaccgcttttgctcatccgcgtttaagtcattgtatccatttaagctataaaaaactgggattaataaacgataatatgattttagctagaaatgactcactcttccgcacttttttgaaaaattccaagtgaatgaaaacattcgaggtggtagaaggatgctttgcttgaaacacgaaggtccccttttgcaatgctgtttttgcatttgtaacacttcgatgaccctgaatttcgcgtgctcaattgtcattacggcggctttgggtgtgtaagcagaatcatcggactctgaataatattgtagttcctgtaaaaaccagtgtaacctttgagctccgtaattcgcgcccgaattctctcttggtcctcccatttaagccattccattccacgaattgaggcttcattgatatcatttttacgagcttttttcc

SEQ ID NO: 4697 - DNA, 1659 bp, Heterodera glycines
gattactttttgatattctgctccatagggcggctcttttggcgtttcatcttcattctccatgttgaatcgaagttgtaaaaagtatgcaaaaatcaaaaaaatgcgatttacaaggaaaaagagaaaatatgtcagtataagtagcaaacaaatgcctaatcctaattagtaattacctaatttcgtttttataaaaaataatagtttcgccataacaacaatgccaaaatttaagtttttaactaacggcactgagatcttggattttcactcaaacgtttttttctgtttaagtattcaacaacagttcattaaaaatggattctatagaattaagccggtctattttatatacataaatcatagcctacaatacatactgagatgttggcacattatacacatatgaatttttcttacaactcatggaatgaaatacgtatgtggatagaaaatgaatgattaaggtagaacttcagttgaatggtaattgaacaaacatcatatgagatatataatattcttaaacatctcgcaccaccattttctcaggtagtcccgtccaagaacacatgagactcaactccgccatgcccgtagctaaaattaaaagcaattataaaatggctatttcttggttgttacccgcgaggtccaaacaatgcgccgtagcatcgctcacaatatggctttccgtcgtgctaaatcaattcaaaatcgttttgtagtccacaaatttcttgaattaaatgaataacttcgcaatgcttcccaacggtgagcgtcttcttacaggcagaattatgacactctaaaaagaagattttctgttgtagtaacagcacaaataacacagaagcaacgtacggagacaaggacggtgccaatcttttccaatggaagtgacgcgctcagctgtaaaaacaaacaaaaattaattaattgtagacatttatatgaacggaccaaaataaacaggccgctgacatttgggacaaagaggcattttgggaggacagagtttccaaactcacaaccacaattagatagttctccaaatacgcaaataaattcttcaaaatggcctataaaaaagaaaatcaaattgaaatatcggaatgcattgattttgacgaattaaaagtaaattgttaagagttaaatgaaaaagaatgtccgcataacaatggcaaagacgagaatgaattttgataaaaaaaagagagagagaaaggatgattatttgagggggttttatgatgttatgtaaaacacaaaggacataatcaaattgtgtaaaagtgaacagatgagtaaacaaacacgaagttacatatttaatgtgtgtgtgcttttaattagtaattacataaattccaagtgactgctttttgtattattttttataaatttttgtttcacatatttcttacggatgcatgctccttaaggtaataaggtcttccttgttttgctacccccccccccccccaaaaatttaaaaaatcacagatattttgtccagtctatgaccaggtatcagcagatgtcaaaacaaataccatattgatgataatcagtgaccttaaaaagcccaaaaatagtaatttttaaaatttttcgaggggggggggtgtagcaaaacaaggaagtacc

SEQ ID NO: 4698 - DNA, 1773 bp, Heterodera glycines
cctcccattccattccaaccgacaaaaaagtggatggatagcagcgaggtgcgttttgttgcacaatgatggacggaattgtgccctgctaggcggatgggtggggtcggtgaagcaaagcaaaggaaagggacccatccccgtgaaaagacccccccccccctaactctgcacaactcatcattctcttaagcaacaacaacgcgtctgttgtaactcctttctttcatcctcttgtcagcgtcaaaagtgtttctacttatcagcgagcactttggttttgcgccattgactcaaaaaccagtcagtccttaggggaaataagccgatttttgtatccactcaaggccaatccttaaagagacgactttttgtacaaacaacagaaaagtgtttactcatacatataaataagtgaaagatgaggagagaagttggaattaataaagtgaccagcacaaattattacgattaaagaagaaaagcattaaatgaaaagacaattaatttaacacgccgtactttaatttgctgccaatgttcggaattgaactcaatgattgttggcaaagacaaataaatgtttgagggctttttacataggatgtaagttaagttcgcgcacaatttgttattggtataaaaattcagtaaaacgtaatcataaaaaaattaaacaatttcattaatttatttggatgaaatttaatttttaatcattttaaattttttatttatttaagaaatgtaacaacactccaataatttatcccccccccccttctcctcgccacttttcgtcgtttggtgtccgttccaatcgaatggtataatttatgtgttcgtttgtcgttcgttgtcccatcctttccatccaattcttctttcttcacttttttcttttgtcagtgtctttttataatcggtgtttttttgtcgtttcttctaaaatggaaaagtaatttcagtttcttttgtgatgtgtgaaagtgtgcaaaaggataaaataaaacggaaaaggaatttaacgtcgacaggtcagaaggggatcgtttctttttgtatttcattttggcacgaaacacgaaattttattcacttgtaagtatggggggtgtgtgttctgatgagagaaaaattgttatttggagattgggagaaaatcaaaaattttattgaaaaaataattaagcattaacttttaatttatgtataaatatttggaaaattcaaaatttaattatttttaattttactacttaaaaatagtaaaatttgggttttctttgcttttaaaacccgggctaaaaattcaccattgttctttttaggtgaaaaaactgatcaattttggacaaatctgttaacaaattgtactcaaattttcaaaatttttcctcggcggcgactttcggcaccgccggtcctcctccacaaaagatttttaggaaaataatgcgtcaagaaagctgaaaaactcgttcgtagattatattttaattaaggaattttggagaacttacaaatttcaaagtaattaattgatttttaaaaagagtgaaaataattaatttgagtttttttttgattgattaaattttgagaatgcctcaaaaattttttaaatttttcagtaaaatttttttttcgtagttcatgtgtggttaaattcaataaaaattaaactacctaattattaaagaaaagtacgttgacaattgcacaacatcgatggctttccaagaaaatcagatacatttataaaagcgtagc

SEQ ID NO: 4699 - DNA, 3367 bp, Heterodera glycines
  unsure (1)..(3367): unsure at all n locations
attcattcattccattcatcaccaaatgcattttgcccgatcgccgttcncaccacncaagtgaaacccccttcttccccccccccgcttttctcattttctcactttcccccgccaatttgtctctcttcccatctccaaccaattttctccatttgttctctctcaagcaaacattttaattttaaacaacaacttattgttgcagagaaacacaatttttctctatctctctccctttctctctctctctctctctccaacactctcttttctttgtctctgtttcttttcattacgcctattatttgacttattttcatttcgagagtctcgcatcggctgtggtattaacttgaaaaagcaaaaactcacttcattaaaagaggaagtgccattgcctccccccccctcgccaaaatgccacaactcaattgcacagcttcggcaacgatcacttcctcagcacattcccgccatcacatcgatgtccccccagagccgaaggctaaacacgacaagcggaaaacatcaaacgggtaaatatatttaaataattttaaatttaaaaacaatttgacgctaaaggaaaaaaaggaattacccaacgggggaagggctctttcttatcacttaccaatttatcattgaatttcctccgttttttctccccccctttctttgaactttatttacaaaattggcttaatgagagcagaaatgtaataaaatgcatttttaaatggtttttaatttccattgtttttaagtgtgtgctatcaacagacgccgaccgacgaaacttttggcgcctcgcaattggaaaaattggcggaattacgcaaagaattgggtgatgagctgctccaagagaccacattgctaaatgacaatttgtcactaattcgttggctaacgggatggaacaacaaaattggtggctaattaatattaccaacgataagtcctactaattagtcaatgttatgatgccactttcaattacttttccaattaaaatggttcgcttttcgtttcgcagatgaaatcgtcccgcgtttccgtcgtgccgcttctgtgttccgctgtttgaacctcaaccaatttgtgattgaggacatcgacgatttgaacgacttctcgcggggtgtctcagccggctccgaatattaccccgggggcgtattgggctacgaccgcgagggaaacgtcgtgtcgctgcaatgcatgggactgtcccatccgaaacagttggccaaatgcgggcgcgtcagcgacgtgtatcggttgagcatttacgagaccacactgatttatcaggcaaagaattgacaaatgccaaaagaaagaatttggggggggggacgaaatggaaatggacgagaaaaacaaagaatgaaaatgatggcatggggtcaagtcgagaatttcagcttatcaaaatacaagagcggaaactcggtcgcaaactcggcctgaaagtgatcatcgacttggacggcttcaacaccgaccatttgagtacaatcgcattgaaagtgtacggaaatgtgctggtcacaatgcaggtaatgctcaccgaatttctttctcaaaacaggatttaaataaattaattgtgccctctttaaaggaattgtttcccgatttgttgcggcaaggtgaaaattcacaaaaaaactaattaattaagtaattattttatatttaagtgttcgtgatcaatgcacattatttggtgaaaacggcgtacaacagtaattaattaacaaattgaccaattagtcccctaattgccctcccccctcttctttttcagtcattaaacccgttctgtcggagcaaagtcgtgagaaggttgtcttcttgggcagtgatttccacggtgtgttggcacgcgacattgggcccgagaatttgttcatccgttggggagggacgcgaacgccgacgcgcgggcacaccgaaggagggacacttcggatgggaggagtgccaccggaaagtttaaggtggaaatggaaaagtgaagcgaagaaagagggggggggggagaaagagagaacgatgatcagagaaacaaaagagcgatcagtgaaaaaacgaaaaaaggggaagagaaaatgaaaacggaaattaaagaaaaaaagagaaggaagagagtggataagcctgtgacaagggaatcctgttcagatattgtgccaaaaacaatcccgatcacattgacgacgaagagctaatcaaattgaatgtgcccgccagacagagacgcgaagtggaggtggaagtgccggaaccgggcccacactccatccattggcttttccacacaaatggcgatttggccttcggcatccatcgaagtgacgaccaaatggaggtgggattggcaaaaacaacttttttcaaatggattatttattcattcaaaggtgtggccaactttccatttgctgacggattacgtgccggagtacggtaaagtgcgggtggagggcggagtacggtacaagctggtgttcgacaactccggtggcactttcttcagtcgagaagtgaaatacgggcttagagtgaagaaggttgaggagagtgaggaggaggagagagagcacggagcaaaagaagcagagaaaacgaacggagtgacagcacggggagaagagagacaaagcgtggccagagacaccgaggaagagaaagagaacacgatcagagatggagagggaaaagcgaaaaattaatgggaagacaagcagagacgacagcagcagattctttcccttccctaccgtaacccatcaacacacatacagtaactatttatacgcaaaattttatacagaaattaagccacttttacatgttgtgatatttgaatatcagtccgtgattggccgaataaagcttctctccgttttctcccttatgttttgccccctctccgtctcactcaccgtctcatggacaatccgccgcccttgccaaagtctttgccctccccgccacaaatccccccccccccgggggccattagtgtgaccactgctaatcgaccgacttggaagaggaaaagcgggagggactcacttcggattctttcgcggacgggcggcgccagcggtagaatttaacggacggagagagggggaggaggggggggggagaagagaggaggtgccatgccctggggggtgcctttgtgcctttgtctcggcacaaatgcaattgccttggaaaagttcgtcgcttttcaactcaaatgggcgaaaccctctcaattcggcccagggcgaaaagagagagcgaaggagggaaaatggcggagagtgaccgacccaaaacggacgaagaaagaaaggat

SEQ ID NO: 4700 - DNA, 3131 bp, Heterodera glycines
cagtttggggacgctgtccactcttgtgaaaaatgaaaatccaaaattccactaaattctgtattaaggcttttggtgtttgctcgatcttcgacttcacaatggacctatattatgaaaaatgtgtacgcagacggcactttcagtcggcgccacctttttcaggtaaatttatgtcctcgcaaagtaaaagcctaatttctttcatattttttttggtttttaaggcgaattaattggattttgattacgtactgccttctcacttcaagtgtgaagcattgaacacgtatgcctcaactgattgtcaaagatggccgaatttttcgcctgaaacttttcgttggacttcgaggtggtgatatcgccgatgcgagaattcttcgactcttacgggcatgccaatgtcaatgttaatcccgatatcatcagcgattttctcgttggtacattattcgaatttatgaaatgtgcccgtaatgatttttcaatgttttgttttttttattggaaatacattgataaatatgttttagtattaaattaaacatttttcgaaaaaaaaatcagattagaatccatatggcacaaaatcagcttgccagactaaaacgaccccctgactaaaacgtcacctcagactaaaccgacccctcccgacctttggcggtttttagaaacgacccagcacgagcaaaatatacaacgcaaatcgccaaaaaattaatcgcgtaaaaaaaacattttttattgcatttttgttaaatgccaaaatatttacaaaaataaaacttttatttttcctaaaaccccaaaaatatttttttttattgactaaaatgacttttaaatgaaaacatttaagcgcaggaatgcttttttgagctccttactttaatgcaattaggcaaaaaaatatttaaataaattacttctcagcactaatgattaattaagacagcaagtcgttaagtgacttaggtgttaattgacttagccgcagcagatgtctcagcggagaaaggtccaaattcaacccattcagaagacaaagtgacaacaaaaaaatgattctaattacctaatgttttttctgcctaaaaatccctacaacaagcaatatttgttagttgtctaaaatttacattcaaaatgtaaaatataatttacaatttttgcattttatttttgtgtataataaatgtgcaaatttattggaccttatgattgattattctctgcttctctctttattagcaataaatgtttgataattctttctctaaaaagatttttcttgaagaaatgctttatgaataaaaatgcaaaacatttaacgattaaccatgttttagcgtacataataattgttttatttaaaaaaaattattcacattttattattagcttttattattattattatattcacttttttttagaaatgcgaattttcatttgcttttccgcactttttctgtcaatctgcgcattttttggtgtgttcttttcattatttctgcttttgtagtaattaattaaacaaaattttagactttaagccaatctttgcgtatgatccgttggaattttttgattatctcatcgaatgcgatccaaaggccaaaatattgaccaaagtgcgaaatgatttttcagaaggggtcgaagtcagtcaaaacgatgcgaaagaattggcaaaatatttgagcagtgaaaagggaaataaaacatttggcgaagtgattttaagtgaggcgagtaaatacgacaagaaaagggagcaaatggacagcgaaagtgcacaaaatgccaaaacacccggaaaagcaactgaaaatgccaaaaaagaccaaaaggcacaagcaaagatgaagacggcacaaaaatcatcgcgtagaacaaacagattagaaacatccctgatgggatcaccgaaaagaattggaaatgccataaaggagcacgtgaaaaaatttttatcacaaggagacgacatttgggctttaatggtcaaagtgagtaaaatgtatgaacaatatgaagagatgtgcaaagaaatagcagaagaaacgattaagaatttaattaaacagcaaaaagttagggagaaatgctttagacaacacccactaattatgctaattgacctattcaaaccgcacttggaaattgcacatgatttgagcagcaaaattatgagaaaacgaacccaagtaataaataattaaaccatttaagagcaattagctaaaaattggtgagctgtttaattaagatgagaaagtcactgcaaattattgccaaaatattttcggaatattatgaagaagaatgggaaaagttgaagaatgaaattgccaacatcagattggaagaactgaaaatgctttcggaaaagatggacgaattcggaaagaaattttgggaagaaattcaaaaagccgaaaagagaaaggaatgaaacggaggaaaagaaagagagacaggcgaaagagaggaggaaaaaaagagagagaggcggaaagagaggaggaaaagaaagagagaaaggcgaaagagggaggaaaaaagagagagaggcggaaagagaggaggaaaagaaagagagacaggcggaaagagaggaggaaaagaaagagagataggcgaaagagaggaggaaaaaaagagagagaggcgggaagagaggaggaaaagaaagagagataggcgaaagagaggaggaaaaaagagagagaggcggaaagagaggaggaaaagaaagagagacaggcggaaagagaggaggaaaagaaagaaagataggcgaaagggaggaaaaaagagagagaggcggaaagagaggaggaaaagaaagagagaaaggcgaaagagggaggaaaagaaagagagaaaggcgaaagagggaggaaaagaaagagagaaaggcgaaagagggaggaaaagaaagagagataggcgaaagagaggaggaaaagaaagagagataggcgaaagaaaggaggaaaagtggcgaaagagaagaggaaaagcatgggaagataaagacaattttctgtctcactttccattcttccgatttcatgcaagcattttatactttttctattggttcttaaacttttgta

SEQ ID NO: 4701 - DNA, 3727 bp, Heterodera glycines
aatttcagggtgctttagtgggacacagtattttgtgtacaatttgtcaattgtttcgttcagtttcattgtcgttttcgaagagtgcctaatgtcccgtcgccgccgggtacgccttcgatttgttggatggccagcaagtggaccttttcattgcgccgccgtgcaccgacagtgcgcaagttgcacttttcgtgtccacattttacaacatcccttccatcacatggggccagaattcggactcctctttcaattaagaaaattgctaattaggccatttctcattagcacgtcgttcgtttagttcgcagagcaattaccccactttgctgagtgcgcttcccaattacgccgagtgagtcactcactccgttttcctcccttttcaattccgccgatggcattttactccttttgagctttggccaaattatcatttcgctgtgcatcttcttcaagtggtccgtcatggcactgatttatcagctcagcgagacgggtcaatgcgcgtcgttccagcaagacttgcagatcgcgatcaattccaacgacaaatgcgatatcagctacagagaggaagtcgactttttagtgggataaaagtgccaaaaatattgattgattaattaattaagacaagggataaaaagaaaaagataacacaaaactaagtgtcttaaggttaagatcagttctgcgggcaccagcgacgcccaatacaccataagtcaaattcagagcagggcgagaagtgagcaaatggggggggggggggggcaaaaggacaaaatgaatgaaaaatggaatgtttaatgagcaattaaaattatttataaaattaaaaccaatttttcttctgctgcagtcgtcattctttgcttcgacgagtttgttcagctgcgcaactttgccgccaaacttcaggagggtggcttggactccgctgactacggtatttggctttgctttgcttgcctttttatacccctccacttttcccattcatttttcgttttgctttcagtttatctcatccccggactcaccatggatgatagtattgaaagtgttaattgtgtcttttataaaatttaaatttgcgtttgctttttctctgtttttaatttactttttgttttgggtggctccaaggccaccgcgtggtgggtcgacccgaacccgaccatccaatcagcggcctacagaattgctcagcgcagtctttatctgatgttggacatcttcaacaaaggtttgtatgctgtaatgggatgagatacggtagattgtttttgccatttttgcgaatggatgcgctgcaccttaatgagtcttttgtagtcgcaacttcaggtcaagtgggcaacggcacttcgtttgatcaggaagtgatcagacaggtcacccaatggcccttcttctgtaccgattgcgatcagtcgttgcaggtggcattcatcttcatgctaattagttaattaattaatccgctctctccccttcattaggcttcttcttacgcccctttgctccacgacagtttctatttgtatgccatggccctttccaaagcggcaaaaattgccggcgcattgtcaccttccgtttaccgaaatggccaattgattcgctcccaaaccgccaatttgtcttttgaaggtgaccaataatttttaaacgaattaaattaacaaataatattaaaggaatgacggggtcaaacaaatttggatctgatggacttcgtaatttcatttaccttgtctccatgtattcgagcttgaacggtgacttgacttcgtatgtgtggctccaaatgaacgatgccggagtggtacaaacggatgcttagaaaatattttactgaccaattaccgtaaagaattcttcatggattaatgccacggccgagaagctgatttggtcgagccgaaacggcgttaagccattggccgtgccgttgtgcggatttgacggcaacggctgtcacatggacttcttcacggagtaccgtgggtatgtgatcgctgccggctgtctgttgctgctcattttgggctcgttcgccttcggcatttactggctgttccaatccaaggcgcgcgagatggaacggcaaaatcgcctctggcaaatcgcctacagtactctgacgccggcgggcaccaaagcatggcaaaaaaggaccaatttgatatgatggagggaaattaagaagaaaatgatggaaagtgtgcgctctctccagtcgagcacttcttctcagttcacgcgcgactcctcccattcccacgtttccatcaaacacaacttcaatggcatcgtgtacattatgaacggcgagcgggtgatcggcattcagcattcgggtgaccattttgtgccgaaagcggatcatttttgaaaatttaattgttcactttttaagttggcattcgactcagtccacaggacatggccgagctgagaactgtgcgtgcacaaatataattgaaatttcgcgtgttggtctcagatgcgccttttggatggagacaatgtgaaccgattcatcggcctttccatcgatggcgccgcgcttctctccctgtggcgctactgctcgcgtggccccctttcggtccttttttggcactttttcttgacatattgtcaaaatgttttctaatgctaatgacttcttttccaatttggaaattcctcacaattccttttcattttgcaggacgtgatctcgggctcttcctctctgaccatggacggcttcttcatttattcgttggtccgcgacgttgccgaaggattgcgcttccttcacgcgtcctcaattggtcggaaataaaattgatcattttgctggtgataaaactcgaatcaactctctctaggatggcatggcaatttgcgttccaccaactgtttgatcgacgaccgttggcaaataaaactgtccgagtttggtctccgcttctttcgtgcacacgaaaaacgggaggcaaaaggtcctatcaataagctgtaaaatatttgtgaacttcgatattgaacactggggaattcatcctcgagaacaacatcattagcataattggggccatttgtgatattcgttcgcagatttggtttggacagcgccagaattgctgcgcgataatgacatcgttggcaacaaatttggcgatgtttacagcttttccattgtttcttccgaagtaaaacgttcttttaaatgattgttttcttttgctttctccatttttgattgtgaatatgaagccaatttgggagcaggacgaagcgaagggaaatgttgaaggtaaaagcaaaataaatcaaaataaattgaaatgttttattaaagagtttgtgtatatggtccgaaccggggggaagagggcatttcgtcccaaattggagccgagcagccaggacttgtccccggcactgctgcatctgatcaaggactgctgggacgaaagccctgcagaacggccaaaaatggagacggtgaccgcacttttgcagtcaatgaacacgggaaggtgccgaaatgaacaaataatgccaaaaaacaattaataaagataaatgagcaatcagtgtgaatgaacttttggcaaatgccgtttttctgctgacatggaatggcaaataacacaaaaagcgttattaagcatttagtgcctttttcttttttttacttttttggagtttacgcatttta

SEQ ID NO: 4702 - DNA, 2570 bp, Heterodera glycines
ttaccgtattcttctcggtcggtttaattaaatactgtcattcattctttttaattattttattttaaggacgtcgtctcattcacaacaatcgcttcaaaatgctcacctttgcaggctaaaatttgaattcacataaacaaattaaaacggtttaaaggtggtcaatttgctgaacaatctgtacactctgttggactcaatcatcgccgaatttgacgtgtacaaagttgagacaattggtatactgtagggctcttttctgtatttgtattattcttgaatggtgtaaaaatcatctatttgcatgaattaattacaataattaaccatcccaaattggccaccattttccaggcgatggttatttgtgcgtgtcgggccttccccaccgcaatgggcatgaacacgcgcaacacatcgccaaaatgtcgttggcattcatgcgcaacttgggcagcttcaccattccccacttgcccactgaacggcttcgtctccgcattggcattcacaccggctccaccgtggcgggcgttgtcggtcagttcaatccattgaaattgaccttttctcgtttaaatgcttaatgataattggataggtctttccatgccccgttattgtctgttcggcgacacaattaacacagcggcacggctggaaagcagctcaaagcgtaattgggcattttgtttttaagcacctttttcatgctttaagcgatgcgaattcacatttccacgacgacgaatcactttttggtcaatgttctcggaggttttgtcacccaagcgcgtggagaaattttagtgaaggcaatgcttttcccttgccttttataattttcagggatccatctcccctcgaatatttattgtttgggttattactctttatagtacactaccgtaaattgtccccccccccccgctttagggaaagggcgttctcgaaaccttttggttgcttggcctcgaaggcgacccggcggtgatgcgaatgttgcacagttcggacggtaataatgcgacgatggaatgaacaaaaacaaattggaaagaaattgaacacaaaaggagcagaaaaaccaaaagaatgaatgaatgaatgatttgtcatttgtaaaaattaaaatgtcggataaaaaaaaatcgaaaggaaccaattaattaacaaatgaagtaattaattaacacagagagagatagagagagatcaacgctaattaaggcgtctttcttccaccgattggtttatctctccgattccaattaaaagcctttcctcttccgctgaaatttatttaaaaattgaacttccgaatcattttttaaaatgccttcccattttaattaacaactgaaaaattttcaacaaaaatctcttttcacaatatgcgctcttacagtactcacctccattttgtacggtcgctccacaaattgttttttgtcgttttccaacaatttcttcagttttctcattttggccttcactttgtcgctttttcccgtgtttttctccaattctttgattgctttttccatttcttccgccgttttacaaattttctctttttttggcgtgtccattgtcagcacaatttccatcgctttgcttccaatttctttgattttgtccactcttttctccaatttttcactcaattcctctgagttttctttgtcgtcaattaggctaatgagtttgctaatttcgggttccaaccgtttaatcagttcttccatttgttcgcctgcgattttcttcaacggttttatcaattcatttgctaaccgaaacaattcttccgctttttgcagatagtccttctgtaatatattacgtggatttatttcctaattgtgcttattatgctttaccataatttggtccgattcatttgcccaatatgaatttgtttgccccgcctggcttaattcggcatggaaatcgggcataaatatggccaattcgatgtctccaattttggcattttcaaacatttcccttttggtgggcaattctttggccaaaatgcttaattttgtgtccattatgcgattttgcaaaatctgcttgatccttatccccttatccccgtcttttccctttttcacggcttccaattcttttgttgccatttccaaatatttcacctcacaaaatgtttcatttttctttataaattcgatgagattgcccaatgtttgctcaatttcatttttatttttcacggacatttgatcaaccaaatgcgcctcaacttcaaccaccaaagtgccaaattgccttccaaactcattaatgattgcccgcatggacgacagcaattcggcattactaaagacgggaaaaggtcaaatttggcatcgctttccgccggcgttaggccgtggaaaattttaacgcagaaatcctacaaaataagaatgccaacattaggaaaaaagaacaaactatgccagtttttgatttattccttttttgtgtcttaaacgaggatgggtccagcagaagaattacgttaagttttatacgttaataagcccctttaactgaactgt

SEQ ID NO: 4703 - DNA, 2382 bp, Heterodera glycines
tttttcatgttccccgttggctatgctttcgcttctttctttgatcttctcgacctccctttccaacttcaccccgtctcagtgttttctcatcctctttttacaaatcgtgcgaattattctgtcgaagtgccggaaaaggaagcatcggataaagcggaaaaactgaagcaattgcaaaggaatggcaaaatttgtgccgtcgaagaaacaaacggaaaaggcgaccgttgtggggaaaaacagcaaaactttgtcgacccacttaacgcatcggcaattgacgaaaggacaaacgaacactcagcaaatgcaaaaacggtcgaattaccaaacaatcgaaaagcattttaaaacaaaatataaaatattatttcttttgaaaaatgggatattttcagtcaccaatcgacctataattgtgtctgttttagcttccatctgtgccacatcagaatggggtctcatccgacggttttggccctggtcaaatggctattttagccaccgaacgtcttgacaacactttggctgagcgtgagtccgagcaatggccgttggaggggttggacccccaattggtgggccatcggccgtggagagtgttgcgccagcgcattttggacacattttcaagtgcaacggacagactttcattggagagcagttttttgaggggaaacgaaccgacggaaacgccaaattcggaggagaggcgaaagttacgaaagacaaccagcggagaagcggaaaagatgagacaaaggtgaaaatcatcggcaaaaaagcaaaattataatttaaaattcagaaaaaactttgccattgaaaaacacgtgcaaacggtcgcaaaattccacgaacttacgcaggacgaatggacgcgcaaattgaaggaattgaggcgcattttgctaattaaatgggaagaggaaaagcgattggaatgcataaaggtaattgagaaagaattccatttattcaatggggtttaaacaaattcctaacattttctcattatatcagctgacttctgaagtggcaatgctaatttccaccaatatttcgtctgcccaattttatccctcccaatttgtccatgtcaccgactttttggatctttttggccatttggtgtacaaaaggtgataatataatgatggaaaattattattttagcaaataaacttcatttcgttccgattttcttcagacttttgctccgagcggcggaggaacgccgcggggttggacttggcgcattgccttctcatttcgacactaacgacgttttggaggagacgcggatcaaagcgcgcaattggtttggcaaagtgaacgaaaccgtcgctttgctggcgccacgcatttatcgtaagcggaaaacagcggcaaaaaatgtgatttatttcccgaaaagttttgaccgctttgctgccgtgccaacgtttcatggaccctttggctgccattcaggaaaatgttttggaactgtgccaatccgtcaaacaggcaaatggcacatgtccaagcaatcaaaattaacaatttgaggtgcaacatccgctcatctcctcctatctccgctgttacatttgtcgcattgcgatgcgactgaatgccgccgatagggcgccccattggaaatgtctgaacgattggctccaaacctacgctcaacaaccggtaaacccggtgacccatcaaagactcaatgcgttttcttccgacctttttgcttggccccgccatggaatgggtcgtccaatgcgtcgcgttcaacgccgtcttctactcggatttgcacccgttgtgggagtattgccgtttgcccgaacggcgtgccgttgtgctgctgccaatgctcaacgcattgccccgcctttatttgggtgaacacgcattggaggcttgcagaattgtaatgacaaattgacaaaacgaaaccagcacccgtcctttaggtcaccggttcagagatggtttcgggtgagcatttaatttaaaaagcgcatgctttattccccttccccctctgatttcgcttccctttgggtgaggagctgtgtgcgttcggtgccaatttgctggagacggaagtgcccgtgcacagtcgcaagtccattttgaaggcggtgtggaagtgcgtgatgcgtttggcctctctgaagcattacatggattgttgcgagtgttgggttgagtttgcggcacggcacttcggcatcaacgaagtcaatgtgatgctggacaatatgctgaccaaactgaaccagcagcaacagcagaaggacaaagtcagtcggccgacagccaaaaaatggctaaaaggcggagaaaggccgactaaactcaccgagctttgctttagtacatcttcta

SEQ ID NO: 4704 - DNA, 3424 bp, Heterodera glycines
tttctttcagtgaatttgctggggttgccctaattctcttaggtttttcatttcgggtcgattccttcgtcgccttctttttggacactttcgacggactttccctctcaaccactcttttcactcacattttgcaactcggcactgatttcttggccactttggtgcatattccgctcgaacaacaacatcaaagtgaggaggaggacgaagagaccgacgaaagtcggcgattgccattgaaacacttccgccgctttttgcacttcgtcctcagcttttggcacagtgtctcgccgtcgttcgccccctcccctccactctctcatcactctctcaatcttcccctttcgactcaatttgactttgtccgtctgcttgtccgttgtctccaatatttgtgcatcatttggccaactgtccatcgcactttccttccctctgccgccgatcagtcgccgctgattgaagacgaagagattgtgcagcaattgatggagcagcaacagaaccaactgcaacttgacgaagacaaggccgagcaaagccaattcaatgtcacacttttacggaacgtttgcactcaatgcgcggaaaaaattgcggacgctctgaagccctttttggtgaacgaaaacgcatcgggtgaatttaaaaaataggaaatgtgcggaaacttcttggaatttgtgaaattgcagatgagatgggtttggctggtgttgaactgcttgaactcctcgcccaattcggtccagccgatgtcgaggaaggaaacggagacgcttctgctgttgtccttccgggcgttctcctcacattggccaaaacaatttacaaacagtgcaaacggaagccggaattgagaaggcgaatccaacgaatggccaaacgataaaacgatgctaatcactgaactttcgcttattttcatctcatcggcgcttggattgtttcgatttttctcctcccaaaatttttgcggtgtttaatttcttaaattcctttcggatttacttcaaactttccatttgatatgggtttgcctttgtttcattgcgttttcttggccatacatatccttaattattgcgcttttcaaaatttgttaaattattcgcttgttttcctctgtgattttatgtattttcaaatttaaatgttaaataaaattatttcactttgaatgattttttgatggaagggttagccaaaaagagagtgaatgaactgataatgtttttctttttttcaatttgttcattccgaaggcttcaatcaaatggccattctcagtttcgatgccctccgggcgattgacagtttctcccatttttgatatggccaatctgtagaatctgtctgtcatcatttgcttctttctccgttataaaagggaaagcgaaatggcacttttttaatctgttcgagaacaaataaaattagatttgtgataaaattacagtaaacttttttaactcccacaattagaatttaattgtctgatttcttcccagcagaaagtaacggaacttcgaggcaatccgtcccattggctacggtgttatttccttttgtgccgctttccccctaaagcgttgtcccaagagtgccgttctccacccaaatgcgtctgcttctctttctgacggtgttcgttttgtgtggccattcgtccgaatacgatgacaaattcgatgatgaaaacattttgtggtccgaccaaagagtcgatgcatttgacaagcgcaacacaaagcccatcaaaagcttccagcccggctttgtgtttcaatttcgctacgactctcagatcacttctggtcagtttaactttctctttgcttctttctttctttctttctgtcagtttcgttatttgcttttcgtgccttgccccactaattggctaattagcccctttccccttccccaggctatgccccgtgggtgtccgtccagcgggcgatgggccgtttccaggctttggtcagcttcgaaatggttcagccaggcgaagcgaagatgcagctgagcgagtgtttggtcggccatttgaatggccatcctccaagtgacgtggcatggaacccggcacatttactgcccgtcggcgagttcgagtccgtcacgcaattcagccaagtccatctcgagcggcccatccgcttcaccttttcccgggagggcgtccacaacgttttctttgagccaatggaacccccgtggtccaggaacctaaaaaaggtgagcaaaaatgaagctgatcactgatcacaaaagccgatcagaaatgaattctttgtgaaggctattctgagcactgcccaattccgtacggagaaggaggaggaggggaaagagaaagaggaggacaaagagaaaatgcgactacaacaaaagccgagcgaatgggaaaaggaagaggaggagaaacggcgtatggaatggcaatggaagcggagttacacagtgcacgaagtgcgtccttctgtggaacccaaattagtttgaaaaagccaaaagagcaattcagacgagcattgaaggcacctgtgatgccgattataccgtggtgccgttgtcccacgagcagatcagcgtcacgaagtcgatcaattacgaacggtgcactcggctggcagacatcgtttatgggatgcaagcggacgaggaggccaaacagcgtggggagcagcggcagaagtggaacaaagcgcaaaagcgggaggaggaggagccaacggacgcgtcgggggcgagtccgatgatcggtgagcgaagcggcaccatttttgaacgttaattgggcgcttttccaatttttagcccgccgttttttggatcggtccaccaccgtccgctttttgttctctgctaatgcgcagaacagcagcaacagtttggggttggacctcaattggccatttgcccattctgtggagatggtgtcccaatacgcactgaaagggtcggaggcggaacaaagccaagcgatgcaaacggtggcagtggcgaagataaagcacattgggacgaagctgaagcagaacaacaagctgagacagcacggggaggagggggagggagaaaagttggggatggacaaggaacagctgatgtacaacggagagatggagcagcaagtgagagacagacgagagagagagggaaagggataaagaagggaaggaacagagacaggggcgtacagacaaagagagacaatgtgagaagagagaaagacagagagcgataatgaaagcgtagggaatgagtgatgccaattatgcccatttgctctccaaccggaaaaggtctcggctttcaggagaagtgcttcttcatgttcggtgacgaacagtcggagactttgcgttgctaccgacgggcaaaagccttcacaaatgacgaattgcgtggt

SEQ ID NO: 4705 - DNA, 1586 bp, Heterodera glycines
cagcagggcctttgctgctcaactctttcggtctgtcattttcagtttcggtgccatcgttggcgaattaatgcaattgaagcgccttctgcgcatttcaccggttggcactccgttgggcgaaaaggtgagaaattaaggacaatcggttgacggtatctgctgaatggaccaaaccggaacagattgagcagtgtccggaccacaaaatggagctgtacacgaaggctctgttggaacagttcacttccattgctgacgataaccttgtggagaaaacaattgctctgaaagtgggccaaaatgccacccacttgaaattcgagacaatttttctgaaatttgaaggccattggaaatgccgcattagacgaagtgccaaaactgttggtcgatttgattaatccaaatgggacggaagaaccgaaagcggaggaccaaaaaagggccatgggcgaaatcttacggcaaaacgcaatcgaagcattgcgacgcattccctcccaaagtgtgcaccaactgttgctgccagtgttcaccaaccgacaggagtggcctcaggcaatgaatgctacggcaaattagaattgggcccctggcatcaattaaagacatttaaaatccgaactttcgcttattggaccctaaaatggctgaacattcatccaaatccatttctgttcattaaaatgctcctttttttgatctttcagacgcgcatttccgcgcttgacgttctgatgcaatcgcaactttcgccttcaaactccgtcattgaccaaattgcctttgcgatggcaaaagagaactgctcgcaattgttagcttatgctcactcaatgctaaaggcactttcccaatcgccggcaaaaaaacaccaaaaaatgtaataattaggggaaaggcaaattttaattgcttttaattgattggacagtgcccaacggatcaaagaagcactgcttatggcgggagtggacactttggaattggagcagcgaatccgacgcaatgacattgtcgggatcagccgcttctcccagacaaacgcacttttcagcgaggaagaggggcagggcattttgttgcaggcgtcgagagtgagttggggattggcagtgattgcatgttaattagtgtctgatcagtgctaattcaatccatttggaggggggggggggtgacttcattttgtattactttaaaaaaattgtaaggtattcaccgacaaaacaagcgcattgccaaatcatgcatttgtgtcgctgtcctcccttttcaatggcgaaatgtccgaggaaaatttgaaaatgacaataagccaacggaacatcgaacgccttttcaccgaagcgggaatcatcgaattgttgcggaatgagcaggaaacggaggaacaaagcaatgccaacgagcagaaaaaagtgggaattagagggggaaaagatagtagcatttgcaaggaaaagggataaggacatttggaaggacaaagccaagggcaaagggcatttaaggaccggcaaggacaggaaaaagggcagcagcagaacaggcactcagcagaagccattctccactgatga

SEQ ID NO: 4706 - DNA, 1167 bp, Heterodera glycines
gggcagcagctgcacattcagcagaagtcgttcgcatttggcacaataaaagcgaaggcgcaaagacttggcctttcacaaattggccttcagttgcacccttcggcaacatttggccgcattcaaaagatgaaagtgtgtctgcctttgccttccctctcccttttgaccccccccccccttcgctcccccaaaggcttgggcctcacccgtccattctttgggcgtcaaacacattggcgccatcgaggcgaacttgccattgtacgcacaactgaacacactatcccagcagaagcaagtcacactgaatgtgcaagtgccgaaaacaccggtgagtcgtcactctctaaaatgcccatttaaacgcgtttctttggcatttgtgtctccttttggcattccccccatttagacacgtctcttctctttgcacactttgccaatgactttcgttggcacagagaatgttcaaaatgctcgtcctcagcagcggtcagcttttcttcatttcggcgagcagtgcaaagccgtgcagaatcagcagctgctctccatggccatggcattcgacaaacactccgacacggaacagtccctcctccaactccctttccatgtcagaggcattctgcacagaccgcgacgaatggacaaactgaaggaatgggtcaaggtggaacttgcattttgggaggttatcattggccagttaatcgttaaaaatttgcatgccaatgtttaaatgtgaggggacggcacttttgaaaggcttcccattaattagcccattactctcccgtaatgacattgttaagttaagattgtttaggtgcttctctcgacagaaaatcacttccaactgtctctcgtgtcaacatcaagcctttccccgcacgaaatcgctttttccatcggctgggatttgtcccgcccccaaccgaccattagcgaggctttatcccatatcggattcaaagaatggccaaaggcattcacttctaccgcttcggacattgagcggaaagacaatgaaaacgaagagactgaagaggacgacggacagtgggggactgaagcgacggcggcgagcagttcagaggaggaaaaaacgacacaaagaacgaagaaccgacaaatcggagaatatctcaaaaaatgggagcg

SEQ ID NO: 4707 - DNA, 1347 bp, Heterodera glycines
  unsure (1)..(1347): unsure at all n locations
tcattttgtcgaaagaatggagaggacagtgagaagtccgaccgnaaagatgnggagaaaggaaaggaccgaccgcgggcagaaactttggccacgctgagcatcgatccgctgacccaccgccatttggacgcgtccgtccgcacctccgctcagctgacctttttccgcatggtcccagtcgcctctccgcttcgtccgtttccgctcgtccgtccctctcataggcctttctcccgcgcttcgtccgcttctcttccccaattcttccataacatcgcccatccgttgcgttcccgcgctgtctgtcgcgtggattccccggctcgccaactccgaactttcgacggggctcagttggacgtgcacttttccccctgttggactgtgctggccaaagattgttcggccgagggacgcgcgcaatttgcggtgctggtcaaagcgaaagcgaacagtgaacaaatggtgaaaataaagtcaaaagggaattggggagcatttgaaagaagccgacttttagaaactcaaaatgataagccacgaaattggcattttggtggtcgaaccgcacgcgcaacagcccgactcaaaactccaagtgcaaatcagcgggaaagaccaacagaaaaggacagttttgtcggatacggtagtgtgtaacatatacaagtacaatcaaccatttttctgacccttttagcctttgtcggacattccgaatggcatacaatttgatcggtcattacccaccaaaaaggaggctttaatcgtcgaatggaccacgtcaaatgctaactctgagggttctgtcggtgccaccggcgcaatttcagtgcattttgacggccaaaaagtacaaattttactcgacggtcagcagaatcgtcatcattcgtgtggtagtaactttgtttaattaattaattaattaattattattattattaatccaaccaattactttaaggactgtgcggagattggaatggaaatgccggggacgaatttcgaatgccaaacggaggacagacggaaaatgccaaagagtttcaccaagcctattcgctggtggacggagagggggaggaggacggagaatgcgaagacagcgcaattttggacaaattccattcagaaaagacggaggaaaacgaaacgaatgagccgaaacagcagaaggacagcgaggaaaagccgaaaatggagcaaatcggtgaggaaaagcaacgaaaaacaaagcgaaagaccgaaaaaagccgcattttatagcagccgtacggaagaccatcgtgattgagcatccgaatgagttgtgcttttcggtgcatccgacgaaacaatgtc

SEQ ID NO: 4708 - DNA, 3906 bp, Heterodera glycines
tgcctttgtacgagttgcctttgtacgagttgcctttgtaccggttgccattgaccccatttcatacagggtgttccaaaagtctttgcacaacttttaattcgttataacttttttcgactataaccacatgaagtagctttatactcattttgaagctctttgtgttctctataaagtccaatagaaattattccaaaatttctaggttaagataatgaaaaaaattattaaaaatattcactcattttttggcccaaaaatgcatgctttttttgacaaggcaaaaattctggtttttttttattcgttataaaattcctaaaagttttatattatttgaaagcactaagtctttaaatatattttatagaataagtttttaaatttgatcaattttaagaaaaatatgacctaaaatgtctgaacagtgggtgcggcgcgctgggtaaaaattttttctctcataaattattcaaggccaaaccgattcttttgagtgtttacagattattaacctttctggtagatatttaaaaaacttaaaagttctaagttttattagttctaagaaaagttatgcccgaaaacagttctgctggaaccgaaatttgagatttggcacctttgcgcgaatgatcatattctttgagtttgatatgtaaaattattcttttaatgctattttgaagataaggggttgcactaattcttagaaaaaaagtggacccttccgataagatcttagccatataatataaaaaatacccaaaaaaagctgcggcaaaatgccgaaaatttttccaagcgtttgcgtctctgaatcaaagctaaaggcgggcacattaaaaacattcgatttttatcattcgctaatatgttctcttttagattttttttttgttttatttctctatgtctgttgtgaataaagttatgagtaaatatctgtgtgcaatgacttttggaacaataaaataaaaaacaaatgcgggaatgcggactgggatcccactgaaaatacagcgtgggacttcggcctgcgccggtctctacaaaaaatttttttttaaaacttcaaaggttttaagctttttctcaccgagtacacgttggccggatcgaaaaccatcattttgttggccgtatcttggctggccagtcgagttcggacaccaaccggcacaccaccgcccagcgggcccaagccatctgcatagtcggaactgtgcgaagacgtactactgcctgaattgtaaaatgccatttgttccatttttaagtctgatacggtggtgataccgtatgaaaataaaatttaaacagaaatcactccaaaataaaaaaaatatattaacacagtgagaaaaaaggggaaaaattttatcatcaataattacttccattttcctcgcataaaaagaagatgcattcttttcatataatgattttgtttagaattctgccaaatcttatataattagtatcattcgatagcatgaaatgattagttttttagcaagcaaaatttcaaatttggacaaaatacaaagaacttgtggcgccaaaaaattctagaaaagcgagaatttttaatttttcaggccttaatacggttgccaaatttttaaaatttttctgtctaataaaaaaaaataggtctatcaaaataccaaaaaatataagtttagtttgcttctgaaaaaaaaagttattataatttttgtcgaaatttttttaagtaacagaaaataaaaacaaaaggtgctttctccatctgaagtattttttgggactattagcttgacccctgaatattattttacacatgcctgatgatgtatgacgtgccagctcgctgagcattcgccatctcgaaattcgccagccaacctataaaaaaaaatgattattttaattattcgtttttaagaaaaaaagaaatatattttttaaatttgttaccaaaaagccgaatagcgtgccaaccaaaacgacaagtgccaacaccgacaatccaccggctgttgaataaacggaatcaattccgctgtacaagggatgatcagcagcaccgccgcttgggtcatcattaattgcatttgaatagccttaaaaataaaaaaaaaacaaataagccaaactttttattcattgtttcaaatacgccaaatatttgtttcaataaaattaatttttttcataaattgaacaaaaaaatatttgtttttttgaagttatcaacaactttataaaaatttttattttatatatttaaaaaaattgcaaatatattttaaaacgttagaaaaaattaattctttccataaaaatttttggaatttggtaaaaaaaatatttaaaatttcaaattttctattgtaaatatttgaattttattttatttttcaaacaaaattaaaaacatatatatataaaaaataattctttctatataaaaatagttggatcttttaaaataaaatatttttaaatttttcaaatttatttttgtaaatattttaagattttgtatttttttcgcattctatttttattaccaattttttatatgcatttttacacaaatttgaaaattttgcaattaaaatatttaaatttgccatttttgcacggcactttcgtatcccatcagtggattcggatgctcttaacaataatcacacaccaattggctgaaccgcgacgccgccaccgtttgccgcgtcccatccgccaaatgagtccgatgccgagtcctcgtcaattatatacgccgcaccgccctcagcgccaagcagtttggccgatcccgggcactgctcggaaacgccgaacagaacattttgcacataagaaccactggtccagtcccttaatttacccatcattaggcaaaaaacaagtttttaaattgggtttagaacggaatatttttcgtttacatctatagtaaaagcgtgttaaaaaaataaaaaaattttcaaagattaatttatttttgtcggaaatattatttaaacatttttttacttagtttaattttaacaaaaacgaaaaaaatttgataatttgaatattttttgaaaaattaatttattatgtgagatttatcgtatagaatattttaaaataatatagattatcattttttaaatttattaaaacaaaatttaatgtttttgctccgtcaaaatcattttttaatgtcaataaataatgtgtcgtcaccttttgctgacacatcgtcgtatttcaatatcccatgcgcaatgctaaataaaaaaataaataaatgtaataataaataaataaaaatatgtaaaatcgtgccggatcacgcagtgccacacatcgcgcacagttgtccggcagtgcacagtgctgaagtgggacgcgcgcaaattgcacaagcgttgtgaccgcaagcgcgggcggttcagcaccatcaatcacacgaataccgacaatgccggcggcatggtgatggctggtgccgctgttggccgggactgaattgtcggcaaacactcggaccgattcgacgagtacggcactgccattcaacgaagtttcgaccagctggtcaaaacaattaattttatatatttaaattaagaaattgtgaagttgtaccaactaattcaacccttctactggaaaatggaaaaaaaataaattttatgaacttctgaaatatggaaaaatatgcaaatttatattataataaaaattcgtcaacattttaaaaatacgcaaatagaaaaatttactgaggccacaattctcaatttttttaccccctagcttgaaaaatacctaatccttattatgtaaatgaaatatttctgttttacttttaaaacggttccgtctctctttccaacaaagatcacattgtactgc

SEQ ID NO: 4709 - DNA, 4372 bp, Heterodera glycines
  unsure (1)..(4372): unsure at all n locations
ggactaaaaaagcccgaaatatggactaaaaagccctcctatggccaaatatggaccaaaatatggactaaaaactgccaaaatatatcttttaaaccataaaaaattcagaaaaatgtatttatattcagtatttgccaaaacagacttaaaaatacgctaaaaactgccaaaaaatggttttaaatttaaaaataccaattttcttaaattctagcttcacaattgcaagtcaaatacaacccaaaatttttgtaataacctcattctgtttcagcgaaaatttttggaagtggacaaaatacctaaaaaaatttccgaaatttcgaaaaatgctctttttatgagtgtattttttaaaaatttccaaaaaaatctatctttaggggtgtatttttcgcttttttgcatttttcttgtgaaaatttgccgaaaaatggccgaaatatggactaaaaaggcaaaaatggcgaaatatggatttattcccgaaaaccccaaaaatatggatttatatggactaaaaactttcacaaaaccaaaaaattttaacgtagaaatgctatttttgagcccctttcttcgtagcatatgcgcaggaaaaatatgttaatccatataatttataaccctagtaataataaataacaaaatatattttatgaatatataaaaaaaatttacaaattaggccttcttattccgtttattaatcttttatggatatctttttactagaaaatacaaaaaactttttaattttaaaaaagaaaaaattaattaaattggtaaaaagtatttgaatcctttttatgcgtgctgggttcgtttcacaaaaatgccaataagctatggtaaaagatcttttagttagatcaaatcattttttgaacatattagtcataactatttgaaactgaataaattttctgaaattttcatgctaatagagcaatccaagagagctgcgtatgataccaagagcatttaatttggttgtttttctcgaaaaatctataaaatttgcagtttttgcgacccgacttagcaccctttttatgtgcaagtcatttaaaacatttacatatttaaaatataaaattgaccaattaaagacattaaaaataataaaaaccaaaatttgactctcttttttaataaaaattgaatatataaataatagttttacgaatttcgttgaaataaaatggggacgtgtcgcccgggatggagcagttcaggcgcgctttcaagaagcttgaccagcggtcctgtgctggcgatggaccgcccgggtcatccgcgcacacgcgtcccacacgcgcgtaaaattgcgtctcgcggttattgtcttgcgcgtctgcggcccgctctcgataccaaaagtacacataggcgcggtagacgaacgagcccacaaaatggggatctgatgatgataaaattgattaatataacctgtatgttaatatgtatgtattttattccattaaacatggattttttcaaattattttaatttaagaataggcgtataattgctataaaattctggcacataaaaattataaaaccaataataaaagaaataataaaacaaaattgaaaattaaaaaaatttttttcagaatgcaaaaaaaaagataaataaaaaaattcagaaagaattgttatgaaaaaaaacttaaatatttttttaattgaaaaacgcacgaaaattaatgataattatcagcaatcatatccctgatgtaattcaagaaatataggggtacagtatttgcgtaaaacataattgtttttaagtataattagtaaattaattattttattaattagtctattaatcaaatgaccatctagcactcgatcgtccttctgggttcgcattgtttccccattagacaattttcgtcgataaatcaacgggtcggtggcactaaaatcggagatggcaccgataaaaatggcgttcaattcattggaataggcgaatgtggcattttgtcgtggatcatacggtgaaattcccttaataaatgtatttaaaaccagagatgtttaaaataaattataatattcatttaattttaaggttttaaattaaattacaaataattatttaaattataagttgtgaaaattaatatagtaagtaaattaattttaatcaaaaattataatattttaattagaaattggtaataaaataaattaataatattaatttatatttgaagatgttaaaataagttattgaaattttatcattatttgatataaattaaatttgatgtaaaatatttaatattaataaaaaaattttccataaaattttttaaattaattaaaaattattggttctaaagcccacttgtccattgaattgggacctttccacaaaacgactctcagattggctgaattcatattggcgacattgtggcgaaaaggcatgtgttccacagaccaacacttggccatttgcaagttgaatggccactctacaaaaaaaaataaataaaatttttaggttaattcgaaaaattttaaattatttattttaaatttaaatttaaaataaaatgcttgcctgataaagttacgacattctgtcttaaaaataaacaaaattatttattttttagtataaaatggcatttttacttccgatttgcctttcatatggcattcctcaatggtctgtcccggtgctttccagtgaatactctacaaaaatgataattgcccattgattaattaaagtaatcaagaaaattaattaatgaaaatgattactgtaagttgagaattaaaaataattaactaattataatgactgtcaattgataacttaaaagtaattaactaattaataataattacatttctggattccaaattggagtagctcaaattgaataatgcatctcttagaagtaaaaaacaattattatttaaatgttcattacaattatttcttctaccttgctccgatcagaatgaaatttttggttgcatcgatcaacaaaaattggtcttgacttttgcttgggctgtgaaagcgtggagtgctcccaactgaatattcaaaaaataaataattattattggaataatttaaataaattaattatttttaaattactattttagaaaattaagataattatttcaagcaaatttaatttattttttaattatttagaaaattaagaaaattattacttaacagaattattacaaactttattaatgcaaaagtttaatgatttaaaagtaatttttatttattattatataaattaatttaattaataaaaataaataaatctcattttttggagttaatataaacttttgatcaccttcattgacaatttgtcgaggtctcggatttaaattatcaacagcaaccaattgggcatggaaagatgagatcataaacagcaaaaacatttgttggaagaggtggttggcaaaaagcattggcattctatctctgattttgttatgagcttggctttgcgttgtcaatccttttaaaaggcaaacaattagctcactaattaattaattataccattcaaaaaaaagtttttaatttatttttatttttttggcaaaatcaaagtaatttttaaaaatttgatttaatgatttttatcattttctgtccccatattagtcactgctccataaaacaggtgaaattttacaatttttaaagaatttactgggttaaaatattaaaatttcagattttgtggcactttttggtgccgtaaaccctgataaacctctaactgacgaaaaagtaaaaatatattttttctgttatctctatttttcaccttcattgttaatgtcaatgttatggtggtgtcatgatcttatgagaaatccggattttctttgtacaaagatgagtgaggggcattatccattttcatataaatcaatagagaagggtcaaatttccaattttttgcatgtttttatattattttttttattaaaggagttgttcctaattggtaattaaaataaattacgattgaagaaaatgaactcgaaaaaactttgaaaaattttgggtatgaaattaaatcacgaggcatgaaaattatgctcaaatttttttaaattttggaatgaaattaatcccatgtaagaaaattaattcacaaaaaattttggtaaattggtatatgaaatccaaatcccaatgcaagaaattaatgcacaaattttttttaatttggcaataaaactaaaccccgaggcatgaaaattatgcaaacaaaaaaatttttttgaaaaaactcatcagagacacctgacaattaataatgcannataatcccctact

SEQ ID NO: 4710 - DNA, 3216 bp, Heterodera glycines
  unsure (1)..(3216): unsure at all n locations
taaaaacattaaataggattaataattatactttttttaaattcctaatttattttattaaattgctaattgatgaacaatctggggttttctttaccataattcatttttntggtgttttattatcaagatttatcaaaataaatntaatctcaaatcagtaaaaaaaaagaatattcgttaaaatacgaccaatttataattacatcgctgaaaatgatctatattttgctaattattaaattatattatatgaatatttgtttattaaaggtacaaatntaataattattatgataataaattcacataaatnttgggaaaacggactcccgaaatcacaaatacccggtttaccaccatgaagctaaactttgataaattggcgtttggtttctcgttgttgctcttctgttgttgaatgtggcacttcttgaatttctttttgctgccgcttttcgggttgaagatgtcgatttgcttcttgttgacttttcttcaccattcgttgttcatgctcgatctgttcatgtcgtggtgccttctgcacttctcggctttcctcgatggcctttgtggtggccttgctgcttccttgttggtccgagatggcttgaaataacttgcgtaagcctgagtcttgtagttgcttgcggcgtttgtgttgtccttgtaatggactttgctgctgaccgatgggtcgtaacagtgctgagcgtcgtttcggaattttgaacttcttctttggacgtggttgttgactttcgtcgtcgctgccggcaagagaaactgagtcttccatgacagatgcgatgaagctgtgcactgcttgaattggttgctctggaatatcaacgattggtggcttttccacttctttgaattcatctctgggtcggtagatgacgttggattctggccatttgtctgcttttgaaagccaaatcgggccaaagcgccaaagcagtgatgttcgaaggcattggggatctgcgcctctggatgccatatccgccgggtttgagtcggttctgacgtgtctgacttgaaaattcgcttctcggattttttgtaatcgatttgccacaaatcgatcttggcgcttgttttctcgaagtcgttcgactgagcattgactgtctgtccacatgatgacttgatgatcggcgaatttgatttgagcttggatgaatttgactgcttttactccgagagtcagtgcttgaagttccaactttggaattgtgtcgtcgtgcgctgccactttgattggtttgacaaggctttttgcgtagatgaggttgcattcatcctttctgattattgttttggccttttggtacacggcaattcccatgccgtatttgctggcgtcgcagaagcagtggaattccactgagtcgatggcttggatgtgccgtggaaattcgattgtgattgcttcgcctctgtcgagccactgtgccatcaatttgaaccagtccttgttgatgtttgctggcaattcgtcgtcccattttgggttcaagttttgcacttcttgaagaatgagcttggctggcagtagtacgggtgacatgagtccgagcgggtcgtagactttggcaatttgcgacagaattgtccgttttgtgatttttccttcgaagattggtaatttgaagatgagccgattgtgttttggtttccatcgaatgccgagcactttgttatcttcgaggtcctttgtcaagtcgtctggttgcagcttttttagctcttcgatgttgcttccgtagaattctcggagtttcatgcccgctgcttcgaagattgtcttggcttgcgtcaccaaatcttgaagcttttccgttggcttggcgtcgaacatgatgttgtcgacgtacagattctcttcgatccgccttgctaggtcggagtcgaatagcgcgaggtgttcccgtaatgtggtattgagcaggaatggtgacaccgtcaaaccgaaactgacacggcagaatcggtagatgcgcaattcggagtggctgattggattgagctctgctgtctcgggattgttgagccaaatgaatctgcaggcatctctgtcgcgtgtcgaatgccaagttgcagaaatgccttttcgatgtcggcgaggatcacatgttccatgcgtctgaagcgcaggaggatgccggtgagatccttcagcagttgtggtcctgtgtacaagcagtcgttcaaggatggtgctgatgggcaattctttggctttgctgacgcatccatgacgattcggattttggttgttgctttatccgctctgatgactgctctgtgtggcagaaaatgcacaggccatgcacttgatggagactcgggtggaccgatgtattcgatgactgagttttgaacttgttcgtccaaaattgcctgatatttgtcaatcaggttgaggctgcgcagtcttttgatcaatgagacgagcctggctttggcttgatggatgttgcttggaagagcatcaactcggtcgttccagggcaaagcgacttggtatcggttgttgacaaacgtgaggttctttttgaagtggatcatcacatgatcctgatcgattggtgttgatgagtcgtccatgccaatcagatttaatccgaagaagttgttgagttgttcgtcctttttgaaatcaccttcggttgtgaagacttccgtctcttctttggttgattcgaacgtgactgattgattggcttcttcttgctcagtgccgtggactgacatgacaaatgtcacgtttggcgtttgatgcatttcgatgcgtcctgatccactgaggattttgccgattttggatcggcacagtgtgaagccgcttggcaacttttcgattggttgaacctgcagttcgtgccagacatcaattccgagcatgatgtcaggttgtcgttgttcatgcggaggattgagcttttgttgcctcaactctgacttgtccagctctgacagttgaatcattggcatgtcgttgaccaagaatttcatggcgttgaggttgaagatgagtttttccccgctcgtgcagagaaatccgagcttgaccaggtcgctgatgtatctctttggttcgcgctctccgaagctggtcaagtggcattcttcagtgtggaccaccggaagatccagtagctgtgcaagttgacgaaatgaatgatctgtggctgcctggatcga

SEQ ID NO: 4711 - DNA, 5977 bp, Heterodera glycines
gaatggtgacaccgtcaaaccgaaactgacacggcagaatcggtagaggcgcaattcggagtggctgattggattgagctctgctgtctcgggattgttaagccaaatgaatctgcaggcatctctgtccgtgtgtcgaatgctaagttgcagaaatgccttttcgatgtcggcgaggatcacatgttccatgcgtctgaagcgcaggaggatgccggtgagattcttcagcagttgtggtcctgtgtacaagcagtcgttcaaggatggtgctgatggacaattctttggctttgctgacgcatccatgacgattcggattttggttgttgctttatccgctctgatgactgctctgtgtggcagaaaatgcacaggccatgcacttgatggagactcgggtggaccgatgtattcgatgactgagttttgaacttgttcatccaaaattgcctgatatttgtcaatcaggttgaggctgcgcagtcttttgatcaatgagacgagcctggctttggcttgatggatgttgcttggaagagcatcaactcggtcgttccagggcaaagcgacttggtatcggttgttgacgaacgtgaggttctttttgaagtggatcatcacatgatcctgatcgattggtgttgatgtgtcatccatgccaatcagatttaatccgaagaagttgttgagttgttcgtcctttttgaaatcatcttcgattgtgaaaacttccgtctcttctttggttgattcgaacgtgactgattgattggcttcttcttgctcagtgccgtggactgacatgacaaatgtcacgtttggcgtttgatgcatttcgatgcgtcttgatccactgaggattttgccgattttggatcggcacagtgtgaaaccgcttggcaacttttcgattggttgaacctgcagttcgtgccagacatcaattccgagcatgatgtcaggttgtcgttgttcatgcggaggattgagcttttgttgcctcaaaactgtcttgtccagctctgacagttgaatcattggcatgtcgttgaccaaaaatttcatgacgttgaggttgaagatgagtttttccccgctcgtgcagagaaatccgagcttgaccaggtcgctgatgtatctttttggttcgcgttctccgaaactggtcaagtggcattcttcggtgtggaccaccggaagatccagtagctgtgctgcctttgacgaaatgaatgatctgtggctgcctggatcgatgaaaattgccgcagtcatgctgagatgcggttgtgctggattgaagaccgttgaagttgcggtcatgaggagtgcgcgggtgtcgcttccgtttacggcattgcacatttgcgatgtcgatgccgtttgttcgttgcttccgtcttgagttgtgattgacacattttgttgtgtttgccccaacattgctgatgtgatttggttcggtggtttttcgtctgcataacataatgccgttggatgaggttgtttgcatttgaagcatttcttcggttgcgggcagttgcttgcttgatgattgcttttgaggcatttgaagcataatgcctttgtgcgtagtacttctcttcgctgttgaattgtactgtatttccggcattctttattccagtgatcgttgtcacagaagatgcatggacttggaggcttgcgttgattaaatgtcgcattggcatgttgagttggaaattgcctttgattgttgatcgcattggcacgttgagttggaaattgtcgttgattgttggtcgcatttgcacgttgagttggaaattgcctttgattgttgatcgcattggcacgttgagttggaaattgtcgttgattgttggtcgcatttgcacgttgagttggaaattgcctttgattgttgaaagtgcgcaagtttctttgttgcggttgtggtgcgcgaggcctttgttgctgtgtcttatattgaggctgtctgttgatcagccttttgtgattgtcatccaccgctgaggtgatgaatgtgcgttcccgttgctgtgggattggtgcacggtctcggaatttcgatgccgagaaattgggcctttgaggttgtggccgttgttgcggatgctgctgcgagtgtccgtactcgcccatgacttcttgaatttgggtttcttttcgaacagcttcgttgagtacgtctcggaactttgtcgtgttccagcgtgccgggtcttctccctttttggtgaggattgtgcgcagaaatccgggagtgagcttcttttcaagcatgaggaaggttggcggaccttcaatgtcttctcctgtattgttgagttcgcgtgtgagtcgatcgagttgcaggaggaattctttggtgtcgcgcaggtttttgcagggcttgaggtttgccaattcgaagtgaagtgccctgatgtgttcgtccggtgcgccatatgtgtccttcagcaattggagggccgtgtcgtaattgttgtcctcgagtcgaaagccggccacgagttcacgggcctctcctccgagcaggttgcgcagtagattgaatttcttcgctttgctgagtgcgtgtgtgccgattgctgatttgaacgattcgtagaactccggccatttgcgtttgttgccgaagaacttgtccagctgaatgggttggaattggtagaacggaggagtgaaggacggcgtctttgttgtttgttgctgtgcggtatgttgtgttgcttgtgcataggctgcttgagcgtcccgttcttctttgtccgccttgctgcggaagagtcgggcttgaaacgtgagtgtgccgattaagtcgcgcaagtcgcgcagtttcagtgctgcttcgtcgactttgtcgttgattcgctcttttttctcgaatttgttgaaatctgcttctgccggatcgcgttccagtgcaggcagtttgcgcagtaaatctgcccatgcagtgagtgcttcgcgcacatcgtcgaggaagatgtccatcgttttggcatctttttgaactttctccaattgaatttcgaagttgagggcattttcgagatttgatgccgcttggtcggcttggatgttcagctccgccgcagttcggctgcgggagagaactttgagtgcagcgccgagtttctgttgaattggtgcggccattgattgttggtttgctgttgctgtactgcttgatcagctcgtgtgcggctgctgcttgtttgtcgttgcttgctgcttttgtttttgccgcttgttgtgcttctcgtttgccgctttgccttttgttgctttgctgcgcttgctgcacttgcgtggttgtactgctgacacggaggtcaagcagtacaccttggggttcccgtcgtttgacttgtttgtttgtgttgattgtgcaactgttgccacggagagcaaacagttcacaccgatcccccttgtgttggcttggattgggtactgctaccacgaagagcgagcagtacttgaattactgacggcacagagaccgatcagtaattttaccgattacttatggcacaaagaccaataagtgatttgaaagtgaaatactaatggcacgaagaccaaagtagtaagtcactgtttcccctgtgaaactactgctggcacggagaccaagcagtattccacaatttccacttttgctcccccctttttgatgtattcaagtttggctacggagagctcaaacttgatacttttttggaattttttctcaaaaatttcccaccagttgcagttccaatactgcttgaagtcgctcagttgtgctggtgctgtcgagggtttgtccctgcccaggtcgccacttgtccgatcaccacccgttgattgattgattgattgagttgagctccgttgagctgcttggagttggccgtgtgcgcttgacgttgagtgcggtgcaggtcgccgcggtggtgtcgacaaggcccgaggagttcgggcgttgaaattgccaggagaggaagcaaaaagtgggacgggaaatgtgccgggggtcaaacgggggcaagtgcagaggaaaattcacaccaaattttatctcaaacttgggtaattaaaccgaaaaagtggacaatgggcggacaaatgggggaggaaaatccggccaaaggccacaaaataaaatgtgaatgcaaaatggccctattggctgatcacacaaaaaatcgcaattgaaatggtgaaaatgggccaaaattggaggacatgaagttggagcagtacaacaaggggatatgagcgagggcaattgggacaggacaaatgagcgcatggaaatgggggaggtgcgcatggaaatgaattggccagagggggccaaaaaatgggacaattggggcggtgaatggggccaaagagttggagctgttcagctcccaaaaagtggtcgattggggaaatgaagtgctgtttgtgagcacacatttaaagggaacagaaaaatggggagagaatttttgggtgataaggaacggaatttgcgggggggagtgacagccgctgataaggcggaaattgcacatcggaccattttaaattgaattgatttttggtttttgtccgatgtgcattttggcacaaatcaaataatttgattttcgaaacccgtgtttcgacactcccaagcggcaagaaaaaggggctcatccgttcttccttcttctctctttcttcttccctcttggttccttgttttgggcccatcagtcgtccgccagtttcatcggtcgtaagcgtccgaagagcgtgtcttctgtcgcgctatgcgctctcgctcgtgttcggaatgatgccgttcctgtcgtcgtgtccagtcggattggtggagtcgattgctctggcaattgtcgtcgtttccgccggatcggagtgcttggcatctcccgcaatggcatgtcctcgtattgtggttggatttgaggcgttggctgattttttggccgaaatccaatcagggtcatgagtgtgatgcggattgggtttaggaagtatgcgattaagcatggtaggatgacatctcggcaaagcaagaatgtggagtatgccgaggcgagacttatccaccattggatggcttcctgtagccgttcttggagccatttgatggtccatccttcgattccgccgggtaaggcgccgagtgcttccgctcgttgcgtcgtttgctcttccagcttgtttttgaattcttccgaatcttcgaattcgtcgatgtgcggaaggctggcgaagtcggtgtcgttgtcgagctgccactgatggaagatcagtgggtggagatccaaatcgttgtccgttttgttgaggatcgtgtcgtaaagctcatggatgactgtttgtgccagtcgttggacgtttccatttcttgagtcgattcgcacccacaagttggggttttgttgcacttgaaggtgatggtagcgaaatggtgagcaacttgcgatttttgagatgagtgagagaatgcgcatctccgggtcgaggaatgcgtctcttgttgcgtttggcaaatgtattgtgaccggaatgaacttgtagcagtcctttgttgttcggtagctgatgttggagagggagattggaacacagggaaacacttcgattgttgtttcgctgatccatcgagcttgcagattctcgcgctttaggagtttccgtgcctgaagcgttggattgctgactcgcacattgcgttgacattccttcaagtagagctgtgagagtgccattgttgtggctagttgagcagctgaaagctgcgaagcgagttgctcgggttgcacgttgcgtctctctcttgtgtggttgctcatgatgatttcatattgctcttttggaatgccgaagttctgctccgataggacgatttgtctcccgtcgcatgcttggactgcatgtgtctcggtgaaggtcagtgccttttgtcggtcttccgaga

SEQ ID NO: 4712 - DNA, 1331 bp, Heterodera glycines
agattaattaaatgggatgcaaaaattaaggttgcccttctttcccattaattaatgccatttttcttgctagtacttttacccagagctattagtagtgccaactgtgaggtactggattgcctcattttattgttttttgggaggccgataaggctcaatttttagaaagtctttttactgatttctaagttttctgaggtttttggttttatggaaaaaatcttcaataatttgtcttttttgtctaaatcatttaacaaatcgcataaaaattaggaaaattttcctggcagtacatccatgcccaggtcttttttcaaaatgtcgaacactaataattaaaaatattttggataaaactttttaaaaaattaaaattttaaaaaatttgcctttggaatatttaaaaattgttgtttttgacgacaattagacttttttcagtcaaattatgttttttgacaatttcagttagcagcactaatttttagctcttcctattgccactacctattttttataaattgccattgttggttttaaccaattaattacaaaaaatgaccatttttggtggtcaattttttcaacaaaatgtgctaacattttcatttcttcttctgtccgggggtcccatgaaaaacctgaaagtactgctccacctctatgtagttcactggtcttcgcaggttaagcgctgtccgctcgtccaaatattgtgctttaattttcaacaagtgctcttcaccaatgattaatcgcatcaaatcattgcgcaaatcagcttcactagcagcagctgacattgcgggcattcctgctgcttgatttggtttttcaattttttaaaaccaattttcttaaaacctaattaattaaataagcttgtctgtttcgatagaaccaatttaagcatttcttttaaaaggacaaaattttaaaaaatgcacgactccaaaaaaaattatgagccaggccgctgaccggttttaaaaacggcacaatttggaattttgttttaataatgatacctttgaaagccccctgaaacaaagtcaacttgccttaaaaaggccctaaaagagtggcatttctttttttgcaactttttcataaatttattataatgcaattttgagtaattttgatgagaataatcgagtgctaccagcatgtgcatatttggatttggctgtctatgaaaatacttaacggtcgatccgttagtgacccgttccggcaaaaatcacctgccatgttttttggttttacgtttgtgccggtgttccgtctcagggagctaactccttccattcggccatcaacaa

SEQ ID NO: 4713 - DNA, 975 bp, Heterodera glycines
attatatgggataaaaaattgcaaatatggacttcatatgggcaaaaatagggatataaatttttcctaattgaaggtaaatttcaaaaatttcttaaaattcattaaattttaatttaaaaaaataagtagtctacaacccacaaaaaaattgaaaaaaaatttataaagccatagcaggtgaaaaaggtcagaacaagtgttaaaacatgtgaaaaggtcataaaagagttgaaaagtgaaggttggttttttgtcacattttgtgtctttttcactcctgccagtcaaaaacccttgccagctaaaaaaatccgccgtacgaaattaattttaaacctattaatcaaaattttggtcgctcgcaaatattcaaattctttctctcttcgtgctgtgctatttccctttttcctgtcaactaacgggttttcgaccaaatattcaaattcatccctttctgcgtaactttcctctcagctgtcaatcaaattttggtcgaaaagcaaaataactcgagcctcacacccggattaatctttccacggatgttggcaactcaagctcctccaacccgaagcctaattcctcaccggatgtgggcaactcaagcctcacacccggcattaatcttctcgcggatggtggcaactcaagcctccaacccggagcttaatccctcaccgggtgtgggcaaatcaagctgcacaccctgcaatcttacgagtgggtgcaactcatgcatcccaaccacttcctaatcctccaacttgatgttggaaacccaaacctcacatcctgccaaagggatggggaaagcatgccctcccccctcactgctcatccttcatcggatgttggaaccttaagctacactgcggctttaatcctttcgtggttggggcaagtcaagcctctcaaccacgacttaatccctcatcggacatgggcaacccaatcctcacatccggccta

SEQ ID NO: 4714 - DNA, 2286 bp, Heterodera glycines
aaaaataagtagtctacaacccacaaaaaaattgaaaaaaaatttataaagccatagcaggtgaaaaaggtcagaacaagtgttaaaacatgtgaaaaggtcataaaagagttgaaaagtgaaggttggttttttgtcacattttgtgtctttttcactcctgccagtcaaaacccttgccagctaaaaaaatccgccgtacgaaattaattttaaacctattaatcaaaattttggtcgctcgcaaatattcaaattctttctctcttcgtgctgtgctattccccttttccctgtcaagcccgggggagaaccgctataggagttctgcctaccattatggaggagaattaatttaatttcattggttggacagataaaacccatcaaatatgccttaaaaacccgaaaatgtccaaatatgaattaaaacatgccttaaaacatttaaaaaaaatggctttaatgctaaatccaaaaaaaataatgttttaggagcaggctcgcttgagcaaaaaaaaaaaacaaaaaacaattttgaaaacaaataaattcaaacatattgggaacagacaaaaacctacataatttatagagattttttgaaaatatttaaatgaggacaaaaaatgctttgagataatcgaaatattaattcaaacttttcaagtgaccattatttttaataaatttgcgtaatctctgcggagattctgcctgagcaagggagcaaaaaaggcggaggaaaaattcaaagattgtgagatcaaatgtccccttgtgttgttggaaatttgggaggaaggacaattaggaagcaaatgagagaaggggacaaaaaagggaaggattcgggaaaggcgaggttgaaacaaaaaaatgagagaaagattcattaacgaatcagtagtttgttaaaaaaaagacacttaaattatataaaacagttttaatttcggttcttgcaactaaaagtcccgatttttatacacaaacacaaaaaagaaagtgtttttcctactatttatagcatggagaagccaggaaaaaaaaatgcatttgcatatttttggcagccctgattataagcaacagttaaaataatatttataaatgaaaaattgaagtaaaattttatttccgaaaaaataaactagtaaatttaaagcaaaaaaaagctaaataaattttgaaaagaaacatgaaaatttattatggaaattgacacaatatgtataatttctgaagatttaaaaaattcatatgaaaattctagagaaattaattttttaagggtcatcgggttaaatttcatcagataaaataaaagtttaatgtggacataaatttctgagataaaatgcaaaatacttggagaaaaaataatattcgctttaattaattgaacagaagcatggcctgcgcgggacaggggggagtgggtggaaggcattaacaaatcgatggaaatttaggcgggggagggggtgatcaaaagatcataagaagcgcggggggtcgttcgaagaaagaaaggagtgagaaagggcttggttcaaaaaaggaagtgaagcaaagcagcgccggtgtggaggaattatctgttaaatattaaaaaaaaattttgtcataaaaaacccattggtaaggtaaataaatgccgaaaatataatgaaagagaaaacccccacaaaaaaagaatcaataagcagcatttaatttacggaaataatatatcgaaaacataaacaattcaattttaaaatggaaattttggttacaaataaatatttgaaaaaaatgaacattttatgggaaaaatgacaaaaagtgaaaaagcctttaatgtatacaaagaaacatttgaaaaaatcatttttattcatctttaatcaatttgcgcaagcgttgcgcagaagagtggtgggaggggggggggggaatccaagaatgtacttggcatccaaatacgaatccgagccctgttctagtgctttttttcatttttttagtgcctcctaaaacgtacctaggtatttggctgcttttagagcctaaaaaatcgtatccctatttatgagtgtttttttaagtccttttgttttttatttttataaattttagttttattattaaatctcctgaatatcacacataaatgtgaattttcttttacagtgaattttaaatttctgctttcattgtccgaatattcgccaacatttgatgaactgattaaaatggcgaatttctttgacaatattgacgatgatggacacattttgg

SEQ ID NO: 4715 - DNA, 2735 bp, Heterodera glycines
gggttatttgaacccaaatataatacgaaagatttttgaattgaaacttttatttgccatttatttgcccattcgaataaattatgcaatgctttatgcataatttccgtgtcggctcttgctttataacaaatatataatttaacatcagtcagcatataattttattttcactcctgatggcaaggcatcaggaagatcgttaatataaatcaaaaataataaagggcccaggacagagccctgggggacgccagaggtaacttttttacttgaggataaagaatccccaattttaactcgaaaagtcctattactcaaaaagccctttatccacattaaaagtttgccctttataccaattttttccaatttgtataaaagtaaattatggggcactgagtcaaatgctttttgaaaatcaatataaatacagtcaacattttttccatttataattgcctcgtaccaatcttccacaactgttattagttgacttgtcgtagacctatttctaacaaaaccaaattggtattccgaaattttattgttttttaggagaacaaaaaaggttttatagcaaccattaaatttgagtaccttgaataaatgattcattcatcattaatctgtttgtgaactcattgcgcagaaacgcggaggggggggggggtgggaaggaaaattggcgaatcgatttaactcctcggttgaacggaaagggaagggagggaccaaaaaaaggcagcagaagagcggagaggggcatatatcaggcttcgatttcaaaattttgaaaatcctcatttcagtcataaaaaatcctcatttgccactaaaatacctcaaaaaatcctcattttttaaaacgtccataaaattgcgaacaaaatcagttaactttcatatttttcgtttcaaacaatcacggcaccaatcagcggcgccggaccccaataattcttatttttttttaattggtcaaaaatcgcaaaattggtaatttttggtaaaaatctatctataactaacctccaaaaatttttaaattcaatttctattctttaaaaaaattgacaatctcataattttttgattttaaattgctttattcgtgccgcggtttttcaaaaaaactttttgggaacattggggggagggggtccggcagtgccgataggcgctgccggaaaaaatttgagattttgagtgcgatttgtcaacagattttttcaaaaaaaatgattttgaccccctctaccgaagccctgtttgtttttttgtataaaattataaaaggaaattaattaaaatttattgcaaaatgaggatttttcgaaaaaatgtttaagatttgaagaaaaagttcaaacattttgccaaatatacctaatttttcaaaaaatcatgcgtttttgtcactttttattaaaagaccacaaaaatacttaaacttctcaaaagaccacaaaaatccgcaaactctttgaccctctaaaagaccacaaaatgaggaaaattcctcagatatcgaagccctgggataaataaataagcaacgtttatttaagaatttttcagattaaataaaaaatatattacggtaggataacaaattagcttaaataaaattttttgtcatcactaggtttgtcaaaaatatgtacataaagtggtcataatatttaactggcggacgtaggagggcacgtttccattcttccttttcggctttggccttctctttggcattcccttccgcgtcttttcgtctggcttcggacttcgcttccatttgctcaatttcctttttctcctttcacgtttgacattatccgaacgtggcctacgttcctttatctgttcctcctcttcctcttcattttcaatttgtgcctttgactgttgcatcaactgaatttgatcaaggcacattctctccaattaaaaagcgacatcgaagtcaaagggccaatgctggcctcctcttcctccttggattctgggcagttcggccgtggagtcgtccatcggctacaccttcattagcaccattctttccaatatcgcttctcgctctccagctgtgcaaacatttgttgcagttgctgcacctgcacactaagacgctaaaatttattgaaattaaaaatgatttaaaagtaaatgaaaatttttaagtaaattacattgatcatgggtgtggcggggttcggacgtacaaaacttttattgcgtttgtagattgtaaaaattttttaggtgaatttttgttgcagatttcgtaaactcattttaatcgaaattaaacaaaattattaataattaataaattaaagaaacccaaatgcatttaaattatacatattactaatgtttattaatgttttgaccaaattaggtttttataattactaaaatgaaccaacagcaagtaattaaaacaaaacgaaacaatgagaagttggagtatgatggtgcactatacgtgctccataaattcagtgacgaccgactaaagaagttttggcgctgtgagtttcacggaccatcagacaaatgcaagggtatgttaatatatcactttgaattttgagaatcttaaaattcaggacggttgcacactgatttaaacaacgttgtgcagaaggtggtcggcgtccattcgtgcgacatgaacgctgcgcatgtggaatgtcagcgccttgtaactggactcaagcgacgtgctgctg

SEQ ID NO: 4716 - DNA, 938 bp, Heterodera glycines
tccatatttgtccatattttggcatttaagtccatattttatgtccatattttggccttttccaaaaaatcccctaatagaactgcccccatcaggtaaattggcctttttgacccctaaagactaaaaaaatttccaaaaaaaacatttttgtagcaaaatattgtcaaaaatattgacataccgtattttctctaattatatgcccgggtatattatttttcaaccccctcagaaggggggagataattagagacgggcagattaatggagacagggagattatttttcgacagatttatttagtggaaaatttttgaaatttattttgaatatttctccaaaaaatattatcgcgtcaaaaaaaagcatttttattgcatttttgttaaaaagtttctgaattttacttgaaaaattcgaaaaatgccaaaatatttacaaaaaattgataaaaccacccaaaatattgaactagaaatatgaaccttacctattttgcttttcagaaatttggaattttttttaatttgaaaattttttctttttttgagcccgagaaatttatgaaatttttggaaattcaaaactcacttcagggttggacaatgtttgtggaatacagtagagtgccacgggaccgggaatttttgcaaaaaccgggaccgggacttgccgggacctgagaagccgggaccgggacctcgatttttttcgggaccgggaccgggaaccgggaccaaccgggaattcttaaaaattcaaaaaaattcaaaaattttttaaaaaattcaaattaaaattttttttcaactgaaaataatacaaaattaaatttttattttgttttttatttaataaaatccaaagttaaagctaaattaaattaataaaaattttcaaacaaatttctttaattatttcaaacaattaatatt

SEQ ID NO: 4717 - DNA, 5779 bp, Heterodera glycines
accttaaggaaaaactccctgaatattgttgcaacgacgtacaaatactcacccacgccctcgtcgaattacgccgggaattcaaacaactgacacaacggaacggaaaacacggaggaattgacatcctgtggcaagccatgaccatcgccagcgcctgcgtcaagaactttgcactcaaccatctgaaacccaactcgctcgccatcgtcccggaaaaaggctatacaccacaacagaatcaaagtgcactggccatcaaatatctcgattggtactcacacattaacaacgtcaacattcaaacagcacactcccgctatggtgaatatgtctttaaacgtgagggtcaggtgtatcaagtggatggttatataaaaggggaaaatgggaagagggataaaataatcgaggtaaatggttgtctgtggcacgggtgcgaggaatgttttgaggacttggacgacgaaacgaaaatgccgaacggaaagacgctaggacaattaagagagagggaggtaaggaagcacgagattcttagccggtacgtagacttggatgtgatctgggaacacgaaatcaatgagcagctgaagaaggacaagcaaatgagggagtttttcgacaactggaaggaccactcaccaataaaaatcagagacgcatttcatggaggacggactgggccaatgaagctactccacacagctaagccgggacaaaaaatcagctacaaggacttcaccagcctctacccatggaccaatttctctacagactatcccctcggtcacccaaaaattatcagctttagattaaatgagcaaactgtcaactggcgagctccatccgacaatccatacaagggacttttaaaagttttacttttacccccaaacaggaatatcaatgtgaccgtaatgcccataaaatttgatgagcgactcctctttccactctgcgaaaaatgtgccaaacacatcaccaatgaacacccgaatggcctcaaagacaacgactattcgtgtccccacttcaatcctaatgaccgtgcctttgtctctacctgcactcaccttgaattgaatgctgccttggaggtcggctacaccgtcagaaaactcttccatgtcctgcaatacgaccaatggagcgacaacatcttcaaatcttacgttagcgaaatgatggccctgaagatccacgcaaccggcttcccttcatggtgcagcagcgaagaggagaagaaggaatacattgaggagaaccgtcatcgatttggaattttgttagacaacgaaaagatgaaggctgaaccagggaagcggtacatcgccaagctctgcctcaactcactttggggccgcttctccatgaggaacctcctctccaaagcaataatcaacaacgacgaaagcctgattcgccaatataccgacgacaagaaaattgaattagtggacttggaaatgatcgacgacgacaacgacgtattcatgctcacctacaagccgaaagaggagtttgtcgacgaaaataaatactccaatgttgtcatctccctcttcacgacatctgcagctcgcctctacctctacgatgccctcaaaaaagtagccgacacccccgactgtgaaattctctacttcgacaccgacagcgtaatctacgtgcaccccgaggacaacgacccactaccaacaggaaagggacaccttggagaactcactgacgaaaagccggaccacaacattttggaattcatcagtgctggctgcaagaattatgggatgaagctgcaacgcaaggacaccggtgaaatagaacatgatttgaaaataagagggttcacccttgatgcacaaactgttcaaaaaattcattacgatactgttaaggaccaaatcttacgctatggctccgaagacccccctgaccctatcattgtaacttacccccattttattcgccctaatctaatccaaggcaaagtgtatacccattccctcacaaaacattatcaacccatattcacaaaaggtattattaatgattcattccaagtcctcgaatttggttatcgcaaatgataagtatgcattctcaattaaattttctgtatattagttttcttatggttcccttcttttctttctctctgtttatatcactcatgtgggacggaatgacccctggttgatcctctccaacactccaggccatccatctgagatgaaggtggacgagctgttcattattgtaatgcgcagcctggtgcgtgagtgtttggattggggaccgaagggtgaagccgttccctgggtgtgtttactcacttttaagggaactctaagaattctgatatgccttcaaatctatcaaaagagttgcatactttctttttataatttcctttattctctattttacacttgtatttttcatttgaatgtttattcagaaataaaattgaaaaatgtgtcattactaatattaaaaggtataaattaaaaaggtatttaacgagaaaaatagtcagggttttgtaacacaatttgtaaattattaaggaatagaagatacaattttaaaaaatacacgaacttgtcgtttttaggtagaaaagtgcataattaaacacattaacatgtatgcagaattaagcaatggaagataaatttgaaaattattaagcaattgggaatgtcgtttttaggtagaaatatgcaaaattaagagaaataagttacaatttgtaaattattaaggaatagaagatacaattttgattatgtgcacgaacttgtcgtttttaggtagaaaaatgcataattaaacacattaacatgtatgcagaattaagcaatggaagatacaatttgtaaattatttagcatttgggaacgtcatttttaggtagaaaagtgcagaattaagcgaaagaagttacaatttgtaaattattaaggagtggaagatacaattttattatgtgcacgaacttgtcatttttaggtagaaaagtgtataattaaacacattaacatgtatgcagaattaagcaacggaagacacaatttgaaaattattaagcatttgggaacgtcatttttaggtagaaatatgcagaattaagagaaagaagttacaatttgtaaattattaaggaatagaagatacaattttaaaaaatacacgaacttgtcgttttttaggtaaaagtgcataattaaacacattaacatgtatgcagaattaagcaatggaagatacaatttgaaaattattaagcaattgggaacgtcatttttaggtagaaaaatgcataattaagagcaagaagacacaatttgtaaattattaaggagtggaagatacaatttttattatgtgcacgaacctgtcatttttaggtagaaaagtgcataattaaacacattaacatgtatgcagaattaaacaacggaagacacaatttgaaaattattaaacatttgggaacatcgttttttaggtagaaaagtgcagaattaagcgaaagaagttacaatttgtaaattattaaggaatagaagatacaatttagcaaaaattaagaaaaataatgattaaatgaaggaattactcaaaaatgtgtaaaaattacacacatggggtgtgtgtgtatgcgtatgtatgcatgtgcgtgtgtatgcgtgcgtatgtatgcatgtgcgcgtgtgtgcgtgtctatgcgtgttcgtatgtgtgtattgtatgtttttttgagggtgaggataaaatgtgtttgaaagttttgcataatatttattaacttatataaaacttgttaattttaatcataaacacaaacaatgctccttgcctaattcaacgtaaaataattctaattataataacgaacatttacaattccattgaataagtaatattcaaaggaaacaagagaaatagacaattttgaatctaagattgaaccgagaatagaaagtaggtttgacaaacagctgactgactgtatgttagaaacggtagactaatggctaaatatatattgaagaaaggacttgtaaaacgaataaatgaagagtgaagagaacatatgaggatattgtagtgcgtcattgaatggacggatgattaattgtggaagtaagaaatagtgaaaaaaatgtcagaaaaggatagaggaatggtataaaaatcagagatagttgaagagagacaattttagatagagagaatttagtgtaaggagtgattgagaatagaagatttggttggaaggtggacattagaaatgagttaacgaaaaatgatatttagacatatagaagacggtttgggataatagagaacaacagtgagaaataaccagatatagaaagagtagaaaaatacattacggagaaaaggaaaataattcaaataaacttaaccctgataaatatgccaaaagctaaatactagattttgtaacgaaaaccaaggaaggtagctttcttcctatgttacctttcaaaggaatcgatttataggataagggatgccgtgacctcacccccctctctccttctcaaattatttggttacactcttcctcatctttgcccttcctctccaacatattctcattcttactccttaccagcgcaaactcactctacccgttcccgttttcagcttcttcctttaacaattcaatgggaaatgtgtttttactaaaaactctatgaaaaaatcgaattgtttgccagcacaaccataccttgtgggacattggttagtttggctaccaaaaaaccacacgttatatatatgtttctgttttttatgcatatctatgactattataatgaattaattaatttaataaaaaaagtttacacccccccccaaaatctgcattctttttctgataatttagaattaattgtcatgttcatcattcataccgtaacggagttaaatctgtaaacaaatgtcataatcatttattattcgtcacttccttttgtcttattcactctacaatatttttgctagttattttttatgacttatacactcccttccttaattaatcataatttataaatttcactctactgaaacatatgtaaatctgttgaagttgatgactatattctcagattccaatattatgcttcatagatataatttcattataacccttctttctgcataaaatcttcaattggtaaaaaattaaggaataattaggtctaaaattacaattaatacagataccatacatacactaccagaaaatcttagtaatttatcataatacttaaccatactaaataattgtaaaagcatctcaccaaacattgttccgcctttgaaatgattaattgatttttagctatattacacaaaataattcacactcattattaattaaaattcttttacaactaataaaaatattacaagtcattctcggtaatttgaaataattaatcacataagttttaaaaacatcacacatactataaaaaaatccctatataaaacacttcaatcaaaaataattggttcataaattgtcacaacaattagcccccatatcatacatcactacaaacattttttgtaatttgtcataattaattaataagatttctaaccctcgtcataaaattcctctgtaaaaacatattggtcaaagaattgtcattttcctacatttagtgattattgtttcttaattaacagtacacaaaaaactttcaataattagacatacagatat

SEQ ID NO: 4718 - DNA, 884 bp, Heterodera glycines
aaacgaatcaaaaagctcatgtttggtcttaatcggtccagaaattcctcacaaattttttatttgcgcaaatcacccgttaaaggatttgttgagtcaatcaatggcgtaagacgtctcaaaaattgggcaacagtttcgttctcacgttgccggcaaactgaaagggtccgcttcgccacttctcgtctttgaggcgagtccaatttggccctcagtgcttccaaagcgctggtgaatgtcgtgatttggttagacttgagttctttgaatagttccctcggcgtgtccttgagcgctagtttatggcgagtgaccttttcttcttcggtccaatttttccctgttagtgacagatagtccttaaatcggtcagcccaatcatcaaaagcgtggactgactcttctccaaataattccaagttcgaattcaggtggctcagcatgtttatgcgccacacaggtcgattgatcactacactttgatcctcacttttcacctttaaatctgtattttgcccgcaggcggggttgctccaatcaaattctgtattttgcccgcaggcagagttggtgctgaccccccgagggttgtcggcatacatttagaaatcggtgaatttatgcgaatttttattattttttatgctgaaaataaaaccaaaatattgccaaatcagcgcattattcactgaatcacataaaagtaatggacttaagcttattttcttcggaatgaattgctagtgctcaagtaaatgtccataaaaaaattacattagtgtcgcttctctcaaatgaatgtgcgataatgtccgctaatgttcacataaaatgtaaatgatcgaatctccgataaatgaaaaatgtcgccgcggcttccg

SEQ ID NO: 4719 - DNA, 7808 bp, Heterodera glycines
gtatttttccacaaccattgctttttccattgctctcaattttttggaagtttttcattgctggtagactgatgccatcgcagaaaattttcgaactgccctaatatgccggctacaaatattttctgcaacatctacttcatttgcactcttctgccaaaaaagtcttgccgaaataaggacttatcggctctctcagatccgttagcaaattgtccaacatgtctatgcgcggcattggccataagtgttggcacgatggcacggcattcatccagctttttgattggaattttctccttgtccatgaccaccatcagcagccctcgcatcgcttcatcatatgggtcagtgttgtcatatgagccgcagttggccaacagcttgtgcattttcccgaatttctggctccactcgtcaatcagataagttgccgcattggacgggtcttcggcgagtaccaaattgtgaagaagcgcccaaatttccctctccattaccatcgccccttcccgttccaaaaccccccccccccttcccttaccaaaatcccctccccccccccttcccttaccaaaacccaccacccccctgaaaaattccggcccaaatttggtcccaagatccccccaccctccctttcatctgacccccctaccgcgattcgctccccgcatattttgatcagataagattattcaattgcgtttttttaattttcgtttgttgcgaaatttttgtgcggggcgcaccaaaaatggtgccatccgcgctccaaggtcaaaatagtttttatgttcacaatctgtcaatcaaagttcttgggcgagaaaatttaaagcgctgcggagatgcaaaaatatttgcggccactttaccgcagtttttatacacgggaactgtcaatcatataaagaagggaacgccgaagcgacttcatttcaattccatttcggttgaggcggggggtcggggccattctttgcctctcggggcgcttgcccacaaatattcaaatttttccatcaatcatctttatctgccaccgcggcactgcagcacggcatgccagtgggtggagtcagcagccgcaccatccgcaagtttacttcatttgccactttcgtccgctttcaattttgtcagcagcagaaccatccccaattcaattctcattgtttgtcagtttcgaccactttccattgccaacatgtcttttattgcccccggcactttcgcgttcctttcaaaagactatggggaattttcgactgggcattttgacccaaacagagcatacgacccaaattcacttgcagaaccgtgccacaattcctccaccctccgccaaatgcgccggtaatcttgagtctcgttttcggttgcttttttaaattcccgaatgcttttttcaggccgttcgtgtccaaccagttcaacaactgataccactgatagacgtgccgctatttgtcaacccaccaccaaatgtgccggtaattttggctcgctttttttactttttttttcaagatcccgaatgcattttttcaggtaattcgtgtccaaccgatgcctcaaccgttgccgctgagagacatgccgcaaattcaccatccaccgcgaaatgtgacttcaatttggatcaaattgtggttgctttttctcagtctctgggtgtttcttcagggaattcatgttcgacaaattcaacgggaatacgccgtaccgcaatttgcccatccgccgccaaacttgccgtatcatccaccagaaaacgttccggtagttgggtcttgtttttcgtgcgttttctcatattttcggatgcttattcaggcaatccaaccacggcaacgaccgcgccagctgagagacgtgccactattcgaccacccactgccaaacggacaggtaatttcagaccctgtcttctacctaacaccgaaacatcttttctaagcaaatacatcccaaccccccgagagtgctggaagtgatccgacggctgggcgagtggagaggaagaccaagggacccaagatgtccgcctcaatgaatgaatggaatttggattttgataaaatttgttgttttaattttttgaattgataagggttaaatcccgttacctaaattgtttgaaaattattaaaattttaagaatttagatgctaaacctaacctttgacaaagattatgaaaaaatgaaaagaaatgacgaaatttttggaatgttccttctttttattatctatggattttttttcatgtgcattattttggtgctagtaagatattgccgaatgaattaattggttttttctcttcattttaaaacatttcacgtccccatgccctgcccacttcccgcggaattgatcaaggaaataattgacgctcttccccctccaaaaacacatcggcttttgcgcttaaattttgttttggcatactttgttaaatgtcggtttcattccatgatgagaagattgtttcgcccagatcatatttcaataccaatggcccgaagaaccggaatttatttctttttcgatgttcgtactccccctatttattttccactctaccaataataacatttaaataaaattataattttttatttcttatttgattaatttcgatcaatattttttgataattaaacaaattgtatttttcaaaaaagacctttctcgcagtagcaactcatcggcttttttttactcccttcataaaatgtctcgcttttgcccgctcgcccaaatcaatgaatcgggtcggcttaacacaccaaaggggaaatttagtgagttccaaacctatcaaattaaaaaagaattttgatattcgttttaggtcttttttacgctttggaaattgctcgaagctaccagctcatagggaaaagtataacggaaaacaaattccgttatctgatgaagacggagaagaaacaaagggaaatggccattgaattgatggaaaaggcagggataagcacggatgacaaagcttttggtacccaacaccttgaggctgtacaaaaatactgggacagggaattcccggatatgtttcgcattgtggcttttgaaatggtaacaaaattcgcttgaaaaatataaagttacatatttttagaagaccgggcttaggccaattttcaagggagagggtgttcgtaagcacgaagtttgcgtgataagagaaggcaatcactgggaagggatcaaatcggtgtcctggttttttggtgttcgcaacttttgcgtgggttgtgaagtgacgtacgatcgacctgaaagacacagaatggagtgtaaggaaagatgcaagaagtgctgtagaatggggttcgggtttccatgtgcaaatgtgtgcgaggaaatgcactgcggtgaatgtaatcttaagttctacaacccggaatgttttgaagcgcataagaaggcggcttgtaatgagtacaaaaagtgtgaaaaatgcggagaagtctaccaaacacgttcgaaacacgtgtgcggggaaaaattttgcaaactgtgcaaagtttgccacccagggcggcaatgtttcatcaaaaaaattcaagtgcgaccgcagaaagcctacagaattgtggcctacgatctggagacgactgtagatgggggagaacaccggcctaatcttgttagtgctgcacgtacttgtaacatttgtgcgggagaagagcgggaatgtgagatttgtgaaggccccagtaaaatcacatggtcagtagcggatggttttgacccaatgagcgagtttgtcgtttggataatgggttttcaacgatttgaaacgattgcttacgcgcattatgctgggagattcgattcccactttgtcttgtccgagctaacaaagaaggaaatcgcgacggaactgatgatggcagatttgaaaatttatcaaataaaggcgggaagagtgtactttcgggacttttggatgctcagtcagaataaattggcggaccttccaaaaaccttgggcttaaaaactgcagctaaattgtattttccacacaaatacaataagaatgagaattttgggaagagattatccaacctgccacctttggaagactattgccccgacagcatgaaagaggaggaagcggcaaaattggaatcgtggcacaatgagaattttcaaaaggaatttgaactaggtagggaaaatagcattttttctttgaaaataaaatttaaggggaacaactcaagacgtattgcgaaaatgatgttgaaattttgatggaatcaattttgaagttccggcggttatttttggggataacaggagatttggatgtaataaaggacagcgtcaccattgccggggtcgttatgaagatcttcagggcaaaatttttgaaggacaggcatattccaatcatgccagagggagggtatgagagagcagagaaccagagcaaaatcgcagtgaaatattttgagtggttagcccaaaaaaagggagtaaaagtgcggcatgcgtgtaacggaggagaagtggaatttggtgggctgaaggtggactgtgtgattggggcagagaaaaaaataattgagtttcaggtaaaagaaaaaatattttctttttaaacaatacttaaggggtgtgcatttcacgggtgtccgagatgttttttaccttggaccatagcaccaaacggacggacaatggaagagaatcaaagtagaaccgaaattcgcatggaaattttgagggaaaagtgcaaaaatttttcaatcggagaagtttgggtagaataaaacatttagaaatatttattaattgttagttttaggagtgtgacgtcagagaggaattgaagaaaaataaggagatgaaaaagttctttgaaagtgtgccggacaagggaccgatcaatccgagggatgcttatgccgggggaagaacgatgccattttgtttgtacgcaaaggctaccgaagaaattgagatatcaatgttcgacatcattagtttgtacccctttgttaattatggtaaaaatctgcttaatttttgttagtttcctttcgcttaagacaccccataccccgttggagtcccgaaaattgtagtgagcaggaattttaatgtgaattggacagcacctgacgacgtaccctatgatggacttttgaaagtaaaagtgatcccgccgaaaaatcttttgtatcctctcctccccgtgcacatcgatgaaatgctcctcttccctaattgttggtcttgtgcgagaagggccaagaatgaatttatgatgacaaaagatgtgaaaaaatgtaaccatcgtcccacgcagagagcatttttggggacattcacatcaattgagttgcggaaggctttagagctaggatatagaattgtgggattctatcgagcgtatcattttgaacagtttgacagtcaactgttcaaaggatatgtgcggatgtttttgaagataaaggtggaagcgtcggggtggccggcggaggtgaaaagtgaagatgaaaaaagagcattcatcgaaatgtacaaggcaaagtatgacatcagtttggattatgataagattgggtttaatcccggactaagaatgatcgcaaaattggtgagaaattataaaaaatcttgaaaaattgttcaatttaagggtttaaacagtttatggggcaaattttcgatgcgcaatactctttcaaatacggaaattgtgggcagcatggaacgttggatggaattgggaagagataatacaattgatttgggcgcccggtaaaaataagcgaagagatagcacggtggtgtaccggaaaaaggaggcgttcataaaggagcataaagtgtcaaatattgtttttcattgtggaccacgagtgctgcgataataaaactgtatgagaaccttgaacaggtctataggaaggaggggtgtaaaccgctgtattgtgacacaggtgtttcattagaaaaaataacgcataaaagttagattctctggcgcttgatcatccgaagggtcggtgtacattgaaggaggggaaatttttggggtaaaacataatttttgaaacacatttaaattgtagttttaagggagatgacgcgagaatatgcggacaacgaaattttggagtatgtgtacgcgcgtccaaaacagcatgccttaaaactcagaagaaagaaggatggggtgatttggcacaaaacaaagatcagagggatgacattagacagacgaaacgcttttaaatacgaattgttcaaagagatggtgctggactgcaagaaaggggtcaaaaaagtttttcactaccctgagaaaatcggttcaacaaacgacttccgggttctctcaaaagatgtgcgaaaagaatatacgccggtgcagaaaaaaggaattattgacgatcactttaatgttttgccctttggatattattaataatttttgttttgataattttgtctcatgtttataacatttaatattttaaattaatcaaatttgtttcattttttagaatgtcaaagaaaaatttccaagaaacttcaaaagaaatccgccgctcgaaaaatacaaaaaattatttcaaaaacagtcctaatttggaaaaatgtttcgaagaagtggagagtcacataaaggaaaataaaaaatttgggataaaagagcacgtgacaactttctattttaaatgccccgaaaatgaagatcccgaaaaaatgtttaaaaaaatcctgaaaaaattaatgggggatgcaatgagccgagaagctgagccgggctggaaaattgagaaaatttcagtggacctttattgcagtgctctgtcagacccagtgatcatccctgcccgccccttccaacaatcgaatccagacattgttttcaaggagttcatgcacaggcagcaatcatttggggaagtgaatttgttagaccagagaatttcaataattattgccacttattctttccctgttaaataaaatttttttcatttttccatttcattattttttgttcattccattattatttattcgagtttttttctttattaatttttcagttaaaatgtactcgtttcaaaaatattttgaggaggctctcgaaaaagaagattttttctggcagaaaaacagagcagaagtggaggcattgttaattgaggcttcaaattataaaattataatacacagggacaacgaaagccgctattctgattatattgccacctatcgccgcaccccactcttctgtttctgcatgattgagagaaatttaagatttttttacgacacaggaaccgggacgcccataggaagggttacaaccgtgctacatgttaccgttgaggcgagctatacaggagagggattcatttcgcctatgttttccttttggttttattgggagggcaggagtcaaacaacaaacgaatctttcacgagccgtctttatttgtacactgtttcgatgctaagagcaatgggcaaagcctggggcagagaactacttttgaaccctgttgaagttttaattgatatgttctaccaacgaatagataggttggaacatggaaaaaagcaattaaaaaaaatttgtttagagatttggtcggatcatggtcattgttctatagactcccaccctcactttttgacacttcccgccgggtggttgctgagaataaactggaagaatttttaaaattaccatcattttttcgcatgcttttttataataaatattaaatgttcatgttgtt

SEQ ID NO: 4720 - DNA, 6131 bp, Heterodera glycines
ttgtccgcccatattatttttattcctttatttctctcccctttatctctcctctctctctctcttcccttctgtcccccataaataccccgcgtcctctgacctccccgtcattcagttgtcaaccatttattttgcttatattgtttcaatcaatattcgccctttgtcctccgtccctcttctcttcatttatttatttgtgtcttcccaacttgaataaaataattgtttattcacttcgccggtttgggatttgacggcacaacattggcgacgccctaccaactgcgaactcaactcaacttttgttttggttgtgcaacaaaacaattttgattgttcaattttcagctgttgctcttccactgctcaatcttcttgagcagtgaacaaccaaaatggccgaagcagcaattcgccaactgtccgacgtgttccagcagttcttgactgctcagcaagcaaatgcggcagcaccagcacaaccgattccaatgccaaatttggcaaatttcgactgttttggtcttggtgaccatggcgaaagcgacatcgagggttggctggaacgcttcgcccttgcgcttgactgctcaacaccgaaccttcaggacgatttgaaggttaagctcttgctgacaaagctgagtgagacggcctacgccgagtatagcaaacactgtttgccgaaaaagccaacagagtttgactttgctaagacttcggaaatgctgttaagcttattcgcgaagcaaaatcagtgtggatcggcagatatgagtgcttacgggctgaaaagcaagacgaggaggaatttcgcggcttcatcaaccgccacaaaaggctgttaagcgattttgagtttaaaaagctcaacgaagagcagtttaactgcttgatgctcctcgtggcgctcaaatcgccgaaggatgctgaattgcgaaagcgcatactgtcaaagttagcggccgatggtgacagagcaacttatgaaaatgttgtgaacgacttacaaatgtttctgtcgaccatttcggaagcgaaagcgatggagagaccaccgaactccaacattttggctgtaaagcgcaggcagcaaccgaagaaggacaattttggagaaaagggctataagcagcaaccatgttggcgttgtggcagagagcacactccgttgcactgtccgcatttgaagacaatatgtcgaaaatgctcgaaagttgggcatgtgcagagtatgtgcgccgcgcaccatgaatggctgacaaagcaaaaaggaccaaagctaggcaagaagatgaatgccctgcgaattggtggcctcatggtgaacatcctgaatggatcaacacgactgatggaagtcacgatttgggtgaatgacattccgatcaaatttgtgcttgactgggtgccgatttgactgtgctggacgaagtcgcacacaaggctattggaaagcctcggctgacccactgcaatgagcaagccgtgtaccacgacggtacaagctgtaagcttttgggaaaaggcacagcacgtttttcatttggaggaaaaacaattaatgggcaatattatgtgacgaagaaaggatcactcaatcttttgggaattgatatgttggatgcctttggcctattggacgctttcagaagggaagttgaaaaggcatgaatggcaatttggtgaagaaggaagcgaaaaagtcgccgattcttcaacaggagaccactttggctgcgcttcaaacaaaatttccgcttgtttttgcggagggacttggacactgcacgaaagcaaaggctcatttggaattgaggcctgaggctgtgcccgtctattgtcgtccccggccagtgccttacaacacacgtttggttgtagaggaagaactggaccgattgttggagcagaaggtgatcaaatctgttgatcacactcattgggccgccccaattgttgtggtgaagaaggccaatgggtcagcgcgtatttgtgccgatttttctaccggtttgaacaatgcgttgctgcttcatcagcatccacttccattgcccgatgatatttttgcgaagctgaacggtggaggattttctctcaaatcgacttaaaggatgcttatttgcaagtcgaattggatgagaaatccaaggaagtgtgcacgattgccacccaccgaggaaattaccagtttcagcgactgccgtttggagttaagtccgcgccaggcatatttcagtcaattatggactcaatgctggcagactgtccatttgctacggcatatttggatgatgtgatcgtcgtaagccgatcatccgaagatcatcagaagcaccttgaagaggtcttcaaacgttttgaaaagtttgggttccgtgtcaagccagagaagtgcttcttctgtcaggaccagatcaaatatcttggatttattattgatcaggacgggagacgaccggaccaaacaaaaattcaggcgatttctgaaatgcctgttccgacaaacgtgtccgaggttcgatcatttttgggaatgatcaaccattaccaacaattcgtgaagaacatgaggttcatccgacagccgttggacgaattgttgaaacaggacaaagtgtggcaatggtcggaagattgtcaaaatgcctttgagaaggtaatcaaaattttgaaatctgatcaattgctgacacactacgatccggcacaagagatcattgtatcggctgatgcttctgagcatggaataggagccgtgatctctcatcgcttttcggatggaagtctaaaagccatagcacatgcatcatcgtccctgtcagcagcagaaaagaattattctcaaattgagaaggaaggcttagcgattgtctttgccgttcaaaaattccacaagtatctcttcgggagacacttcgttctgcagacggaccacaagccgttgttgtccatttttggcaacaaaaagggaattaaggcttgcacagcgaatcgattgcagagatgggcaatcactttgctcggctatgacttcgaaatcgaataccaaaatactgctgattttggtcaagcggatgttttgtctcgcctaattgcgaagacaccagtgccggacaacgaagtgatcattgcaaacattcgtgagagcaatgaaacgggagtgttgaattttgttacgaaaactcttcctctcgatcaccgtgatttggctaatgccgcgaaaagtgatcaggtgatcaaaaatgtgaagaaatttgtctgctcacattggccaacaaagaacaaaatggccgcagacattgttccgttccatcgacgacgacacgctttgaccatcgaggatgaatgtctgctttatgcggacagagttgtgattccggcatcgcttcaaaaagatgtcctacaactcctgcacagaggccatccagggatgaaacgaatgaaagctctcgccaggcagtacgtttactggcctgggatggacgaacaaattgagaattttgtcaaaatgtgcaacgaatgcacaatggaagcaaagatgccggtgaagagtgagcttcactcgtggccgaaagctgacggaccgtggaaacgcgttcatttggactacgccggaccgtttatgggaaaaatgtttctcataattgttgacgcgtactagaagtggcccgaggtcttcgaaatgcgttcatcgaattccgcggctacaatcgacaaattgcgatcactctgtgccagttatggccttcccgaaattttagtcacggacaacggcacacaattcgcttcaaaagaatttaaggaatttgtgaccgaaaatggcatcaaccatctgttctccgctccgtacaatcccatgtcgaacggacaagccgagcgttttgtcgatacgttcaagaggacatgtaggaagatcaagggagaaggagcatcggaaatgttgaccacatttttggcaacataccggaccacgccttgtgaggctttgccggagtgcaaatgtccggccgaaatgtttctaagaaggaaaccgcgcacgactttggacttgttgaggccaaagccaaaggcacagataattcgagacgagaccatggagaagcaattcaataggcgccatggagccaaaccgagatcttttgccgtgggcgataaggttctcgctcggcatcgtctttctcagccttggcgccccggaaaaatcaccaaatgtaaaggtgtcatttacgacgtcgaattttttgacggaaaattcggacggttccatgccaatcagttgcttgtgagaagcactgacgaaaacggcacaaacgcattgaacgtgttcaatgatgcgtttgatttgccattggcaccaccgctggttcagcatggtggacaagcgcaattgcctgtagtggcacccgctgctgtcatcgcacaagccgtggccgaagaacccgtcgtggaggaagctgatcgagcgcccgaagtgcctgctcaacgacgatcgcaacgcaatcggcgaccgcctgagcgctactccccataagaacggacgaatcaaacggacgtgtcagacggacgaatcacggaagaaccgagggaaaagatttttttttaagggggaagatgttgggaccggtactctattgtccgcccatattattttcattcctttatttctctccccttattctctcctctatctctcttcccttctgtcccccataaataccctgcggtcctctgacctccccgtcattcatttgtcacccatttattttgcttatattgttcaatcaatattcgccctttgtcctccgtccctcttctcttcattatttatttgtgtcttcccaacttgaataaatcctttatttattcacttcgccggtttgggatttgacggcacaacaatgttgtattatatgttataagaattttaggcagacaatttatttatttttggtttaattataaattaatttaaaaaaataataattatttttaaagatatgctttgggattaaaaatgccaattcacaaatttaattttttaatatgtcacggaaacattagcagcaaatttaattgcgacaatttgccatttataacaattgagagcgtgagaaataattaatttttttaaagtaactgaattatgaaaaaagttgtttagatattaaagataaatttcaaaaaaaatttaattactaatgctatatatttcaaaataattcataggattgctaaattaagacacagaaaatattgagaaataaaaataatgaagaaaaaaacaataaaagcatatatatttttacaatgaaaaggatcagaaaattttaaaagtaagaacttcctttgtcagaatttatttctcaactcatcatgaatgttgtattcattcccatgtaaaagtacaacatcaaaaatgtggagcaatttcaaagtccaaaagcccagtgcattctgtcgggaagaggaaattaatccaaatttggcgcgggaaaagttctattttgttgtcgacttatcggggcggaggatggcacgaaaaatcggatgatggcaccaattgcctcgaggccattctgccgattttttgttcaaagctttagagtattttacaaaaaaaataaaaaacatttggactaaaaataaccaatttgttggcaaaaattgaaaaaattcagagatccaactgaattttcctgcattgtccatagtcgtagctgagaatgaattattaaattgttcattaaaaaattagtaaaaataaaaaaatcctttctttgttttaatttaattaattttattttcccatgcagaatgagtttttattctgaaaaatggaggaaataatttttttcaccgcgcggaaatgaaaattggggcgggggccgcacggctcagcgcccttgcacctccggcgggaacattttttgtcacagcttaattaaacgggcaaaaatcgcgtttaattattcataaattggggtcctaaagatttgcatgttcgaaaaatgcttggtttcattatgcatattagtaaagtacgaccatatatcgcaacagcgactgtgcacaattaatgaattatttaattatttttttgattacgacaacttccgcat

SEQ ID NO: 4721 - DNA, 1659 bp, Heterodera glycines
tttctgttcctcttcctctttctgttcctcttccactttctcttcctctttctgttcctcttccactttctcttcctctttctgttcctcttctgtccctcttcctgttcccctttctgttcctcttccactttctcttcctcttccaatttctgttcccctttctgttcctcttccgctttctctttctgatcctcttccactttctgttcctgttctatttctttttctgttcctcttcctctttctgttcctcttccactttctcttccactttctgttcctcttccactttcctctttctgttcctcttctgtccctcttcctgttcccctttctgttcctcttccactttctcttcctcttccaatttctgttcccctttctgttcctcttccgctttctctttctgatcctcttccactttctgttcctgttctatttctttttctgttcctcttcctctttctgttcctcttccactttctcttccactttctgttcctcttccactttctcttcctctttctgttcctcttctgtccctcttcctgttcccctttctgttcctcttccactttctcttcctcttccaatttctgttcccctttctgttcctcttccgctttctctttctgatccttttccactttctgttcctcttctatttctttttctgttcctctttttgtttctcttccacttcctcttcccctttctattcctcttcctctttctgttcctcttctgtccctctttcatattttttagttttaaattttgtttgttttatttaaatttttatctatttttaattttccgtaagccatgaatcaaaatttattctgttagattggatcagaaactttttttaaaacatattatttcactctttatgtaaattttttatttttatttcctaaacgtaattatcaaaaaaaaaattaaaaagtttgataatcagaattaatgggaatcgaaccctatacactacaccaacaaagaaaggcatactaaccacttgttcaccggattgcttgtcttgtactcgtaaatacttatttatcttaaatattatttagatttatttattatattattttttaaattattatttacctattttattgattaatattaaattcatttttaaatttggttttaaataaatcttatttcattaatttaaaataactaatattttatttccataaagttaattaaataaaaaaacaaaacaaaaagtagaattatatataatatttttttaaattactctgaagcagtaggacccgaacccactataaaaggcaggcacactaaccacttgaccactgggccgcttgccaccatgcattttaatgcccttttcccttcctttcttttattgcaaaaagctcgaccaaaagtgcataattttatttttctttataaaatatttagattttattttattttaatgttatttttgtatttatttaatattcaagttattttaaatttaatttaaaaaaattattattttataaattaaaaaaaattattattttattttaataaatttaattaatttaaaaaacaaaaaaataaatctaaaaagaaaaaaagatgaagtattcaaactaaatattgaatagaaaacaaacatcagcaatggga

SEQ ID NO: 4722 - DNA, 1724 bp, Heterodera glycines
atatataaagttagctattgcaaaaattagctcaaattactcatttaactgcttaaagaaagcagtgccctttccgctggggttttcccgcatttcactttctccgccccttcgtcccccgcagcgatttccaacgacgacgacacgtgcattgaccggttggaattctggaagtgcgatgagttcctttatgtgtgccgttattaccgcgagacgtacgccttcgaaatgtgccgcaaaacatgcaatctgtgcgacttcaatcggaaggcgaaagtgaagctgatgatggcacaaccgtactattattaccacccttattggatgggaggcaaaaaatgatgacgaaaaaattgaagtggaaagaatatttggacaagaaagaattgcaaattatcaggacaaggacacgaaaaatgctaaacgagtcaccaaattagagatcggcacaatcgatcttttttcgcttttgtaccgaaaaaattattaaaaaaaacatttgaaaaagaaccaaaaatatccaaactctaaaatgtcaaaaaaaaaaaaaattaattttgcgttttctgtgtctttaatgtacagttaacatgattttgcaatgatcttatctagtttcgcctttaaacatccatttcgtggatttagccctagaaatcccatcccgactaatcataagataaatttcgatgcaaattaacattcaattccatcgtattggcaaagaatagatgggtgattgtggggcgctgtcactcggcccattttgtagcgggtgccgtcggcatcaatttgccaggcacaatgaaaattttcgaaatagttcagtgtcgaaaatttatctgtgccgaaaatactcagtgtcgaaattaccagccacgcattttcatttgaaaaaatattattaatcatttttttattaaaaattctcagtcattgttgagaattgctgtgctcccggtcctttcttattaacttaataatacaatacataaataaaatccatgaaaaattattggtctttttcaattccgacttttctgttcttttatcgaaaaaacgaccgaaaaactgattcaattcaattcaattcaatttatacgcaaaagcgtgacaccgacattaaaacaaaataaataaaataaaattggtcactgaatgagatggggcggtttcaaaagtaaaacatcaatatcataggtgtcaagaagtttagcaaactcagtagaattaagtaacctcgcctctttaggcaaactcctatagaggcgagaggtacgaataaaaaacgaatgaaaccgaacattggttgaacaataagcggtttttataatataatcgtttttcagtcctgaatatatttttgaaaaagaatcattatgctgaatatggatctttcccaaaattatatcatggaagagttttaaatctatttttattctgcgttttaagagggattcttgtttaaagagttggaggagttcgttatacccgggtatatcatccttattattattacgtctaaaaacaatacgtaaaaatgttttttgaacattttcaagagcatcgatgtcttttttcatatatggattaaaaaccggagaaccaaattccaaaatggaccgacaataaatattaaatatatttataagaatttttgggtttttcgttttaagtgacgagagtaaagcaaaagatgtttcttattgcttttttggtaataa

SEQ ID NO: 4723 - DNA, 3059 bp, Heterodera glycines
caatttgaatttgaattttgatttcatttccaattcctcccttccttttaccctttccgttcccttttccttccgcgtttttctctcaattattgccactgttcccatcaccgcgacaaagtaagtgcactgaaacagcaaattgatgctcaacgcggccatgttggccaagcacagcaaagtgatttcgagcgacccaatgaaacagccgatggcatcggccaagatgttggccaatgccgagacgagaatggacgggcccgtgtccatcagcacctgcggggggagggagggaaaggcattagtggcattaattactgtggtatttcatttgcattttgttttccattttgcatttcgattgttttccatttcgttttgagtgttattcaacattcattgacctttgccattgtgtccgccactttttcctcaatttcgtcgtcactttgtcccgcctttgtcgtccttttgtccccctcctcctcctcccccttttcctttgttattctgttccacgcgtgagtcatcaaaaaggcggcgtccacgccgatggccaaaaccaaaaaaggacaaacgcacagaatggaggagaagcgcattccgcacaacagcagaaggccaagtgcagtcccggtggccataaaggggcaaacgcaagcgacgagggccaaggaaacctggggaaaatgggaggggggggacgaatgggaaaagtgggaaatggggctgggattggaaaatcttctatctgattcgaagaaagtcaactttttcccaattgctgaaatttactggtcagttaaactaatgagtgaatgccttgtggacggtcgcctgttgaaaatacgcggcggacaaaggaatgctaatggccgtacagaaagccatgacggcgaatccgaagccaaggtacggcagcatggacaagctggcacggacgaactccgcctcgacataactttggcttatgctcatcacatggatcaaatcactgcgaaattcgctgaaagttaaaaatgatcaaaacaattatagtaattgattgaacgaacttctcgaagaacttggacactctgatcagatactgcttcatctcgtcgctgctcagccccaacagtgtccgttcggctcggtattgaagggcgaccatctccacagaagcgatgttggtgatttttgtggtcaaattgtttttggcaaagttaacgccgtggaaatggggctgaaattaaaaggtgatttaaaatttaaacccgccgatggcctttgtttgcctgaatattagcttttcgcccccacacattgatgttcggatagttcagacttatctccgctgcttttcctccttcttccgtttgggtgacgaatcctttctgaaatttttaaaaagtaattttaagatctaattgatgcaaatcaattaatttttgactttttacttgcccaaaaaagtcgcaagggttcgttaatgtcgcaaaagttgtagcaaaactcggcaaatgcttccgacttattcgtggcatggttttggagagtgatgttccaatttatcaggtcatcgacctgaagacaaaccaatgttttgtgccttgtgccattttggatattaatttgcccattaattacccccgctcgccctaattatctttcctcccccttttattttttattttcctattgatttatttggctgcttttctcctcactctgatcacttcctccagcattttgctctgcagcatatttgtgccgatcactttcggtttgatcagcacgaaaatggcgaaattgctgcctgtgccggtgtcgttgaaaaattcgttccatgcgtccgattcggccaaagaacgcgcgccgtaaggggtccatccgttgagatcattcacaaagctgacaaatgagcactcatttttaactttttattatttaattaattttcatttacggcgttttgaatattttcactgcgcccaaagtcgaaagaattgagcaaattgccattattaaagtgcgatgtttcaccacaaaaagagcccatttttggtaaaagacgtgcaaatgggcaataacagcagttttattatttcgtttcactgaaatttataatttcaattattatttaataattatttcaatcattttttgtttaattattaatttgtaccaattgcatcctttgggggaacaacgatggcatttgttcgtttctcctctttaaaattcggagtcactttgtccattttgcttaaattcagaaatgcacattaatagcgaataaataattaaataatattgattaaattattaaaaagtattttcggtgtaaatatttatgttaaaaaaacatttacacaaaataattgcgcattaaaataggaaggaaaggaaaagagaacatttatttatttatttatttattcgttccgagaaagtggccaaaacgagtaattaataaatgaccatttttctttgctcatattttgttatttgttcgcatttcgcccgccgtttttccattttccctcttttttttatttccaaaatttgtaatttcccaattttcctctcatccccttacaaaaagttaccaaatttaaatacttttgtggcatttattcagtcgtaaaaaattgcaatttcctccgtttgaccttccttctgcttttttttgtttgttttgtcgaaattcgacttttggacggcccaaagtgatcacttcccacgtcactgtgagaagagaagaaaatggaagagaagggaagggaagagcaactttctccggtttaattttacaacaaatggaaattcagcgaacggatgggaaaaagggaaaaaatgggaaaaaagaggggggacgaaataggggacggcggaccaaggcccatttcaaatctattagtgttttcgatcacatgtgtgtacaattaatttgttgaacacaaattgtgaaagaaaaatgccactggggaggccaaaggcctttttggggcaaagatttgcgaaatgagcgaaaaagttcctttgaatggaattcgaattgtcagattaagaacgga

SEQ ID NO: 4724 - DNA, 1612 bp, Heterodera glycines
  unsure (1)..(1612): unsure at all n locations
ttgtgaatttttaatattagcggtgtgagatgaaaaaaaaaaagttancggggcctcaaaaatcgaaattttggctgtgttttcacttaaaattggtggctcagttagttaaattcgcatttttggagctcgggttcgaatccaacataaaaataaataaatttccattttttgactaacagttcgcgaggttcccttgtaagttttcgatgagaaaatccctactcaaatcattacttcctattaaactcacaaataagatcaattacttttactcgcttaattaattcgaaattcattttcagcaagtccacggcgaagccggataaacactttccctgacattttgccaaacagcacatgaacacctgtggagaaaagggccacaaattaatatttatttcttattaattagcatttattttattgggacattccattgattattgaatatttttttgtttcttgaattttattttttgcattttatttaatgaaagcgttggtttttaaataaattatttttcattaagccgctttgtcttcgctttttaatttattactcccattatctcagctttttccgatggatgaacacttgtcagtcggctaactcaacaaaagcttttatcacattttgcctttagtccgatcgatcgctcaaaaaatacgcaaaagcgaacaaactcaaaaacatttagctattttatgttcaaatatttgttacaattaatgtataaaattactcacaaatggcattattagtgacttatttatgggaaacggaaagtccaaaatgccgtttcaaaatgatttctcccatttttttgtaataatttccgttgaaaaagcgaagctgactcatcatcactcgtaattatttgtaatttgtacatttattattcattcattcgttgggttatttttgttttctctttgaattcgttgtcaacaaaacccccgccgctctttcgccggccaattcaattgatcaatcatcgatgattagtggtgatttcaccaaaaacctgttcaaccaaccaaccacacacatcagagaaatgaaatttagttgaggaggaaagcacaattcaacactttgaaccaaataattaatgcacagactttgagttaaaagcaaaataattgcacaaattattaaattaaaaacgcagaaaacatcgaattttatcaattcattttacacaattatccattttcagagaagaacattcacattttcatatttaatttcatctttaaatctgccattaataaagcatctcaaataatccgccactggtaattcaaaagacaaataatatgttaataattaaatagataatatttagcatattatttcctactctttctcacaaaattttcccggggatacgaaaacaaattttaatttttgtccaacctacgattttcatagtgaatcaaatacaacaaagttggtagtgtgttaagaagctatcattattaagcttcgagaaacgatgggacaactttaccttgtccgtttatgcctgtttaaaaatggacatgcgacaaaaaacaatgaaaaataaattaacaattttggccatctatcgtgccattaccatcc

SEQ ID NO: 4725 - DNA, 3898 bp, Heterodera glycines
  unsure (1)..(3898): unsure at all n locations
gcttggctcgtcctttcttctcccctnatgtactcccttttcttctcctcctccgctcctaaatcaatatatttttgttgcacataaattatagcccatgtctcagcaaatgcatttaccaatttcattcaattatttgtatttttatttttaattttaaaattattaaaattaattaaaatgacatttatttctcattttgataatttcccaaaaatattatttaaaaatgataaattattttcagacaaattgctcgcctcgcctctcccacacattttttggagtgtgaggagccgaggccgcaatttccaaacttttttccaatcaccgcccccgccccgtaaatcgtcgtcccaaatggcgggaattttgtccattttctcgagttttctcgaagcaaatggacttggcggacccgacttttggggacgatcgattctcgtgatgcaggtggacttaaaaatttcgtgccaaccaaaactgttttatattatctttaaaaatcttattctgaaattaaatttttgacaaaagaatcatcactagggcggggacaaatattttattataaatcccaaaatatttaaataaatattttcaaaaaaatgctgaaatgttgaccaaaatattgagcaaatatttaagaaaaatgaaaaactttgtggaaaaaaataattaactgctcataacactacaaaaatttattcattgattacagctgcaaataatatatttttcgagtttgaatgcattttctaaaataagtaaaattataaaaatcaaaaattttggtcaataaagaaaaaaacaaaaatttggttaagaaaaaaaaaaaacaggattttcttggaaaaatttttgaaaatttttgttatcgcgttaaaaaatcttttagcatttttgttaaataatttcttagttttacattaaaagtttgaaaaatatcaaaatatttataaaaatattgacaaaatccctaatattaaaataaatttttattttataaaaattcaaaatatttttttatgactaaaactgacgttcaaatgcaaaaatttaagcgcagaaatgcgttttttatctcctattcattgcaataagcaaaaaaaaaaaaaaaaattcaaataaatgtttgccccagccctaatgatcatctctgattttaaaacatattttaaagaacaattaattaaagtttgaaaaattattttcggagtttctcatcgaccaactgagtccccccccccaggcgttccatctgctgatcaactcttatctcgagctgcgctttttcctcccgcttctcctctccgtcttcgcttcgccccccggcgctttgcttttgtcgcgccttctcaccatttgccagtccctttactttgtactgctccaatttgtcgcctttgttctgctgctctgccgtttggtgctcaattcgatgattctcccattggtccggatttttttcctttttttaatgaaatgatttgaagatcactgtccatttggtgctgatcgcctcaattctgctccaacttgtccaaatgcttttcgtcggccaagcgggcaccgaattcttcatttggtgttggtatttgagtgcgtgtgtcacttttacgctgtaccaggcaatgtcagtgttcagtgttatttgtctgttcacatcggagccaatgttttggacgacattcaacttgtttttggccaattcatttttgaatcgactcgttttttaattgttccaactctttttcttgattgaaacggtgctgattgtgagccgttataaaaaaaagccaacaaaaagggcgttataaaaaaaaccatcaaatgaaaaatttcaacaaaaaactacccataactttgctcaaacccaatgaaaattttaaatctttaaacaattctattttagcctccaaaatttcaaaaaatttggttatgtttcaaaaaagctatggccaaaagtacatcaggaaccaggttttctgacatttttggcaataacttttttgaaattttgcaggctagtagagaattgttaaggctatcgaatgatattaagaattaaatttagttaagtttgagcaaaagttataatttaaaaatttctgctctatttaaactcaggaatgctttttaagctagttttcacagtttttcactatttttggtcaattttcaaaatttaaataacgaacaataataattagagctagaaatttaggtaagaaaaatcgcgaaataggtattaaaaaaagctcaaaatagttattaaatagatacaaaaatcccgaaatagctagaaaaataggtaaataaaattttttttattacgattttttagtggaaaaaagcaaacaaagagtgaaattttggttatatttctttgtaaacgaataatttaaatatttttaatatttaaaatagacattttaaattaaaaaattatgtcaataaaaaaataaataaattttggggataatttttcaatttttgtatcgaaccgacaaaaaagattcctgttgaattcaaatagaccaaaaaatctttttttactttcaagccaaaaaactcttggaataataaaataaaatgaagtttttactaatattttttttaccggaaaaaggattcagtaaataaatcctttttccaatttaaatttacatttttttaaactttgtctgttttaatatatatattttcgataggcttttttccaccgaacgttctcccaaactttgtgccacaattgcgcccgctcggacgacgcgcgtccgccgcttttggctggctccccacccgccgccgcttggccaccgtttggccgaggcgcgtgggctgcgtttgttggaggacgccgtggtggcctaatgaaacgaatgatgaccaaaaacccacaaatttattgtgccaaattgtgaatattttttatgttattaatttaatttattaattaaataaaaaattaattaataaaccaatttagaaagggccaaattttcccacataatttgcttaaaattttgattttacaaaataatgatttattcttctttttttattttgactttttgcatttattcttctcttatttgttaaagaaaaatggtaccgaattctcatgggaataaattaaaaacatttaaagtattttcgttggggctaaattaatatgtctggactatgctgcccaactaaataggacatcattttcaccaaaaaatcaggctttccgtgttttactcgccccccccccactctaaaaattttaaaaatctatcattttttgaaattgttaaaaaatgaacaattcaaataaatcattaaatgagtcagacaggtggcataaaggcaatgatattgcgcaaaatctcatcaaaatcgtcaaggtttcgtcgcttaacatcatcaattgggagtgtggaagaatcaagccaagtatctgttcggataccattggttaatttacaacaatttggtacagcgccaaattgcaattactttaccacggttactgtatgtggaccggcacattgctgacccacattagctttgccgagcccgatgaagaacctcggcattctgaaaaatcagcagcgtccaattcattggagcagagcgggaaaagtgatttgaaattgtacggcatgactcatttcatgatttaattgaatttttcatttttaacattttcaaaaaatcataaatattattaatctatgaccagcagagatatcaaaacaaacatcatattcgtgaccttgaaaaccccaatttttctttgtatgtcaaattttataaatttggcatcattcgaaagctctacatgtttagaagctgttgataagataatgctaagcgatagaacaacttctaaaaaagttgcaacatg

SEQ ID NO: 4726 - DNA, 2761 bp, Heterodera glycines
taattactagtgatgctcgagactctcggtctcgactcgagaaaagtctcggtttttttggtctcggtctcgggttttcagtctcggtctcggtcttcgagactttcgagactcgagactgagacttttttacacccctagttcttcgttttttcgttggatcagttccccttgaaaattggacataaaatatggactaaaaaagcacgaaatatggactaaaaagctcaaaaatggccaaatttggacctatatggactaaaaactgccaaaatatggatttatatggactaaaaaccttcatcagatcaaaaaattttatttaataaatggggctaaaatttagcccttttcaccctcaatcagaaaagacacctaaaaccatcaattttttcttaaaaaattagctcaaaatgccaaatttggtaactttttgatgaaaatcttttaacaaatcacacttaaattttctaaattttccccggcggcgcctaacggcaccgccgtacccctattcccgaaaagttcttttaaaaaagagcgccgcaaaaaaatgatgtaaaaagtcattcatatgaaaaggaaaaacggactatagcttaattaaataaggaaaaaagcaaaaaatgttataaaaacctccaaagattgttttttaaaattttttatatgttttaatcgatttttaagtgaaccagaaaaattttttggaaaaagtctcgagtctcgactcgagaaaagtctcgggttttttgggtctcggcctcggtatcgagtctcggggtctagtctcggaatcggtctcgagtctcggggtcaagtctcggtctcgagtctcgggaaatttttggtctcgagcatcactacaaaatcggtcatttttatcctccaaggcttattggtcacttcgccaatatggtaatgaaggtttgaatgcaattcacaatttttaaaaacaatcccaaagtcctaaattcagaaaatggccaaattccaaatcgcaactccattttgcttcttttctcacattttttcctcctttctttttttaaattgttatgaagtgtaattaatattttttaataggaaatgtaatgcctcggaataaaccaaaagggaaaagcacaaagaaagaaatttccttctttttaaattaattttgactctattattcttttgtttcgtattgcaatatgtaaatgctctttttatctgacattttgcgacgatctctcctaataggcatttgtaaaattggagtttatttgggtttagcttagcaattattttgttattaatttttcttaagaattagctaatgagttagttgtaattatagtacaaaaataataattcataattacattgtccgttttaaatgaaaaacattgtttgtgattaagtgtatactatttaagtgtaattgcttacatattcataaaatggctcagctcagtttcctttatcaaaaatataaataattctttttttctgttttttaatccatttttgtccgtttctccatcatttattaaagaacccaaacctcattaagccctaatttctgtctttttttttctttttttggattgagaaaatggagctgtatttgttccgtcccactgattaccaacgactttacaattgttcctcgtacaaaattgacgacattccgcttgttaaccgtacccataccgtactcggcatctccttcatcatgcagttcgtgctgttccaattgtgctacatcccttggtacgtttagtttgtgcttgttcccctaattatgtgctaacatttagcatgttctccatttggaaacaccgtgaccaggcttgctacaagttcatgttcttcatcggtctcatcgacattctctgtttattcatcaactgcttaatgcacggctatttcgccatcacaggcgttgtgttctgttcctatcccgacttgatctacttgtccggcattgtcggattttgtaagcggcctacggctgttcactaaaaatacaaagaaaaagcgaatatggatcggtagctcaatggtagtctgcccattaaagggttggcgtcggctcaattcaaaccctatgcctaattttggctcatttattattttattggccgtccctttttgctttggtatgtattatggctttcttattttgtgctaattagtgtcacttttggcatttcaattctatgctaattaccatcccatttgcccttccgttttcatccttttcttttctcagtcttttgggtggccgaatcatcggcggacattcttcttgcggtaaaccgatgtgttgagatgatctcgcccgtttggggggaacggctttaccacggcgggcgtgcctggctttggctcattccgcccctcctctacgccacttacatcgccatcacgcaaatgccggttcttttcagcggcatttacttttcctggttctttaaccctcatggtatatgtcatttgtacattggcatttggcttttccttttttagcatttgctttaccctttttcatttttagtcggatacatcgacgactttggcacaattgtgagaaatgcatttttatattataattcttgcaagtccaagtggtgttttattttggtctttattatggtgctgggacgttagtcaaaaaaccatcaaatggaaaattattgacagaaaataacgcaataacttcgcacaaaatgaaccagatttcaaaatcttaatatttcgatagccctaagtgttt

SEQ ID NO: 4727 - DNA, 1599 bp, Heterodera glycines
caatgcggcaggaggcattacgaactcaaacattggcatgacaaaacagcagagcaattgcgatttcaaaatgattgaactccattaattaattgaaaatggcaattaatttggcaattcgtatatatacagcgaaataaccttatagtaaactgcgatcacaaacaatccaatcgcttcacaatgtcatttttgtacacaatgattgatttttcgattaattttcactttgaaagaagaattaattgataggtttaatttaataattttcacgcttttttaagggcctaaattttttctataaaatgacagtttataatatgccattatataagtaattctaaaagtcaaatcgtaataaacagttccgctgggaaattttaaaatttttttcgtgcttttttgaagtcaaatttgaaatctttgggtgccaccatgaaaaattgttgctagaaaatcgttgtaaaatttgtatgaaaattttcaaaatttctccttattgagaaaattaaacgtttagagtgtgcctgttttttttttttgttcaatttaaaacattcattcaattttctctcgttccatttgatcaaaattaattaaaacataaagaaagaaaaaaagagacacaatatttttattatttttcgtaaaaagaaagtgcgacccaatcgtatgaccgattaattaataacaaattttgttgaaagaagaagattttctgaaagttcgttaaatgttttttttattataattcaaatttcttattaatctaatgatgttattttaaaaatattaaataatttagaagatctttataattttaaattaatcttatcatcaaccattcccgaaataggttaattgcgccaatttaaacgccacgaaatgaatgaaatgggaaaataatttaaggattcgaataaaaaaaagtataataaattaaagaagcaatgaacccaattccaccaactcatatttaagcagccaaaaagtaattgcaaacacttcaatagaaagtgtaaaatggcacaaattcatttcaaaattttccttatcttttctctcattactttttcacaatgccgaatcaattcagaaccgagtgaaaaaggtgagaaaaagaaattaaaaagtttaatttgcttggtcattatgagggcactttattggacaataaaataagcgcaaaatattcatatcagtagaaatctctgatattggaataacaacattttttgctcttatttctgaatttcgcacaattgtcttaattttcattaatttcattaaaattcccttcttcaaaattttcgagaatatttttaaacaaaattaattaacgataatccattaaatttacctaactgatgacatgaaatcatttccaataatttgctcattagtaaattgatgagttttcaagatgtaactctgttttagaaggcccttcttcaattggtggaattcaaaatgcaacaagcgatcatcggtctgctgctgctgcttctgatcaccatgcttcttcatgcgatggttttggttggacactgaacaagggaaaataatgtaaagtgatcgaaggactgatggattggaagt

SEQ ID NO: 4728 - DNA, 685 bp, Heterodera glycines
tatagcatgaataaaatatgaattttttttttgccttcgcgcggcagggggcgagagagcgcggttttggtggggacggcgagcagcgatttttgaagggagagggggcgagcgacgactgtctgtccggcagacggaagagtttcctaccgctgctaatgcccgcgccacgctgggagttttcttccttcctaatgctcgccccaatctcccccggcggaaggcttatgtctataatgcttgcccaccccgcactcgctggaaatggggggcgtctcttcccacgctttaacactcgccgctccaaatctcgcccggggctacttactaaaaataccccccccccttcccccagctggtcccataatgacataatgttggtccatcccacccccccccctgcccccatcccgcgggggaggaggggggagggcttttcctttcaatgctcgcttcccccccccgcccccgccggcggtggaccctttcccccaaatgctcgacctttccgctcgcaaaggcgactacatatgtgcccacatttgtgtgtgagtgcgtagttttgagtgcacttcatcaattttgctgctagctcttagcagacaagatgtggaggtgaatgtctgtcctccgtccgggcccgagggcgggcgctcagatgacgcgtgcggcaacaaagcgccag

SEQ ID NO: 4729 - DNA, 3185 bp, Heterodera glycines
gccgcccgaaaccggaaaaatgaattttttatatctactttttttcgatgctcgtttcgtttcttaaaaattgccaacattggcgtttcgtaaaaacgtccatcagggagttttataactaaaactgtaacccatggacattggacaatggttaatctcacagtagatggacaattggacaatggttaatccgacaatggacaatttgacagtcgttaatccgacagtggacattccgaacaattggacagtggttaatccgacaatggacaattggacactggttaatccaacggttaatccgacagtggacattccgataatggacaattagacagtcgttaatccgacaatggaggacctgccggcagtggttaatccgacagtgaggacaatgggcagagttggacgatcggacagtggacaattctacagttaatttaagaattaaaaaaaaatttgtagtcaaaaaaaatgcgaatgcaatctccaattattaatcgtggcagaagaaaaacgaaattggcttttaaatcacttgtgccatcatccttcgttacttatcgcacatttatatcgttttgcatttttaggtcattcccaaaaaaatattaatttaatagcctatttttatttatttttcttgttacttagcacgattgtccctttcggcgatcggcgttttcttatctttttgtgtattactacaggatttccactgtcggactgtccactgtcaaattgtccagtcagggattatcgaccaaagcttatgcaattgtctgtatgaaagtggtgattgttttttaacaaagtctgtatttactcgtgtttttaagagttaattatgtttaggatttgtaatttcgacattttatggcacttttataaaatttctaagtgggcaattttacaaaaggaccgaactcgcttttttcaaaaaaaaattgaaatttttgaatctttttatacaatattgcttttaatacaatcatataaataacaattttttatcttacaataaaattgtttaaaatatttttttttggcttaaaaaatatggtactttcctgttatgtgtccgcaaaataaatttttaaaaaaagcaacaaagggcacgcaaattggaaaggcagcgcaccgaaattatgaaggaggcataaaagccacaatttgctccaaaatgttttcaaatggatcaacttcacggtttttaacagcctcgcgccaaagaaactcgcacaaataggagtcaagcatttgccggtgagaggcgacattttaccctttaatattttggtccttcataatttcggcgcgctgcctttgcaatttgcgtgccctgcggacacataacaggaaagtgccaatgaggactgaaattttttaatatttccatttcaaaacacgggcaataaatattacggaatgcaaaaaatgtttaaattaatattccaaataaaaatggaataattcgaacctttcatttcaaattcaagataaaaaataataattttttatagaaatatgtgtgttgtatacataaacccggcccgacgaatttcgaatttttttaatcgctttataatttagccaaaattttttaaaaaaacagcagaattgagtcatttttggacagacaaaatctactaagaaaacgggttaaattttcaaaaaaaaaaaaatgtacccggcggcgtctatcgatagtgccgattcggcaccgcctgccccttactataatcaagaaattttttttacaaagtcaaccgcgcttaaacaagtcgagaaaaaaaatgttgtttaatcaaaattacttcataaatttttagaatgcgagatttgcgagattaattccgcggaattccatcccgaaaaaaacgaaattttagttttttatttgtgcctcaattttatccaattaaatttcgcaattctttctttccacatacatacctaaataaatttgctaaatactttctcttcttctcccacgaaaacataactaaaaatagcataaaataacggtacaaccaaaccaaccaatcaataaatcaagataatcgttactctttgatctttggtcaatgttctttgtaaaacatgtttttaaacaacatcttaaccaaattatgttcgtggtgttccttcttgtggtggtggtgttcatgctgtttcttctgttggtggtggggctggtgcggcggcttttcctcctcttcctccacaacaatttgcatttgttcaatggcattgttggcttccaacaatggcactttcggtgccgtttcgatcagcgccaacgcctccgtttcaatatcagtactaaagcctcggtcatcgtccaaaagtttgatgtatgtctggatatattaaagaaagggtcctcagcaaattttccctcttgttcaatgctgaacaatggcatttccaaattttcaaaaccaaatattggcaataaaatctttaaacgttggtccatttccttcactttggtactgatttggttgatgatttgttgggctagtagcccgcgctgagctgacccaccaattttggcatttttaattctgtacaattccttcaatgggtccatgtaaaaatgcgcgtacattttttctgactcggagaaaattggttgaaaatgaaaatccttaattttgttttttttaattatcataattataatttattaaattaaatgtggcaaaaaataatatataaaattatttttattatttttttccaaaataaatattatcaaattttctcgaattttacctttttgttcagctaattaatttttaatgcaatttaatcaattaaatgtgataaataaaataattaataaataagattttttggagataatcttttattaatttttaatcgggttttagtttttatatcaaaaaacaattttcatattttaccaaaaatggttttgactcaacgttacagaatggacaacgaatttccttctttttttcaaacctttaaaattaaaaaaatattttttttattatagttttgatgccttagagcaagataactaaacacaaaccattctttgacgcatttgtagtgagaaagtgactgaaaaaaaattaaattaatttttataatattttaatggactgttttttccaggtacataataaaaaaatgcaaatctatcatttttt

SEQ ID NO: 4730 - DNA, 3136 bp, Heterodera glycines
  unsure (1)..(3136): unsure at all n locations
ggatggcatttcgaggctccaaaattttcggaaatcggaattccgagggtcaaaatttttcggaaatcggaattccgaggcttaaaaattttccgaagtcgcaaatcggaactcataccccaaaaacgttggaaatcggaattccgtgccatccctggtatctttcgtttgatagccctgctggcaaattaatgtcccctccagcgtaaatgcccgcgcgtgtctttgattttacctcgtgttcatgaacttgaatttgttcctcattaactttcatttcattgaagcaaattggacaatcatcctcatccttgtccttatctttatcctcatctttatcatcgttcttgtctttgtccttgtccttttctttattcgcataaactgccgttttaacaacttttttgacagtgaatttgcacttaaaatgagaaaaaaatataattaaaattaatgaggcaaaagcattttctgggccggagggtgtgtggagacggactgctgctctgtttttatgttgtgaaaattccagagaaaacagaatttttttcaatttaggatgttttcctaaaaattacttaattggggcaattaagcaattatgggaacaaaggagcaaattataaagataataatttgtagaaaaaaaacaagacgcattagcggtgtttattaggtaccgcctttacttttcaagtaaaaaatttcaaaaaatagttcgatttgtaaaacaacaatttaatcaaaaataaccaaattttcctgtttttgagtcaaattttttgaaaaatttcttaagtacaccgcaaatgtatgcgaaacattcaaaattttaattagatttacaatcataggcgatggacaaaaagtgcaaaatttgctaaatttttgattaaatcaattcataacttttctcagacgcaatcaaattgcacaaccttggtatcatacgatagcccttgaattgggttattagtttgctaaattaaaaaaaaatcttattatgttcttttaaagttatgacaatttttccacttttttgcttgaagttttgaaaaacttaataagatttttttaaatttagcaaactaataatgcaattcaagggccatcgaatgataccaagattgtgcaatttggttgcgtctgagaaaagttatgagttgatttagtccaaaatttcgcaaattttgcactttttgtctgacatagcacctggtaaaatcgcaaatccctccagccctggtgttaatttactgaaataaacattgatcttacctcgccatcataatgaaaaatggacagttcaagccgttcaattttgtggcgatataaatgcgtcaaattcacaggaatatttagttcgtattcattgaacacataaaataaaattaattttatttggtttttaatgaaaatcctcaaggttcccgaattagtttcgacaagccaactatgaatttggcgtttggttacaatgcttaattcatttaaaattttttttctaattttactccaacttaaaatccctttcccgagtttgatcgatcagctcagaagtgattaataaaaattatggatttaatccaatgaactcagctattataaatatggtttaaatggtgcctttttctgctgcccggatgttgttccagtgccatcatcaccaacattcggcaccgcttctgccatatcttctttatctttgatcagcggggaatagcccaacaattcgcgcttctcagcggcagccaaatcattacggtcattagcattagcgttgttctgctggtctccaccattaccaccgctttgaccattaccgccaccgccaccgttttgttgtggtgccctcctattttctcgcacaattgcgtacagaagggcgtgataattaccaccggtgccctcatttgtcgtctcgactaacacgcgtcggtgccaaaacagaccactgggcttgatgctgaatggcattgtattattttatgcgatgatgaaatattctcggcaggatttatattttggtgcggaatgcgcgacatttacagccttttaggggtccgtgccgcattttttgctgcttttgtgcttttttgtctcttttttttgggggttttcactcaaattctggctaatttcttaaaaatttcattaaaagattacaaatttccccccaaagacgcgctgccggatcatttttgaaaaaaacgaatcttaaaactggaatttgccatttttggacaaaaatctatcaaaaaattacgattaatttcaaaattttcccagcggcctatcgacatcgcctgactattatttgtttttccattaatgactaatttagtaacaaattttagattaaattatttcatatattattttataaaaaatttataataattttataaaatatgtgaaaaatggggtgatatagagcccgaaaagttcaaacttgctggtctcgctgccccgcggcattgngattcaaaattttttcgggacgaaatccctcgagtaatcccgcaaatctcgcattctcgaaatcccgctntttccaaaaaaggtgcgggattcggactggaaattcccgcaaatcccgcgcgggatatggccccgctccgatctctagctttttgattttttacgcaaatttacaattttttaagtggctaagtttcgctgcgttttttgccatttttgaaatttttgccgcttttttgaactcgtgcgccgctcctttggtgtttggtgggacggtcgaagctttacttactggatttaaaaaacccctctattagaacggcccgtttggctcttttaacgtctaaagatggaaaattttcttcatttaaggaaaaatttcacaaaaacattaaataaaaatttaaatttcgaaaaattgataaaatttgacgaaaataaacataaaaatgtggaaaatgttttatttcacgcgattttattttttaaaattttttgtgtcttctcaaaaacattttgaatcctattttataagaaaataggatttaagtaaaaaaaatttggcgattttgctcaagccgactccagccgaatgcaagcgccggcgccgccacatggtccagtcagagcgacttctcatgcgggcgagggcaca

SEQ ID NO: 4731 - DNA, 1242 bp, Heterodera glycines
  unsure (1)..(1242): unsure at all n locations
gcataaatatgacagaaanatatgacnataaagcgcgaaatgaaaaattcaaatattatatgcttaaaaatccgaaaattttttatactttatgcttgaaaaaaacgcgcaatgaaaaaaaaaatgagtgcgagcatttgtacataaaaaattaaattgaatttgtgcctatatttctttcttcgtctataggtgccgccgtgaaaattttgaaattttaattgtaatttttttgttagattttgtctgaaaagcccaaatttctaatttaagattatttttttttcaaaaatctgccgtcaggcaccgccgcgggaaattttggaatttgaaatttatcaagaaaatctgaatgaatttggatgataaaagtaaaactcggccacaacccaagaaatcaaggcaaaaatattaaaaatagcaaaaaatgcgtcactaacccccaaaaggcggaaaatgccgtgtttccgggccaaaatagaaatcctctcggaaacatttacccggtcactaattgcaacgcgcaactatttttttattgttgccagttttaaaatataatctcataaaaatctaaaagctagaagcttaagcaggatcagatcccttgcgtagttttgttggatcccccaaattctcaaccccgaattgtacctatatttttccttcttggagaaataaaattattaaagtatgtgtagatctataaatttatttataaaaaaaaaattgaaatttgttaccaaatttgcccattaatgtaaagacaaataaataaagtgacgcctggaaaattttgaaaaaattattgtaatttttgatagattttgttcaaaaaggccatatcaattttgagtgagaatgttaaaaattcggctaaaacccatgaaaagaaggtaaaaagctaaaaacgtcgctaaaaatgaatcaattcgatactgatcacccattcgagatcgaatttttgatacatgttgtttcaattgtttttggttcataaactcgatcagagaattagacaccggatcatttatttgttttaccttatttttatcgcatcaaatgtttgggatgttaaaatccccacagtatataatattttcagaatcgctttggtccgaaatgaatttgagtagctttttagtattctgaactgtacaattcggtggacgatatatatttataatttgtgttggtttttttaaaagtaatttaatgtgtataatttcactttggaatttt

SEQ ID NO: 4732 - DNA, 1810 bp, Heterodera glycines
ttttgcgaaggggtctccggccatgtaaattaatgtaaatcaatgaccttttttgctttcaacaccgcttttttcgcggcacgtttttctcaagacttttgggggacaaggagggccggcggtgccgataggcgccgccgggaaaaattttgtattttttaatgcgatttgttaacagaatttgtaaaaaaagaccaattgattaatttttgggtttttacgatgcttaaaatgaaagaaaaaaagttggaatatttttttaaattaaaatttcaattaaaataatggtaaagaaaatatgaagaatattctatcccagtggggaattgaacccaagcgagaaataataaaatcagaaggtttagccaattaaatgaaaataaataatttaatttttttttttcaaaaaatttctccttcttcaccattccctactcttttctcacccagacccccattcttaccagtgcaaatttttaccggcggtaccggtactagacaaaccggtaccgatactttgatttttgaaaaaaccggtaccggtaccaaaaaaaccggtaattaccggtcggtaccggtaccggtaccgctcaaccctagtttttagcaactataaatgtgagccctagcctgtatcgtttcggcgccgtcgttgcggcaccagcccaagttttcggacaataacttttttttctttgttaaccaaatccagacaaaaatcttggtatcattcgaaagcttaacgtgtgtagaaggctatttctaacctattataaaaggttgattgatctccgatgaaacaatttttgttcatcatacataagaaaatatgttgttttgcctttctgtaaatttatttaactgacaaagatataaaggtacttttccgtttttggcaaattttgaatttttttaaatcaaaagcgggcgcgtagaattgctaaagctacgcaccaaaattattttgaaggcatatatgccacaattagtgttaagagttcttcgaatgatgggtctgcgctagagaccggcgcgggacgggatcccaagcgggattttgcgggctcccagtccgcaatcctgcattttttggaaaatacgggattaatcccgtgggatcccggaaatttttcgaattttctaaaatccagcaatcccgcgcgggatcccgaaattttaaatgcgggatttgcgggattaatccccatgggatcctgtcccgtaaaaaattttggattccaatcccgcagcgggatccgcaaatttgaaatttccggtctctagtctgcgccacgggttttgacattttcgcgccagaggaattcgcacaaatacgagtcaagttctactcatccacttttgattcaacctttggccccaaaacggaaaagtaccagcaacagcttctaaaagttgtcttagataatacatttggccaccttctgatcctgccccacaaaattttgagtttcaatcccgcagcgggacccacaaacttgaaatttccggccaccgagttgaaattctgcaatttccaaataaatctcttttaaaaaaattagatttaaaaacgatttcgccgaattaactcttttttcaaatgttgttagtggcgaccggaccgggatgggccgaattgaaaagagaaaaagcgaagatgcgaaaagcgagagaaaatactctgtgattttcctggttaaatctttttctcggatcacgaataaatgacgaaattcgtaccccattttggggttaaaatttgaaaaatcagaggtaaaaatgccgggtcccggtggcgccgaccagggac

SEQ ID NO: 4733 - DNA, 1790 bp, Heterodera glycines
agggaccagagcgtttgggcccccctttttgggccccggggtcgtttgggccccaacccaaaaatacaaaaatgtgctgtttttaaaaattaagattctaaaaactaagcctgagggatccctcgccacttggcataagttaggtttaattaacattcgctcattttttacaattttacttattccaaatcctattattttttaatagttaaccaatttgatttacattctgatttggacatttttcagaaatggctaacccaattgcaaccaaaaaacaaaaagtaaaattgtcttacgaaagccacctttacaccttcgctaaaatgagatctgatgggatgacaaaattttggagatgcgagttcaaaaaatcaatttcacattattttggagtttctccggggaatttctcgcaactatcgaatgaacccgtgaatttctgataatttttacatttctattgttaaaattattgttgaatttattttaaaaatgcgtatctgccatattattaattttctttcggtggttttttttctctcgctatttctttttttaaattttcatttcaattctttagtcggaatattacaaaataaaaatattttcatttttaaattctttgtaaaaccgatttgatcaaattaaatacaaatatgaagcataacaattgcaaatatttattcatcttctcttcaaagtgtggtcgcccaattacaattcgttgtgcctaaaataaaaattgccaaaaaacttaagacatatttttttggatttacagagtttcggcacgcagaatttcgacgacttcagtatgaccctttttttgagcataatcaattgccatgtcaccttaattttaaatcagtgattttttgttttcagaaaaatattgaaaaaattgtgtttctttatagaaaaaaattctacatattatttctttattaaaaaattttaaattgaagaatttctcggtcggcactgccagaccttttcccagaaatattttgaacaacgggtaatccacaaggcctggttaaagccgttgcggattaatggatacggcctggagcccagaggagaaaatccatcgggtcgaatctaagccctccatcatcgtgcctgattctagatgccctggggaaaaattctaatttttattagaattggccaaaattttaaaattttctgcccctctcctcttgcgatcaacgaattattcgaccactaccattttcatccttccaatcggtgcgtgcttttttcgacaccaaatattgcacaatgtccgcttgtccttcaaaggcggcgcccattaacgccgtcctccccgaggcgtcgcgaatttccaagtcggcgccagctttttccacaagaaatttgacttaaaaattaagaaaatttgaatttactgagcgcgtcaaaagttttggggcatacattttgctaattaattcattttttgattttcctttagccgtaccattttgtgatgtcactctctcattttcggggggggggggaccgaaccgaagaccttttttttgcacttaaattgaagactttttttgctattcacctttgccgctgttgggtaaaaactgcatttttcactaaaaacaacccaattttggccgttttaaagcaaaaaatagtgtaaaatggaggtccggcggtgccgataggcgccgccgggaaaatttttgaaaattttagtgttatttgttacgaaaattgactgtaaaattcaaaaatgtacccatttaaaattttcatttcgggggggg

SEQ ID NO: 4734 - DNA, 2132 bp, Heterodera glycines
atcatcgaatattaatagaaattcagatttgcttttcacatcacttttcttcggacccctcctttcccaaaagttttttgaaaaagcgctccgaaaaaaagtgatgtgaaaagcaaatctgaatttctattaatattcgatgatttagtccaaaaatgattaattgtttgaaataattgaagaaaatttgtttgaaaattttcattaatttaatttattataaaaaaccaaataattttgtattattttcacttgatataaattaaaatttgaatttttttttaaatttttaaaatttttttgaatttttaaaatttcccggttggtcccggttcccggtcccggacaaaaaccgaggtcccggtcccggcttctcaggtcccggcaagtcccggtcccggttttgcccaaaattcccggtcccgctctactctagtttttttaaatatgttttctttagtaaaaaaaactgttatttcataaaattgtcttttcttaagaaatttcgttaaatagcaaaaaaaaaattgtatcaaaaaatcataatttttaaaatcaatttaataaaaggatatcccaattaaatcctatcttttactgatccatcgaattgatcaggcaatttttgccactttccacaattaaaaaaaattggcagcagaaaaagaggaacaaaataatggtgaaaaaagttgctcattaattaattaattaccggcaatgtccgtcccattgatcagcgcaccgtgtgacagcaaatagcgcacaaaatccaattggccagagaatgcggcgtatgtcagcgcggtgtgtccgcttgagctcgcaaattccatgtccgcaccgcctttctccaccaggcatttggctaatgagaaaatatgaaaagcaaattaattaatgaagaattaagtgtgtgaagaagacaaggcacgacaaagggtccgacggcgccgaataggcgacggcgggggaaaagtcgctaatgaaaaaagattttcaaaaaattttgcaaattaaaaaacaaagcttaccgtgaaaattttaaatggagacgtttttagctcttatgcgttttaagtgagttacgtaaaattttctgaccagcaaactactgtattgtcgtcggtaatagtgtgctttgtcccccgcccctttttcgaaaaataataatttaaaaaaagtcatgtaaacgccttcctgctgggagttttcgaagtcgctgatcagtgatcacgaatctgacatccatttctattaattccaaccccgaacgcgaattagaacaaaaagatgaaaactatatcttttcaaaatttttgactactgctctaaaattgattggattcgtgttcagtggataaaatgccgtagaaaaaattattttaaaaaaaattaggagtgtcacaaaagggataagtacccaattttaagcctgtgtaataagcctaaaaaagtcataattttttatgtttttcaattaacactgagaagccatgctgtactcactgaccaacgttcaaatgctttcttaagcttgcttccatcaacggcgttgtgccgtcgggctgccgctgattgacatcggcaccggcttcaagcaacaattcacacacttccgagttgccaccaacggcggcggaatgcaatgccgaaaagccttgaaggatattaaaaatgaatttttttttgtttttttttaataggttcaatgatggaaaggaaacaaattagtttagttgcttcgtaaaaatatcaaattaatttccctttaaaaatcacagcccaaatccgtccgcctccgggccaattaggaagcggcggtggaaattgatagcgttatataatcggagcttcgtatttgcaaaaaaaaagtatgccctggttctgaattcacagttggatctgcattttctggacaaaaagccaggaaaatccaggtccaagaaaatccaggcttttcaaggcctaagagtctaaaattgctcaggaaaaactaaaggtatctttctattaataataattttgaattaatctatagaatcagcagctggctgattctcgagggtatgcttctttttaaattaggaccgcagtcgggcgagacgaggaagagggggaggggggggggg

SEQ ID NO: 4735 - DNA, 2317 bp, Heterodera glycines
tggttccggggtctggttttcggtctccagggggcaaagacggctgattggtcgcgtgacggtttgcctatttggcattcgcaactggacgcttctcacgttagggagtgagccgtttagtgcaacgacgatgcccatcggccataaattccgggggcgaaggtcctcttcgacgatgagggggcaaagacggctgattggtcgcgtgacggtttgcctatttggcattcgcaactggacgcttctcacgttagggagtgagccgtttagtgcaacgacgatgcccatcggccataaattccgggggcggaggtcctcttcgacgatgaccacttggccgatgtggggggcggtgggagttcgaaggcggggacctttatgagtccatccggcgcgctctctgatggcgaggaggtactcatgactccatttgagccagaaatggtcggcggcctcccggtaagctttccaaagtgctgcgagacgcgcgggaccggagaggcaatcgtcgtagtcgagatcagagtcgacgatttccaagtcgttggggaggccgggctggataaggtctttcggagtgaggggcttcgatgagtccggttgatctgacacccatgtgatcgggcggctgttgacgctggcctcaatttcggcaaggaatgcgctcaaatcgtcgtagtcgagaattcgtcgaccgatcgtccttttgatgcaggatttgacgaggccgattagtcgctcgtagcaagcccccatccatggactataggcgggaatgaagtcccactgaatgcctcggcgcgcggcaaaggtgacggcgtcggtttcggacggagggccggtcagaatgtcgagagccttgctcgtttgaacgaatgtcggggcgttgtcactcagaattcgctttggtcggccgcgacgactgatgaatcgtcgtaagacattgatgaagctcggggctgacagatcggtggttgcctctagatatactgcccgggtgacaaaacaggtgacgatgaccaagtaggtcttggtgagcgatccgtcgcttagtcgagaggaggtgggcccagcaaagtcgagaccgacgaattcaaagggattagccggtttgacgcgcatagagggcaaaggggggcattgttggcctcgcaaaagggggtgccgtgattcgccggcaggacgggcagcctcggaggataccacgaatggttcgtcgtgcttgaggcatccaataacggctaaggaactcagtcagagtccagtcaacgccggcgtgtctgaggtcggcgtggatttcttggacaattagccgagtcagagatgaatggcggtcgagaaggacgggagaggcgagagtgggcggaccattcgcgtgcaggagccgggttttgaggcacaaaaggccatcctcattgaaaacagtggggtgtttgtcgtagccgtcgggcgagcttcgttggtcttgtcggatgaggaaagtcctggctgctctgaacgaatcgcccgtcggagggccactccgtgggattgacgaggtgccgcttctgagccattttggtcgacgacgcccgatgaattggaggacgagaatggtcgttccgagaagggtcagcatagtgctgaaacgagccggatcaatgaggggagggggcagcggactttgtttggccatgagggtcttggtctccgattcttcaaacgggggatcggcggaaggggagtcggctggcgttgcgaacgttaactcgtcgggccattccgtttccggactcgtgagccactcaggccttttccaccaaatgtggcgagttcggagctccgcaggtgtgcagcctctcgtggctacgtcggcgggattttggtcggttctgacgaaatggaaaatggtgggcggcccttgtcggatctcgacgagccttcgttgttcgaactgggctttgggttcgtcggacttcacccatgagagggcaatttgggagtcggaccataagtgccgctcgtcgatcggacgtaggagctctttctcggcgaagcgcatggcgcgaattccgacgagaatggcgaggagttcgagtcgagggatggtgaagcgctggttcgcggttcgtggccggaggcggtttttggcgaagattaggttcgcttcagagccatcggcagtctcgcttcgaatgtagacggcggcggcgaatgtgtgttccgacgcgtcgcaaaacacgtggagttgcaggcggctttgcttgccgaaatggaatgccgcgggaccacaatcgtttggttttgccatagggacagggtttgattccaagtttcc

SEQ ID NO: 4736 - DNA, 2992 bp, Heterodera glycines
cggtaaatgatttaaaccaaaatcctattttaattatatttggaattagtccatgttagcataaaaaatattttttaattttataaaaatgaatttcattttttattccatggcaaaaataaacatttttttttttcctttttttttaaaaggaaaaatattttcggtaatataggagaaatataacatttaatttttaatttaaaatattgtaagcatcattttatttcgacctttttttcttgcctcaatattaatttataaaattctgtttattaatcttaatacaattattaagggatataaaattttagctaacaaatttttcttaattgtcttttgttgtaattttttaagaatggtcgttatattaattttttaatttaaattattatttttcttaaatttacactaaatattttgtcttcgtttcattcgtgattttactctttattgttttaaagaattatattattcacaaactaattaatttatttttcgtgtaaatttaaaattataaattaattatttgatttaggtttttaaatagtttctagtttctataaactggcttttttctaatccgttattattttattaatattaaattatggaatttgtattcttatatttgttaaatataagttttatttacttttgatgaatagcggcttttaattcttcgtaattgatttatatctgtttaatataaacttatacatctttataaagatcagataatatatgctcttttaataaacattaagatttatcgagggtcataaatcattaaagtattagtatgataatgtttcactaaatcttattagcaaggaataaatataattattatataaatatattaaagttgttattgtaataaggttttaatatttttgctctattcaaacttttattgtcaaattaatttttacatttttatttagatttgaattctaattttcatttttaatacatataaattaccaattttcaatttatgcacttttcaaatgcaatgaatgtaatttgaactctatcctttctacaaattaacctttaattaatgttcaaattttgctttttattttttattttgtaattaatgctcatttgcctgccactgctgtcgaaatgttccaagttcagcaatgcgactgatgatctgtcatttacgtcacctgctggattctcctcattataaaataacattatttttaaacaaaattagcaaaataaataaatatttcaatggaataaattttttgtttcataaatgttaaaatatttgtttcaaagcgtaataatgattaataaattaattttgttgcacactaattacataattaattaatgaataatgaatgcaattttaacaaagttgtttgtctttcaattaaaaattgttaatttttttagcaatgaatttttaacataaattttttgtccataaatgttaaaattatttatttgtttcagtaataaggataattaattaatatgttgaacattaattaccaatttagttaattacgagataatgaaaaaatagtcaaagaaatttttaacaagaatttttttgttcatcaatttaattatttatttctttactttgttgcaaactaatcacaagtgctcagaattttatgaacataaaatcgcaaatatacgcataaaaagtgaaaatatgcacttaatatttccaaattgaaggcaaaataaatttattaattttgacaaaaactgagaaaaacccgaaaattttcctgtttaagactttttttggcataaattttcattttttccatctttttgagaaaatacacaaaaaatgaagattttgaaaactttcaatccttagaggttaaaagggccgctttaatagagggaccgtcttatagcgaatttttggaaagaatgctcaaattttgccataaaggtgaattttctgagcttatttaattatgaaaaggtctcaaaaatagcatttctaggtattttttttgatttgctgaaggtttttagtccatataaatcacatattttggatggtttcggaaataaacttatatttggccattttactctttaatccatatctttttaatttatttatttgcgatttactatttcatcatcattattttttaattaagtagtattttttattttacaggaatgagtataaagatgatttttacatcaataaaaacgcaaaatattaaataaaaattacatttttacaagaaaaataaatattaaatttatattgaaaaatattataaaataaaagaaaaaataaagaaaaaaggaataaaatattcagcaaaagaatggaggaaaattgatggaaaaatagcgaaaaaattgggtcaaatcgcacatatattcaaaaatggattaaagaattcggtattcaaaaactcaaatattacaaaaaaaaagtgatgtgtgttattatttaaattagtgcgtaattgcttggcgttttgaccatttattgatgtttgttttattcattctcattttcatgcaattattctccccccttaaagtttttgtcatgttttgctgttctccgtcattttggatttgattgattgttttgttccccctcgtcttctgaatttgtttgtgtttgattttaataaagtgaaagcttatttggtcattgggttgtgagtgttcttcgagtgcggtggaccaaaataatattacgtggcgctcctgacgttttgggtaagctcactgcagtttttcttgggttttgaattttgtgagatcaaatcggctttggtttttcgaccgcgactttcataattcggcgttgtttgagcccgaagaccgggaataacgctgtggacgactttgcaaattgctcaaagactgagaaattgcataaacttgctcacaatactgagaaatttgccgaaaattttttgattgttgaacatttgttgaagattgctcaaagactgaggcttattactct

SEQ ID NO: 4737 - DNA, 2085 bp, Heterodera glycines
gatcaaatgattaattcattgaagttaataatgtagagcgaaattcggtgcacatcatttatcaggcgaccataccatctcacaacgaaaatttcgtttattcggccggacaaatgaaatttgagaataacgctacggcagtttttccaaattcgggcaccgcaagtgaagcgaaaaatgagcgtgcgtcggaattttcccaaaaaggaaaattttctgaaaccaaaaggagccattggacagattctgatcaaaagtcgatgactaaggaaaagtggaagaaagttgaaagggcaccaaggaacatcgcgcccaaagtggacttccgaattaaaagaaattgtgatgagaaaaatcacaactttggcccaaaagaacaagtgggaaagaattttgaagtaaaaaaaggcagtggtgaaaattcgggaaaaagtggaaggattttttcgtgcaaaaattctgaagttcaattagggacaattgaaattttggaaggtcggaaggagtttgagagaaaaagattgaagttgggcagaaactctcaacgagaaaagattggacgaaatgtctcacttgatggaaatggcccacgaacgaattatggcacaaatttgaattcgtttcgacaaaactgtgttttctggccaaggagagcgaatgcagaccagatgagccgtgaaactttgccatttgatcggggttgggtcgagttgaccgcctcgtgtccggattcaacttcgacttatgctgatcgacaaccaatgatgtgcggacttcggtgcaatggcagtgagctgatcccaaacggacctcacctttcgacagccggatgcgggatgtgcagctgatcggcagggacgcctctcgtcagcggccggggatgtgttattatttaaattagtgcgtaattgcttggcgttttgaccatttattgatgtttgttttattcattctcattttcatgcaattattctccccccttaaagtttttgtcatgttttgctgttctccgtcattttggatttgattgattgttttgttccccctcgtcttctgaatttgtttgtgtttgattttaataaagtgaaagcctatttggtcatttggttgtgagtgttcttcgagtgcggtggaccaaaataatattacgtggcgctcctgacgttttgggtaagctcactgcaggttttcttgaattttaaatttgggaggagaccaaatttggcttttgtttttcgacttcgactttcatatctgcggcgttgttagagcccgaagaccgggaataaacgcagcagacggcattgcaaatcgctcaaagattgagaaattgcataaaaaattttgctcaaagactgagatagtgccgaaatttttaaattgttgaaatttgtccaaagttgctcagagactgagaagattgtctaattgattttggaattgaaccaagacggttaaatgagaatgtttgtgagaacgccaccactaacgcggcaagaaaattttggcggtgagcagcaactgataaacagattgttgccagcgacaatgaacaatagcaactcagtggttattgtgatggatgaaatggcacaaaacgcgacgaatacaccgatggtgaactaaggtttacgtgtaaacaacagaaatgtgggagaaaatggtttgggagagttaaatgaaagacttgtcaaatcggttggaaaacggattgggagaaagcaatttgaacactgcgggattagtgcctatctatccccccgtccatgaatcaactccagtgagtgtattgcatggtgtggaccgaaattttagtaattcaatgggaaatcaaggacatgggaatgctattaggtcggcgagaaatgatgttcagtatacgcagccgagattggacggcgcccatccagtttttgtgcggcatatggttgttcactcccaaatgacagctatgcgccaggccaacgatcagccgtgcatggcaacgaattcttccgagcacattgctcgcgacgctcgaacggagaactttctttgcatcaacaacccgcagcaacaaattggaaatttttagcagaatttgcc

SEQ ID NO: 4738 - DNA, 4355 bp, Heterodera glycines
gaaccaagacggttaaagagaaatggcgaatttgagaacgccaccgctaacgcggcaacgcgcccttaactttggaattgcattggacaataccggaaaccaaatttcggcacaatttaacccgaatttaggacaaaaccgttcttttagccctgaattgggtcatgtagaaatggttggtaatgatggcgtttcagaatacggcgaagactttgacgacgagcagaatttgagaagcagacttttggcaatgacaatgaacatcagcaatccagcggtgaatgtaccggacgagaatgcacaaaaccagcgaatggccatgaatgcaccgcttgtgaattcgggtattttacgtgtcaacaacagaaatgtgggagtaaatggcttgggagaaacaagagaaagatttttgtcaaacaatttcgaattgggtgtaagcaatttgaacaatgcgggattagttcctacatatccccctgaccatgaatcaacgccagtgagtgccttgcgtggcgaaattcgagcttttggtaatttggttgaaaatcgccgacatgaaaatgaacttttggcggcgcgaaatgacgcacaatacactcagccgcgagtggacggagttcatccagtttttgtacgtcaaatggctgtccactcccaactgacagctttgcgcctttcggctaaccaccaagctcatgttgcaacgagttcaatcgaaccccttgctcgaaacgcgcaagtagacaacattggttgcaataacaatccgcagcgacaaatggaaaatttgcaacaaaatttacaccggcaaatggttcgtaatggtgaaaattttgaacccggaaatcacaactacggttgtgaggagcgaaacccaaacgcagaacagaatataaacccgcgcccaaatagccaacattttcatgttgcaaatcaaaatcatccgtatgttaacgacataccggacacccaaaggaatgaaatgcatgatatgattttagcgcaggcaataaaaagcctgaacaatttttcatactcaatggcattgaattcgttgcctgagctgaaagggagctccggagcagatggcgtccgatcattttttcgacattttgatgtcgcaaccgatgaatggcctgaagcgaagcgcttaagcgcactccgatcgaaatgtttggggcgtgccgaacgcgccttcaatgttgcggttgcaaacaacccgttcagctatgacagcgtaaagagggcgatgataaatctgcttgaagagacagatgccagacaaatgtcggcatttgaagagcttatgtccggtgtctatcgccgaaacaatgagagaattaacgatttggcagatcgagtttcttcgctagttagaaaagcctaccctgggcttctcgagcatctttatgatgattattcaatccgacacttcataagggcgctccaaaatcctgagttagcattgactcttgagttagcccgtcgtccttcaatgatttttgatgaatttgttgcattagcggcgagagccgaagcaacccaaaaggcatcaaagctcgcaatgcaaaggcccaactattttgctagatttaacagcaatttccaaacgcctcaatacaaccaacggccaatgcagcattttcgtcaagaaaattttccgcaaccctacaaccagcaacaaaaccggcctaattgttataattgtggaaaattcggacattttgccaggcaatgtactgaaccacaacgaaaccaaggcacgccgaataacaacagctcggcatcaaatttcgttggtcaaaattttcttgttgaacaacagaaaaaacctccacaacagaatcaaaatctttttgttggtggcatttcgatgagtcctgctgatgtggaaaaactgtttggaaaggatgggaccgaaaacgagacgaaaaatttgaataaggtttcgatcgggagaataatggccttaaaggtatcggtttgtggtttgacggcaaaagctatgttggacggaggtgcccaaatttcgatgttttcttccaaattctttgcaaaattattagctgagaaaagaatcggtaccgaacagcttcgcccatctcgtcacaacactcgcgtgatcgacataaatggaaatgcagttgagtgtattggaattgtgtctctcccaattgtcaggaaaggcaaatgtgtgtggattcgtttccacgtctcacacgcatcttttggctatgaatttgtttttgagacaaatgcattagctcgactaagttttaaacttttcgacgaggcaaatgacgaattggtcagtttttcggaagttaataatgtggaacgcaattctgtgcacgtcatttatcatacgaccataccatctcgtaacaaaaatttggttcactcggcccagcaaatgaaatttaagagtaacgctacggcaatttttacaaattcgggcaccaaaagtgaagtggaaaacaaacggacgtcggaattttgtgccaccaaaagcggccatcggccaagttttcgtcaaaagtggaagaaggttgaatggacaccaaagaacatcccgcccaaagtggaaaaccgaattatcagaaattgtgatgagaaagggcacaaaaagttcagcccaaaggaacaactgggaaagaattttgaagtgagaaagggtggtggtgaaaattcggaaaaatgtggacgaatttttcttggcaaaaaatcggaagttcaattagggacaattgaaattttggaaggcggggaggagtgaaagagaaaaaggatgaatttggacagaaagaatcagcaagaaaaagtcagactaaatgtctccagtggcggatctcaatcgaattttggggaaaatggcaaaaatttgaattcgtttcgacgaaaatgtgttttctggccaatgagagcggaagcggaccagatgagccgagaaactttgccatttgatcggggttgggtcaagctgaccgcctcgtgtccgggttcgacttcgccttctgctgatggacaacacatgatgcgcggacttcaacgcaatggcagtgagctgatcccaaacggacctcacctttcgacagccggatgcgggatgtgcagctgatcggcagggacgccactcgtcagcggccggggatgtgatattatttaaattagtgcgtaattgtttggcattttgaccttttattgatgtttgttttattcattctcattttcatgcaattattctccccccttaaaagttttgtcatgttttgctgtgctccgtcaattttggatttgattgattgtctgttttcccacctcgtcctccgacttggtttgatttgttgtgtgtttggattttaataaagtgaaagcctatttggttgtgtgttcgcgagtgttcttcaagtgcggaggaccaaaattatattacgtggcgctcctgacgttttgggtaagctcactgcaggttttcttggattttaaatttgggaaaagaccaaatttcggcttttgtttttcgacttcgagttttcatattttcggcgtagttagagcccgaagaccgggaataaacgcaacagacggcattgcaaattactcaaagattgagaaattgcacaaaatttttgctcaaagactgagaaagtgccgaaatttttaaattgttgaaagttgtcgaaaattgctcagagactgagaagattgtcgaatttgattttggaattgaaccaagacggttaaacgagaatgtttgtgagaacgccaccagtaacgcggcaagaaaattttggcggggaacagcaattgagaaacagattgttgccagcgacaaggaacaccggcaactcagtggtgattgtggtggatgaaattgaacaaaacgagcgaacggcgatgaatgcaccggttgtgagttctagttcaagcgtgaacaacagaaatgtgagagaaaatggtttgggagagacaaacgaaagatttttgtcaaacaatttcaatttgggtgtcagtaatttgaacactgcgggattagtgcctacctattcccccgcccatgaatcaaatccaatgagtttattgcatggtattggccgaagagttggcggacatggaaatgctattaggtcggcgagaaatgatgttcagtatacgcagccgagattggacggcgcccatccagtttttgtgcggcaaatggttgttcactcccaaatgacagctctgcgccaggccaacgatcatccgcgcatggcaacgaattcttccgagcacattgctcgcgacgctcgaacggagaacattctttgcatcaacaacccgcagcaacaaattggaaattttcagcagaattt

SEQ ID NO: 4739 - DNA, 1971 bp, Heterodera glycines
tgtggcaatggtcactctgtgagtgattattctgctcatccgccgatgcgtccatttcgccttccgcgccatttaccacaaaatcattttcttcgctgttattttccatcgaatcaagtaatccgaaatgactgtcatcaatggcgacatattttttcattaaaaggtccaaaaggaaagatattttctaaaaaatttgttacattaaagattaaactatttatttgaaaaagctatttagggatacgatttttaggctctaaaaaaaaaccaaaaataggcactaaaatggaaaatagggactaaaaagtctcaaatttggaaaatgacaaaatctattcaaaaataataaaataagctaattaatattgagataaataatttaaaaccaaaattcttgtcaataaaaaaatataaattttgaagatgaatttttctgaaatttccatttcttaggggtgtatttttgaaaattttcggcttggttcttggggggtttatttttcttttttattactagggttgtaaattatatggattaacatattttttctgcgcatatgctatgaagaaaggggttcaaaatagcatttatgcgttaaaattttttgatttggtgaaggtttttagtccatacatataaatccatattttcgggaataaatccatatttcgccatttttgccattttagtccaaatttcggccatttttggcaaattttcacaagaaaaatgcaaaaaaagcgaaaaacattggtgccttttttaggattttcggaaaaattcttaacaaaaatgcattaaaaacgaaaaatacacccctaagaatcgacccgaaaattttcagaaaatactagagcccggagcaggaccggatcctgtgcaggattttgcaggatcccagtccgcaatcctgcattttttggaaaatgcagaatttgcaggattaatccggccggatccggtcctgcaaaaatttttgaattccaatcctgcaacgatccgcaaatttgaaatttccgggctctaaaaaatacacccctaatttgtaagtaataaatgttgggcaaaacgccaaaataggtcaaataggctttttcaaaatttttttagggttttaggctcgaaaaataaaaacctagaaaataggcactaataactcgaagcggggcgttcactgatctcatgcaactaacaaatataaaatttgttatgttcggtgcagaatttttctcttttgttgtgcaaaatttgaagcggagctcctcccttcaaaaccaacacatccatactttttttgtattaaccaagaaatagtacgtcaaaatgagagatgtatttttctctgcattctctatttattggttcgtctcttgattttcggatgatgtgctgttaagaatgataaaaaattttccgggactcttggtctgggtcccaaaattttgatcggttctatttagactatctggtaataaaatattaaaaatgtggtaatagtttagatggtacccccccccccccccttttttaaaattttttttcaactttcaaaaaatcataaaaacatgtttctaggggttttcggggtcgctgatcacgaatccgacatccatttcgaccgattccgaacccctgacccggattcgaacaaaataaaaaaattgattttttaacaaaattcatatttattgctaaaaatcgattcaaatgcacgaaaaagaaaataatcaatgttcgcatggataaaactcagagacatgcaaccaaaaattgtaaaacgcattttcacggtctccaaaacgctgacgccaaataaattctgggaaataggtgtcgtatgtttcagtcttgttcccaagctgctgtttgaaattccttttcaatttcttccacatcgattctacattctgggtatgggcaaggagattggctggagttccaaaattttgtgaatggttcactgtcca

SEQ ID NO: 4740 - DNA, 3896 bp, Heterodera glycines
ttgttcgaatccgggtcaggggttcggaatcggtcgaaatggatgtcggattcgtgatcagcgaccccgaaaacccctagaaacatgtttttatgattttttgaaagttgaaaaaaaattttaaaaaagggggggggtaccatctaaactattaccaaaaatgtaagcatttttttattgttttttcttacaaatattcaacaggatgccaacttcatacaaatacaataattagtgattgtttgaatttcgattgctatgtagattcgggtcacattgttcaacaattagtggagcgttggaatgggagaaatcgccgggggttatgggaagggatcgacgggggggggggaaagatgggatgagatgagtgagatgcttcgttgtgctgccttagccttttgaccacgcaaattcattttgagagatttcctcgccgctttttcaatccgcacggacactgcaaatttcatcaacgccctttctctgatcgaataattaagagtaattaattaacccaattgtttttcgactccccccctcccttccccaactactttcatgcccagaaatattatttaattcgattattccaattgacgtttttcctgagttttgcctatcttcttcaaatcccattatctctccctctgtccttccgttttgtgccgttctttgcccgtcgtccctcgcccatccgccgaagaccattcatttattcgctaccttctcgtccgtttcttcctcaacgcaccaaacagatgaaaccaaccggttttgtccatctttcgttttcccgccagcccaaccgaatcgcctaaagtccgcatttatcgccgtaggagatcatccaaatcgattgtggagcgtgaaagggggaaaggcttagatggaaattggatggattaggagggattggtgggcaggagagggcggggggaagcgccggtgcacggaacaaaggcacagacaatgggaggaaagtgatggcacccgccggttgccctttgctcctcccttttccgtcatcagtttgtctgttgtctgtcgtcccctcctccatttccgctgaactctctcctccctcttttccttctctccccctgtcaatccatcggctgtcccatccgccgccgatcagagtcatcgaccttgaggggcacaaaacagtcccaacacaaaaaggggaaagtgtgggatggatgggaccggctgactgaccaatcgaacgaatggcaaaggaaaggcgaaagaatgggagaaagtcaccgcccatttggagaataaatcatttacagcaccaaacgataggcacaataaaatctctaagtgttttaaatgtccctttttaagctgaatgttagcgatcaaataaatttgcgtttgtaactttaaacggccgtaaaatcggcgatggaccctttgagacattcgccagcccacgaaaaacgggtggaacagatcgaaatcatcgagagaacggtggaggaaagtcggaggtaatcttaggaaagtgcccaagatgatcatgcctttggcttcgtttttcgattatttattttaattttggcatttttctccctttttttgtccttttcccttttaatttttgcctttcccttttcaggcccctcacttcccaaggtcttttcgtctgtttaattcgtaattcgaatttcttacttctcttcagagttagtcaatttccagccccaaagttcggtgcgtacttccagcgaacggattcttttcccggacccggaaaagaggtttcagctgaccagcgaaagggacgccgggagggactcgtcgctgctgtacagcccctcaggcaatcgttttggaatttaaaattgcaattttcttttatttaaggccaaaactcattcattgtgcgtgaggcgccgttgcaacagtcgacgcctgaacggaatcaacagacgcacaaaaatggactcacaatcagtcggcacgggtacgacgctgacgaagtgttgactttaggtaggttaaatttaaatttaaatttacaatttaaaattcagaaacgagcgaaagagtgacggaaacgcatggacaaaagggacatccgacgaaggacagaagcgtgggggagacgagcggtgccatcgtacggcgaacgccgccccggcgggaggataccgcgacgaagtccattcttaagacagtgccgccgatggcatcccccgaggggaccgtaggggaaaattcgtggaggaaaagccccgcgtcggtggaagggtaagccgaggggagggagagaaaaggaacggattacaacaacagatcagtgcagcggaaggacagctatcggagaatgcaggtaaagcaggaggaagagagtgatgttcagcagccaacatcattttacggagtgagtgaacggacgaaaaaagggggaagggaaggagacggacggacggaggaggcgaattggcattttaatgggggacaaagttggcatttcatataaaaggggatggagttggctaaagaattagattttattttttgactattttttctaatgacttttcctccgatttcttcccaaaaaccatgatttccatttgtctcttttcagcagtctcccaatgcgacgattctgtcaaagagttcaaaacaactttggcctgaaatgtttagcgcggagaatcgcggaaagaattcattagcacggataaaagggtcaattgccgaaatgagccgacaaatgaggtggagagtcagttgagttagcaaaaaaactaatccgttttcccccgcagcgacggcgaatggaccccccgcctcgtctctctgctgtgcctcgtcctgcttctgctgctgctcgtcctgctcctcctttggctgcttgtctcttcgcttctcctccatcgctccaccttcgccttttggctttaccctccgccgtgcgaagagtgccaacgacggaacggcggtggaacttcggacactcagcagccgagtcggcttttcgtccatttgaacagcccggcacaggcgcacttcgaactgatcggaaaccccccgttcaagtcgaactcattcactgccgttgatttcgacaccgtttggcaaacaattgcaatgatcaaacaaagcgttgttccgtttttgtaagggatttgtggccatcgcggaccacgcgttgacagatgagcaaggaacacacaccacgtgctttgtgatggagttggacagaagcgcgatgccggacatggatgtgttgcaagacgcactgagcaacacttacagcgaggtgagaaggagggagggggaattagaaatatttggtttggcggagatttggccgattggtgaacgatttgccaatgtttggggaggggaattagcaatatttgggggtggaattggccactttgtgaagatttgccagtgtttggggaggggaattagcaatatttgggggtggaattggccactttgtgaagatttgccagtgtttggttggccaatcccattaatccttgtgccacccttgctcattctctctttcccccgttctctttgccaggtccattctcagttcggctggcaagaatattggtgcgtttcgcaacttcggtgtgcttagctttttccattgaaggcaatacgtagcggaagaggtcgactcatcatttgttcttcagaaatttcgcgatcgaatcgacgactgtcaaaaggcgaccaaatggtaccgcctcaaacacaccgtttacacccgcggtgggcaattaattggacactttgggaatcattagccgaattcaaaccttaaaaagaaattggatcgtttggaatttgttgaaaaaccgtacccctttgtaaatgaggtctcatggcaaaacaatttttatgttttttagttt

SEQ ID NO: 4741 - DNA, 1531 bp, Heterodera glycines
aaagtatcaaaatagctgtctaaaaatcgttagtaatgaaaaaatgtcactaacaaagatatatttaattcattgattggagtgaatttatcgctttttgaactaaagaaaatttatagagctttttcttttttaagtcactttaaaaaaagaaatagactttttgccatagaactaattgaaactttccaaatttggattcttttaagggtatattttaatttttcattcgtttctcatcaaatctgattaaaaatccccactcttttgtcagattctgcctgttacaattgctacgatttttgtctccccgacttcgccgtccttcggcgacaaaaatacgaagacaaaatgtcattgggaattcgaagactgaactgtttccgattgtttgtgcccgaatgggcaaaatacgaagtgcaaacggacccatcgggcggacattggcactacccaaagcatacggcacaaaagacgcaaagggacgcggagggaaattgggtgaattggcaaaagggcgggggaggaggacaaaggcagcggcggaagaggaggagaagcggaggaggggacggattgagaaaacgattggaaattcaatgagaatggttgtgaaagggagagagagagagagcgagggagagacagacagagagagcgagggagagacagacagagagagcgagggagagacagacagagagagcgagggagagacagacagagagagcgagggagagacacaccgatcacttgccaccaaccgatactttcattatgcaaaaagtaaattatataaaatgccaatgccataaatcattatggtaatatttctggtgctgttgataaagtataaatacctcttcggtcttaaaatgtgagtgtcacttaataatagaacttctttggttgcactgtctgtcctttggcttttccttcccatttcttccctcgcttttctctctcttttggcttttcctcgcttttttcctctttcttttccttcacttttccgccgattctttcgtcctcatcctttgtctctgttgcaattccgccatcagttcgctttgtgcctctctcatctcaaaagggttttgttccgccatttgaagccgcgtctcttccgatcgctttggcgggggcggcggcgccaaattccgtgggaaaacgatggaagggagggaaggaggcggaagcattgcgcggaatgggtgactctgatgacaaaagtgattagtaaagagaagagggaattaatgaagggtgacaagtacggtaatcccattagggaggacaaaagacggtaattggcaagtccgtcgctcatgctcaattcccttcccacctcattcgccgtgccaattgtcccatcaatcggcggtggcggtgggaattgttcttcgtccgagtcgctttccatcgccgtgttactgctcgttgttgccgatgtgtcaagcagtgtggcagtgctcgttgttggcattttgccaattggtcgtccaatggacgggctttgttgggactgatt

SEQ ID NO: 4742 - DNA, 1451 bp, Heterodera glycines
  unsure (1)..(1451): unsure at all n locations
ggcagtgctcgttgttggattttgccaattggtcgtccaatggacgggctttgttggcactgattcagttgttccgtcactcttacaacaccttccggatgtcgttttatggtgttacattcgtcctggtcgaaaacattgaatgccattgacggcgccggagaagcaatgcgactgatcagtccttcacgggaggagccgccgggggttgaggacgatgcgcgagtggagaaggaggaacaggcgaagtcgccgagatgaagcgcgggacggtgacgcggcgacgccgaagagacggtggcaaaattggagtccaacgcggagaggcgctgtagggacacctgcggcacttccgctcgcgcgggggaggcggggccgacgagcggacactcgcgcgactgagcggcacggaagtccttgtacagcgcgggacagccattcttgaaaaggattaattggaggagagggagcgtaaagcaaaagcaaacgaattatgaatttggaaaagcaattcgaatgaaatttaaatttgatgagaattcggtgtttttcggccccacttttgttattcgaagcgccgtcagccattggcggaaagtgaactcgtcatcacagcaaatgtacttgatgtacttggaggttttcagttggatgcgcggatgtttgattgcaaatccgaattcggtgggcgctttgtactttttgcgccagtccgtgcacatgtacaccttcaaaatgagtgggataaggggtggtaatgggctgctcatctcctacttggttgttgaacacgctcatcagacagttcaaatccctggcgggcccccggggcttccccgccttcggcacgtaatacaaccccgaggaacggagtacaaaaaagtgtcgtcgccatgacttcttgccgtccgccttcagcatcagccacccctccaattcgggcactcgcgttcctccgtcctccctgaggaacgcgttcagcaaccgctgtttctgttccgtatcccattcgccaatgctctccaccggcggaaattcgttgtttcgattccgatcagcgatcagaaagtgctgtggatgcctgaagagggcncacttctgaggctgtcggataaagtgcaatttgttgggcgattccgaagtccaatcctcgagattctcgaccacattttcgtggtcctcgtagaatcgctctgttaaagaaattttttagttgtcaaggatatttaaggaaatggcacatttaagcgtttgcttttctttaaaaccacaaaatgtttttgttttgatttccgagtgtcaatccgtccaatccctttcaattagccagatgaaaggggagggggagggaattcacttaaggggtatggttcgtgtcgtcagaacgaaatccgatcttatctttagccgaaagagccatggctaatccactgctgctggtggtgagtggt

SEQ ID NO: 4743 - DNA, 458 bp, Heterodera glycines
  unsure (1)..(458): unsure at all n locations
ggggggggagatgaggaattaatgtgggaaaaatcggtgtttgtggtcagcaagcgattagaacagaaattaataattagaaaaaagcaaaattttcaattttagcgatattttttggaaaaataagtaagtgatgtgaaaagagggaaatggagcctctgctgttccataattccatgtaataaataaccagggttcccaactaaaattttatttaattgaatagggttcgccggagggctaattgatttttgattacaatttttgagggttttacccaaaacccaacaaaagggaacaaaaaaacaagaaaaagccttaaagcctcattttggaaattagcctcattggcctctcaaaaacccataaaaataaggctaaagcctcacaattgggaatcgttgtaataagccaaantatttgagcgttcgatcgcttttcgtttcaaataacgccga

SEQ ID NO: 4744 - DNA, 5284 bp, Heterodera glycines
aactcggcctcaatttggcattgctttcagaccgtttcgatgttttggtggacaaacattttgaaggcaaaaaggaattaacgctttggagaccaatcggaattagcaaagacaaaggaccaaaagctagactgtctattctgatcgatggcacttttgtggcatttcctctgccggaccgtccgttgccaaacaaaattcgttttcgtttccttttgattaagtaatttttttcatcttttgtgtatattaaagcattttatgcttcttctggtacattgaccattctgtgctcgcatttctccgttccaacaagccaatttgggacagaatgggcaccaaattgacattgtggccatacagaaccgagaatgttcagccaattgggatgtttttgtccgagaaatttggccaattcttacgacaaaccttcgccatttgagctttgccggtcgcgatcatttggacaatttgcgtcaccgcatttcgccaacaattctcactgatcttgatcatttatgagaatgtgatggtaatagtttagatggtatgactgactgacacctttttcaaaacttttttatagtctaaaaacaattttctatggggttttcaggcacgctgaacacgaagattttcagtttgtttcctatacatgaaatacaatggaaatggacgcatttgcgaacaagcaaaggtcaaatacaaacagataaacaattagacaatacaatattgaatggcaaaatgccaatatatctttcggtcatataatcgcaccaattaattgattaattcattcatttcttctgctgatcactcggcccgggagaagcgtcgtcgagaagaagactgaaaaaacgatgatcattccattgcaaattataattcaatggcattttatgagtcaactcaacgaactatccttgattttttgtaccataattcggctctattatggtttgtcccccataaatttttcgaaaattttttttatgttttcaaaagccatgaagtttaaattcacagaaacgactgaatcattgctttaaacatttttggatacgaattgaaagtacaaaagtctaaacaaaattgtcgacgatcggactcataaaatcattaagcatttttaattttgttcacccgtcgtcatatccgccatctttgacccgaatgtcaattggattcgttcgagcaatcatttcatccctcagatttttccaatttcggttatcccatccaattggacaacggatgagccaaaagtaatttgctgcttgttgaagtgtcaattgctgcccagtcacttcgttgatctgatcaaatggcacaacggagtcaggtggagaagacggcggaaagtgaaaacaaatgcgaaaagcaaccggagaagaagcattggaaaatgcctaaaaatgggacaaaaaatcatagaaaaaccaatgaaatagggataatcaccgctttaaactgttctatcattgacgaccattgctcatccgttgaattaacagagcattgaagcaacttcggcacaccatccgaacgaggcgtgaacttcaattgatcaagatcagtgagaactgttggcgaactgcggtgacgtaaattgttcaaatcattggcatcagaaaagcacaaatggtgaatgcttgtagtaaaaatgtgccaaatttcactgataaaaacatcccaaatcggatggacatcttcggtttcatatgaaggcacaatcaactccaatctggtgcccattctgtcccaaatttgctcgttggcatggagaaatgtgatcacggaatagtcaatgtaactgaagaaatattaaaatgctttaatataaacaaaaaatgtttgaaattactaaatctgaaggtccttaaagcggattttgttgggtaacggatggtccggcaatggaaaatccacaaaattgccatcgatccgtacagagagtttcgattctggtccaatgccctcgcaaattttgattcttctccaaattgtcaattccgtttttccatcaaaatttttgtcaaccaaaacatcgaaacggtcggaaagcaatcattccatgcatttgaatcgattttcggattttggtgaaaaatgaattttcgacttttgttcgagttcaggtccgtcatttgaaactggtcgaaatgatgttatattcgtgatcagcgacccgaaaataataattttctgttgctcatttttctccattatttctcaacgatactagggaaattttcaatctcgagtataaaaaataattaacagcgcctacgatcagcagaaatttgttgtgccatggcatttattgaattgtgctgctatgtaatgaaatccggttaaatcattagcaattttatctacgattactcacaatgaatgaatgaattaattaatacacataaaatacaatggaaatggacgcatttgcgagcaagcaaaggtcaaatacaaacagacaaacaaacaattaggcaatatttaaatgacaaattgccaccaacatcatttcgctcataaatcgcatcaattaattgattaattcattcatttcttctgctgatcactcggcccgggagaagcgtcgtcgagaagactgaaaaaacgatgatcattccattgcaaattataattcaatggcattttatgagtcaactcaacgaactattttttgtaccataattcggctctattatgcatttgaaaacacaaagtctaagcaattggactcaaaaacaaaaaagagaattattaagcatttttaattttttcacccgtcgtcgtatccgccatctttgacccgaatgtcaattggattcgttcgagcaataatttcatccctcagatttttccaatttcggttatcccatccaattggagaacggatgagcagaaaatcatttgctgatgattgtttaagtgtcaatttctcctcagtcacttcgttgatccgatcaaatggcacaatgaagtcaagcggagaagacatcagaaaatgaatgcgaaaagtaaccggagaagaagcattggaaaatgcctaaaaatgggacaaaaaatcatagaaaaaccaatgaaatagggataatcaccgctttaaaatgttccatcgttgacgaccattgctcatccgttgaattaacagagcattgaagcaacttcggcacaccatccgaacgaggcgtgaacaaccatttggtcaccgcttggccatccgacgcattggcactgtcatcgggcggaaattcggggaaaatggagtcttcaaacaacacagtgtgaagtgatggacaatcgttgagcagtgacggggccaattggcgcaaacggcgaaaagcgatggtattcaaaagcataagacgaatggagtcgcggagcattggcaaaacattgagcaaaacaaaatccaaaatgcgaacattttcagtgatgaacaagaatattgaagaaaaggcgaaaaaacggtgaaaaaggcggagaaaagcgatgacattttgatcgatgtaactgaaaaacagaaaatttagacgaaaaattccaatttaatctattttttacaggatcgtaatgcgtttgaatccgatgactttgttgggcaacggattttgcgggattggcaatggatttccatcggaattgacaatttgcatttgctgggtgccattctctccaattttgtggaaaattcgcatttcgcccaatttccatttgcgtgtcttgaagtgttcgtcgacgatgcagttaaagcggcggttgatcagtgcaatttcgaggccgagttgagaaggcgcaagaaaatcgaacaccaaaagccaacaatctccgcagataaagctgaaaaattggggagaattttttcgaaattttcaaattatgattatttattttacatttcttttttgtgagggcgtcgtcgttttttggcattgtccaaaaagaaccaaaaaagaatggtggcacagccgaccaacagaagaagaaacacggcacaccaactgaaaaatgaatttgggaaatgaatgaattaataattgaagagaagggaaaagtaattaaaggatcaaagttagctagtaaatacaaatgtgaagttatagcatccaaaaaaagctaatctttcaaaattggttttgaaatttaaatgcgaaacgttagaaaaaaaaggaaataataaacgtacagaatttctgaagacatttgcagcaaaaaaatgaccgggaaatacaggaagaatacctaatgagagaatggaatgatgcggaggaggagaaaaaaacacatttttatactaaaaatttttagcgtagcgccccgagttgtagcataattttcgtcaaaaagtcacaaatttttgccaatttggggtcacattttcagaaaaggaaaaaatttttgtaaaattttaatgatgtatggtaagaaaatgttctaatttttcagaaaatttgccccattttccttgaagttttcttgattttgcaagacacatagaactcaaatccgtgatcagagcacttttatttacccaaaattcattaataaattttgagaaaccaaatatttgatgaaaaagtcatagacaaaagaaaagacaagaaaaaaaaattttttatttatttttcctcggtcccggaattctgcgagggcacctcgtttcccccccgccgtttcccccccgcatcgtttcccccccgaatcgtttcccccccgccgtttcccccccgccgttcaatgaccaactaaattttttcttaaatggctcaattggcatttttgacatgcaaatttaaaaaaaatgcttaggcttaagctgttcaattaatatcaaatgtgtgttttattcgaatgaaagaaaatcaacaaaagcatttctgagagaataaatgagagaatcaaatcaaatttcaatccgtgagatcgatcatttctcaaatttaattaattcattcatttccacgcaattagacgacattttcaaaaaatcactcattccgctgatccacttggtccgggagtcgtcgagaacatttcatcgttgctttgacccgcttctttttctttttcgtccgttggtggcgacaatggcctaaaattaaacacaatttgaattggtgaatgaattaaattaatcttttacacttacccatatgaacttttgccaccacacaaattaaatttgattttgttcaatttgtcgtcccaattttcgtcgttttcccattgaatcgccaccgttttttcactaattgggcatcgtttcaacagccaa

SEQ ID NO: 4745 - DNA, 1448 bp, Heterodera glycines
ccctcttcctcccttcacccctccccccaactttccctcccctccccgcacctcgtacgatcgactgtctcgaacccttacgatcgactaagagaccccccctgaccgtgacgggaaaatcggtcagtggaaaatgcgtcagtgatacaaatattttaaaataaatttctatggcatttgtattgtaatatagaaataaacttctataagaacatcgttctcaatttccaaccctggacccgaactcgaacaaaaaatcgaaaagtcaaaatttcgaaattagagtttttcttcaaaattggtttaaatacacggaaacaaactaaaagccatcagtctttcaataatagatcatgtatgccgttttgaaccaaaaatgctaaattcgaaaatttggactttcgagtttttgttcgaattcgggtctggggttcggatttggccgaaatggataccggattcatggtctgtgcccccgaaaacgcaaggaacttgttttatgacaataaaacattcactgacgcattttctactgacgcattttccactgacgcattttccgggcgccgaggggacggggtccggcggtgccgataggcgccgccaggaaaaatgtttgtaatttctttctgatttgttaacatattttcatttagttcccatccctactgattactatgaaaatcaaattttgccatcgctttgactttagaaaaagttatatgaaaatatgtattgtttctagggttcgagccccgcccccgctcgcccccgcccccgccggtatttaattcatgaatttagttattttttaatacagcatacactgaaaaaaaatgttcaaacaaatgaaccttttcgttttattttttattttttcatcatattcttttggcactgtggagggatcggcttttacggatttttttactgatttgggcaataaggcttgggtgagttaaagcgtttattcctttgcattttttttgtttctacattaataaaaatatacatttaatgaaggattgacagaagcaggagaagcaatcttggatgggataaatgaagcaacgaaggcgctggttatcccagggtgggaatgtgggccaaatgatccataatacctcgatggaccgtcacacgtacattaattcttcgaatttattcatacatacaactttttaagcttgcaacgcaaacaatggttatgttcacaacctgtgtcttcaaaatgagttaatctatttgaaaattcacaaaaaaaaacaattgaatttaactgaaatccatcaatgttgcaaagacccacgacaagtatgttttgaaaaaataggaaaaattaagcttaattttattgaaatcaaatgaaaattatttgaataacaacttaattatttaatgtttttttgtcccccaaaaacataaacccgaatttaaaattactaaaa

SEQ ID NO: 4746 - DNA, 2072 bp, Heterodera glycines
attaacatttttgataatttgttaagtaacttatgaacttccttaattaaaacagacaaaggagaagaaaatgagagaaaaatacaacagaaccaataaattaaaaacataagcattttgtcgttcttcttccatccaatcatttcaaaaagtgccttaaacgcgtgctaaacaaaacggagtgagcccacccggcataatcgccgtgaagatcaacgaaaaaggcacctttaaattaaaaaaaggaaatcaacgattcggttggaacgggagggcgaaaggaagggaccggcccctcgccatccttacacttccatccaaaaccaaccaatttggccgtagatcgcagtggataatgttttacaacccttcaaaaatgtcggtgtgtaaatctcagtggccaaattgaacacgtgacgatcaaccgggaccacctgatgtttgtccaaggccattaagcaaatgcaatcggcaacctgggaagttttaatgcgttaaaaatagtcgaatttgaatgaaaaccttagggccaacccccggcaatttcataagtgccaatttggcctcatggtatggcaaatttcgcagagaatggagccaaaggtaggcagaatttcccaatttaccatcagctaacatttccaccgttttcacaatgcttttcgcccggtaaccaaaacctgtgaaattttgagtatttaatagctgcggttattaataaattaaatgctgaccggcatctctgagagtttgttccatacaatttaaatgtgcggccatttgagtaactgacggaaagtcgtaaaaacgttgagcgttcacctcgacagaatcgccataaaattgacaaagtttttcgaccatttctgaattacaactaatagaactgctcgaggttctcggcctctttctagaattaatatttttggtaaatataaagtagccaaattttgttggcgactcaatttttttagctacacttttttttatccgatggtaatgaattaaaatttaaatcgcgaacttaattgcagtttgttttacatcttcttcgaaattttttttaccgaattagaacaaaaagtcgaaaattcaattttgactattaccttttttcattaattatttggtttttttttttaaatttggtcaaaatgaatgtacttttcgtgttcagtatcagcgaaattaaaaaccctatgaataaacagagtcaccacaaattgactctttattttatttcactgacttgatattctcggaacattgttgtttgctgagcaaatgaatgcgaaaagcgtctcgacgggttcttgccgcaaaatgcgaatgccctgcaacatttctcgtctttccgtcaagaatctggcaaaatgtttgtctcgagaagaccaagacttgtacaattgctcaagtttaacaccaagctgaaaaacatagattaagcggaactcataataattaatggcacttttgctgtttatcccccccccccccctcccgaaaaaatccaaagggagggacttttgttttgcaattgtttttgtcaaaagttgtgaaattccaaatccctataaaagggtccccccttttggaattttttcgtaaacggcaaaagtgcccaaatagcatttttcatattctgctttttaaaaccctccaccctttaagccagggttacccttgaaaatttcccgaaataagaacatcgctgggcaataataagattttagatcaaaaataaggacattttttaaaacacgcttccaaaactttaaatagcatttttcaacaaaatcaagcattagcaacatatttctcgccgccaactatttttctgagcaattccggcttagaaatgagaaatttatacatttccgaaaatggattttagcaattttgtggaaaacatatgcaatttgtaaattattttcagttcaatcgggatcaaaaaatcagatttttaaggatttttttgcggcgtatttttccgaaaaaattgaggaatgggcaggggatggggtacagcagtcgcgataggcgccgacggaaaaaaattttgtaatttagcg

SEQ ID NO: 4747 - DNA, 4621 bp, Heterodera glycines
  unsure (1)..(4621): unsure at all n locations
ccggcggtgccggtaggcgccgccngggaaaaactttttaatgtaagtgcaattttatcagattttgtcaaaaaaatgtccaaattttgcggtttttagccaattttttaagcaaaatagggttttgggtgccggcggtgccgataggcgcggccggggaaatttttgaaattttagtgcactttgttaatagatttagtccaaaaatgacaatattttatgattttaaatgttaaaattatgaatgaattcccatcgataaaggaataattttgaaaaattagaagaaaaaaaaattgtttggagaggaactaatccaacgataaaatgaagaacataaccaagatcacaacccactggaccatgcatatgtatgagtaactaaaatgaagcaaaaagtaagattttggatattaattcgcttcaaactacatttctttcaaaaattatcatttaaaatctaaatttctctctgaatccaaaaataagaacaaaaagcttaaggataaatcttacaaataagaacatttaaaatttgtaagatttggaccctcaaaataaggacaaagggtaaccctgctttaagcccaggaattaaagcgaagaaaatggagtggggattagaataaattattattaaatttacctgaaaataatcgctcaataattccacatcatttttttcttcgtaaacattgcaaccaaaattatgcaacactttaaagccaatttcattttcatttaagcgccaaatatgccacaatcgatgacaagaaattccaacccatccaacgccgctggtatcttttgtccatctaaatttaaaaattgactcgctataactatgttcaaaataaacaaatacctaaacgtttgaccgttacaaaaaacgacatccaggtttaattcagctgtattgcacaataaagtaaaatgggatggtttgcaagttgcatcaaaagtgtccaaaagaggggaaaaaaggtatatgaacaaatttaagtaaaacaactaaccagtgccattttcaacctttgaaatttcaattattaagttatgtatctttatcaaaataaaaaagcatttgtaattggtagcagggatggcatggaattcagatttccgatatttttagggttggaattccgattccaaaattttttcggaatttttttttattttgccattttctaacacaaaagtaaattttgaaaaatttgaatttccgaatttgggcccgggattagaaattggtcaaaatgaaggtcagattcgtgatcagcgacccagaaaatcccaaggaaaagccttggctcttgtggagtttaggccccatacaaaaaatttacatttatgaataaagctaatctataggccttcggggtcggtgatcacgaatccggcatccgttccgacccatttcgattcacaaaatgcaatcaaaaattcaaatctcccggcggcgcttatcggcaccaacagacagtgtaaatatgtttgttttttattcataatcagaaagccaaaactttaaaaaaacttaaaaaattctgggatttcccttgcaaaaatgcaagagacgatctcgagtttctctaaaaatttttgggcctcgaatttcggtttccgaaaattttaagggcctcggtatgccatccctgctatatatgctgcttatttttagctgtatatcctgccttatttttaaggatttactgtattctcttcgttatttttttaaaattgatcctcgcatatatgtacaccgataaatgacattggttggtttatttttaattaatattaagaaaatatttccatcacatttagtcatttaacgaagctgcttccgttgtaagtcgttcttctgttaatcatttgatgtgtgttaaccttacaaattaataaggtcaaaactttgaggacttcgccctctaatgacgaattgttggagatatacgcattgtataagcaagcgacctgtggcgacaacaacacatgcaaacctggcacttttgatttccgtgggaaggccaagtgggaggcgtggaaaaaaaagcaaggttctcacggaaattattaaaaaatttaaataaaggactttcgtcaggcatctctcaggagaaggctcggattgattatgtgaaaattgtcgaaaaaatggtggccaaatacggtgttaattagaaggagcaccaaaagaggcaatcacttagacccgatgctttaatattgtatttaaaaaacaaatattttataatattttgaatgctattattgaaaatatttgtgaacccgtatacaaaatgatcattgatcacattcattccgatatttttcattgacttttcatggtccaactgtgtcaagtccattgaagaaggacacgtgctttagggtgctgtaagcctaaaattggaaagtccttttggtgaataatattgcatttttttgcctgtaaattttcacgaaagacccgaaacttttctgcagcactgacacaaattttgtctcccgggaaagccttccgcggcaaaaatggctccacacaatgagtggcattttgcttttctgccgtcgttcgacttgtgctgtatttgtcctctcgttgcgcattttgttttctgattgttttgtccgatcactccacaaaatattatttttctttttctttcaccttctctctgttacacaaacatagtcatacacgtccaaattgcgccacacaaagcctgacctgtaaagctttgacaattgtaaactctcttacttgaatttgttcgcctgcatgcgttggcgccaaaagtgtgccgcagggcgaagaagttcatccgggcaaattgctttgccatttcgacatcgttcagaattcgtacgacttttctccgtcttctgctgggcgacactttcacagaactgtcaatgtttttgcattggatttgcgttctctcacattcctttagacttctcttccgtttcgcctttggcattatttttcccttcgcttccggggagacaaatgtggcgaagtccgacgatgtacggctgagaccaccgttcgggacgtaacaatcgctcgcccatttgacattcagtcgaaaaccgagggaataaattaaagcaaaaggaaatagattttgctaactggatcaaaagtggatgagatgtgtacatccgcatcagctaaaatattccattttcaatcatttgtttgtgttttaagcgtcgcccctttcaccgactcaaataaacgtggcgcacagtgacgcgaatgaattggaaatttttcattaaattttgttgtccatttgaatccgatttttgcttattattagtcgccgaagcgaatggctccaaaaatgtaatctgtacataattttgtgagttatgtattcggttttattatttgtcccaaattccccacccattcggtgtcttcgtctgtcaattcgtaataatccgcttgactgatcaattgggagtaataactgtccccgctccgtttcactttatgaaccaaaattgagggctaaataaagacaattttttacagagagtaaaattattattattaaagtcgtaaaacctgggctattcccctgtcaaattgatgtggagttcgaaattcgattgtgtaataattatttgggtcgtcccggtcataagggaccatcaccaaaagccagccgaggctcctaatttacaattagttaataattattagaaaggaaatattttaattaaaaatattttaaaattaattatttaaaatatttgtaaaaataatttatttaattatgcatttgtttgttgttattgtttttttttgttattctctgaatttgcccacttattgtgcggtatgctcagagaagagaggcgaagtgtgaaattttggcggccatctctttgaaaagcaattgcataattttaatttttaaaaacgacaaaaataattttaccttccgaaatacaaaactctgagaaagagttaaatttttgcattagtcgtgaaataactgtaaaagtttgcctgtccattggcagccaacccaaatagtccaaatgtgcaccgtttagaccgggcccattcattccgaagttcgaacggtgctaagaaataatccaaaaaatcatttcccaaataaccccggcgtacgcaaattgggcactgttggcgcgggacgctcttttgtaaaagagtcgaccctttagagtgcccaatttgccggcactttctcccccactttcccaccatataagcattcgctgtgctcattaagtcatatctgtcgtcgtattccccgtcggcggcgtaaggaaaaacctcaaaagtgtttgagatttaatggcatttaacaaaacaaaaaataaaaacttttatttttcggtcgctgtacgaatgtccgatgaaaaatgagtgaaccttcacagggaaataagcgaatcactttagtgggcatttctctcaacaaatttgggagggaccatttcatgagttagcaccgaagagaacatcaatttgggagtcagcagcacgccgttccctttgccataaaccgcggcagtgccagagaattacggtttaaaaggacttaatttgaatttgttgtcgacctgc

SEQ ID NO: 4748 - DNA, 2635 bp, Heterodera glycines
cagtattccacgtgcaattcgtccacttcctcctgtctcgggttcgtattctttctgacccgaattggcgccccgactaaaattagacaaaaatttaaaaaattttaaacttatctttctctgaccgatagtgacaatccttcgcttgaagggaattttgccgtgccgaaacaccgaaggcaatcgttgcgaaaatttctcaggcaaaatggcacaaatgaaactttggccaaaggccaaaggaatgaaagcgcccatcactcgtctcatccatttctgatcagatattaacaaaatttaactgatttgtgcttaatacttgaatgttgtccaaaagggcgggcagaatggcaagtcgcatcagttgttgctctccaaaatgataaacgggcaccaaatcggcgccatttttgatggccaacttcacaaatccctgaaaagtaaaactgtacagaatgaaaggctcactagtcattcactttgcgatttgccaatttgagcttgtgcagtccttcgtccatctgggaaaagcaaatttccgcgacccctcccggcacaatgccaacggcgttccctcccggcgccaaactcaatgaatggccaatcgaagcggcggagcttgagataactcctgaaatataaagataagcataggacgtaatattctgacaacccaatgcgatcagaaaatcacgtcgaaaagggaataaaaaattcatggggagggtggccacgcgccattcgatgccgggaaacagtctttggaagtcggtgccattggtgccaaaggccaacgccgaggaaatgcttaaaacgccgtgggggtgagcactggaaaagattttcgaattggtttctaattaatatcggatgaatttgaatttgtatgaactgacgagaaaatgtaattcctgtccgggggaatttccgccgttttgaccgtttccacagtaaaatattcggccacacttttccacaagtgcaaatttcgaagccaacggaaatgccgtgagccttttttcggtgtgttgaagtcgtaacagtaccaacagaagtacaacagagccaaaggccaaagcgaacgatgcaaaaggaggagaaggaacagagcggtgccgacaaaggcgaaatcgatgaacatccattggaagagccaaacggcgagcacttgaccgatctcggcacaaactccgccggcaaattcgcaattgaacggcattttgagggggggggggcaaatgggaaggacgagaaatggaaaatattcaaagtattggcggtggcgaacgaatcacacatcttttaagtgttcaaattggaaagggaaggcgtgacattgtgagcacgaggcaaaaaaaagggggggggggagagaatcggtggccaaaacattggacagacaaagcatgaagagataagaagttcggagcgaactaaaaccgtgaggagaatcggccaattaaaaggcaattaaaggccaattaaataattggtggggtgtcgtccattgtggtgataataagttcagcacgaacgatcggcgggcaaactcggattttatggctttttctaaggatgagaaggaaaatcaattacaaaagatggtaataaattaaaatttatgcaatttggccaaagaattaacagaaaatggaaaaaaagaaaattcacagaagaaaagtcttcataatgaacatcaaagcggcggaaacagcagcagacacggggagagtgaccagctgaaaatggacaaaatgaaaaggaaacgaagcaattaaggggattaaaattcaaactaattaattaattagatatttaaaaccaaacaaatttagtccattggtatttctttcttaagtaaggtttcaagaattcccgccccatcacaaataactacccaggaagtggcgatggaggcaaaaatgcgccaattgatgccttcgcccgatttaatggagcccacggcgacgacactgcccaccaaacagtgcgttgttgagatgggaagcccaagtttggaggccaacagagcggtgacagcagcgccgaattcgattgtgaagccactgaaaggggaatttgcgaatttatgaccaaatggggggagagaggggagggattacctgcacgaattcacatgggacagcttttggccaaccgtttcgatcacttaaaagggaatattgtttaattgaaccggccgaatattcattgattcattcgttcgttctttggcttcacctctgtgcccgagaagccaaaggcccgcgcaaatggcggaaacgccgaaaagaagcagccaaatgggcgtctgttcgctctgttccacgctgccattgtgccacacggaaaggagtgccaccaacggcgaaatggaattgctgacgtcatttgctccgtgggcgaagccggcgaaacaggcggtgaacaccaaaaaaagaagaagggaggacagtcaaagaaggcatggacaaagcagtagaaaatgactcacctgaattgtgctgaacattcgcaaagtctgcgggtcttcgcgacggtccttttcgtgggaaaaaccaggagaagagcccacggggggctaagcaaaagaacaattgaaattaaacactttttggcacttgtgccccttact

SEQ ID NO: 4749 - DNA, 1157 bp, Heterodera glycines
  unsure (1)..(1157): unsure at all n locations
gacaatgctgtgagtggtggagacgggcagacggagcaaagtggctgtcagcagccaaacacttnccgcctgaaaaaattggcgttggaaggcgtaaattactacagaatcactctttatgaaattaattagtagagcaaagaaaaggcactcattagcccaaaattagcaatgaatggctgcgtttttcctttgctttcctttggcactttgtgattacccccgagaatggccaattgccctagcaaaaattggttggggtggtccatgtacaagtcaatgttgaccacttctttgcgcatcgcatctgtcacgttatatcctgcaaatgtatttaattaatttcagaatgatttgtttctcgcccaccaacaagaacagcgccaagcgtttccataatcgtggccaaaatgaaagcgtttcgcaatgtcaaaacatttgagcccaccgaagtgccgaatgcatttgccttaaatttttgccgttttccccttttttgaggccctcccccaatgactgatgatgactcaccacgtcatttgcacccattccgaatccgagcacaaaagcgagcagaaagccgacgatcaaagcccaaaggaaggcattttggaaaagggagagggcggcaccatcaaaaggagcggaaaaagttgggacgaacgatgagggagagggggaagaagaaaaaatggaggatgggatgaaggaagaggaggaaaaaaggggagaggaagaggaagcgatggcagaggagacgatggaagaggaagacattggacggacgagtggtcaattagcgtaattaatgggcaaattgagagaaatcagcggactgagcagcatcagaagtgcataatcatcaaaaagattcaattaatcacgaagatgaagtcccaattaataaaacaacaagcgatcattcgagtcttaaggacggagaggcccaaaaagcaaccgccgtgccggattggcacttttccgttcgccgttccctcccccccccccccggcgcttggacagttttgactcattaacgaaaacactttaggatggaaaaataaaaatcgaatttatgggaggaaccttttcaaaaagctaagcaaataaaaaagggtggggagcgattgagaagctaaaaactgtggggagtgcag

SEQ ID NO: 4750 - DNA, 3397 bp, Heterodera glycines
tagcatagtttttggaaatccgcatcgagaaaagtgaaatgttttgttgtcgcacattttcatcggcataattatgaacattttggagttcgtagctcaaaaaatcctaagttttggaatcctaagtttcttccacccttggtagcgatacttctcgagggcggattctttcatcacacacagatttgtttttggcgaattgtaccgaccatcagcaaaccaattttcttataatttgtttgcctgtcttaagttttagattccaggtgcactaaatgctgttatgtagaaagttttcacacctttaaaaagtttatttgcaaagatttcaagattatttgatcgtttaagtatattcccggctattttccaattttttgttaaattattcttaataaaatcaatttcttgaattactgtagacatctgggattataattacttctagtgttataacaccatccaaaggataaaaaagtgaatattgttcttcttttaataatacgtgttggaacaaagcctcggccgtgttttcgctagggtatcgaagagggcaataaaatgattcaaaaccaaaagaaagcttcaaaatgcttctgaatttgccttgctcatttttatatttttctttaattaacgatgtgaggatatctttaaaattttcttcagcattaattatgaaaggatttttaaaataaaatttagttttatattttgtaaagccaaattttaagtcttcatgacgaaatgactcaattaaagaacacccttccattttgagtgttgcccttttagtttttatgttcttatatacccatatgctcccaaacaattgtttggagcctattttcataatttaacatttggctttgcacccttcgggactcaaaatgtaatcttcgggcttctgttaaagaattttgagattgttcctcaagctttgttgcctggtcaaaagttttgcatctttcgaactcacgccacgcagattcagctttttctgactccaaattgatttgttccaggaatttgaaaatttcccaaattgaatcggacattttaagatacaattcccgaacaccattagcgtaaggagctttttctcttgattttattgcacgattaagagtttctcgagaagacttggcaaaatcgcttacatcatccgataacacaacgacatctcgccatgctctctctgtctctcttttagcagcttccaacaaaatggaattagcttttctattttttatttttctgtttttcttttatatatttttattatattttatatgcaatgaattcgtctctaaattctgctgagggtcttggcttttcaaattttatttgattttctcgcattatttcttttattttattggccatatctccaattcctaaatctggctgtgaataagagttacgataagtctgtccaatttcatgcctatattttttagctatttctattgattgtttggcatcttcggctaattcttggcacatcactgggtcctttctgtctagacatttttccatgccttttttaatatttttatattcttttcctcattttttattttatcaaattgtgaatgtatttttctaactccgtttaatagtttttcatgccaaaatatgatttcagattttcccgaattcctatccttaataatttgagcttcaaccatggtattatgagcagaaaatgaaaagtctttggcctcattagttaacctaattatatctttaattacttcttcaacaacccttcgggaggcatccatctgctgcttttcttctttcgacaagcaacaacaacactgacccccaattaccaagaaagacaacagaaatagttttagaaaaaacatttttatttaaataaaaaattaacttttcatttatagacaaaacaaatcaaatttcataaatatcaatcaaagcataataaattcccttcttaccaccatattctttcacactcacattaaccttcaaagtacaaatggtcccaaccaagtttttaaccttttcctaaaaaaaataaatttttgtgtttaaacatttttcataccattccgtcacccttttctacatttttcacgccgaaaaaagcaacaccccccaaaacgtctgtatcatccaagagcgacaatctcaaaaatgaagactttaccttctccataccacagttacacttccccttacgacaagagatgcaagcctaaaaatcaagatatgttttctatttggttttatttacattgtattccgcagacacaacacttgcaattttagcacgaaccacaaaaattcgactaccacaaaccaattcaatattcttaatgtcgcggattgtgttcatttttcgagactaaaataaattttagaaaattaaacaattaaaaataaatttcgactataactaaggcaaaaaaaaaattacacaattaatatttattataaaaagcaattcgaaagtgtgatggcagttttaaaaattcttccatcattttttctgcaacaattcgacgagaaatatcaaagagacttggagggacccgatagagcaacgaccaagagccaagcaattctctgtaataataatgacatatagatttttaatcgttaaagacctgtccatacgattaaagaaaacatttagtagtacttcaattggggaagtcaacagttcttttccccaagctaatgccatgacctttagcatttggacctttgccagaaaaagacgactcctaaaaaaaccgttgcggtttgtctggctccttccctcccagtaaaaccagaagaaaaaaaatagggagtcccaatcccgaatcatttcccaaatagttcccctgtacgatgccgtgtagtaccaacgtgtatctacccataggagtacccgcccctgagtcataaaaaattcgcatatctcgctcaaccatggtaaaacaaaacgcagacgtgtgttcgtgcatttctatgtagccggaaaacgggctttcataatcccggtgtatggccactttatattgggatgattcaatcaacatcgcttcaacctcagctctgttcttaggccagaaaaagtcttccttctcaagagcagtttcaaaatattttttgaacgagtacatttaaaactaaaaataattagcgaaataatttttaaaatacaagcgtataaaacattaaataaaaacatcttttttcatcaaaaaaaatttaattttggctgagtggcgaaatgaatgtttttggctgagttggcgaatgccaagttggcgaaatgtagtcgtgcccccttttttgagtaatgagtgatcgaacgactcatgctcaggaatgattaaagggatcaaaataattatctggtgcataaaaagcacat

SEQ ID NO: 4751 - DNA, 2805 bp, Heterodera glycines
  unsure (1)..(2805): unsure at all n locations
ttaaaactaaaaataattagctaataatttttaaaatacaagcgtataaaccataaaataaaaacatcctttttctcaaaaanattattnnntcaggaaaagcatatgtagcaataataatcgaaattctctcttccaatagattcagctctccaaatgattgttgtcggtgcatgaactcgttgaaaacaatgtctgggttgattgttggaaggggcgagccggaatgatcacggggtccgacagggcactgcagtacagatcgacagaaattttcgaaattttccatcctggctcggcttcttgcttcggacatcaattttttgaggatttttttaaaattgttttcgggatcctcatttggtggacatttaaaataaaacgtgcggacatattctttaatcccaaattttttgttttccttcacatgtttttccacctcttcgtaatacttgcccaagtctgggctcttccggaaataattacgggtatttctcgaccgccttacgtcttttgaaatttcttggaaatttttcttggacattcttaaaaaataattagcataaaaaagttttcgtaaatattgaatgaaataaacaaactaaagaataaacacaaacacaaaattattttaatgatatccaaaaggcaacacattatagtcaacatcaattatccccttcttctgcactggctcgtattctttcattacatccctcgagaggactcgacaatcccttgtcggcccaattttctcaggataacgaaacacttttttgaacccatcccgatgattcaacaccatgtccttgaacaattcatagctgaattcgttcctcctgtccaacgtcatcccccgtatcttcgttttatgccaaatcacaccatctttcttcctcctcattttcaaggcgtactgttttggacccgccgacacatactccaaaatttcactgtctgaatactcacgagtcatctctctgaacaaatgtttatagaaattttcaaaaaacttcttttaccccaaaaatttcccctcctccaaaggacaccgacccttcggatgagcaaaagccagagaatcttaatgttttaattttatggaaacttttctaatgtccacctgtgtcacaatacaatagcttagacccctcctccctgtagacctgctccatatactcgtacagctttaccctggcagcactcgtggtccacaatgacaaaattatgttcgaaactttatgctcctttataaactcttgcttcttctggtatattgctctcatcacaccctcatttatctcaatcggtcttttaaactcaatcgtgtcatctttgatgagctccgtccatctttccaaattattaacaatctcagtcacagaaagtgtgttcctcattgaaaatttcccccataaactgttcaatcccttaatatttatttgttttttgaattttatttgtttttctcaccaatttagcgatcatacgtagcccagggttaaacaccattttatcatattccaaccaaatgttgtacttggccttgtacatttcgatgaatgctcttttttcctcctcatttctcacctccgagggccagcccgacgcctccacctttattttcaagaacatgcgcacatatcctttgaacagctgactgtcaaattgctcaaagtgataggcccgatagaagcctattactctatatcccaacgccaaggatttccgcagttctatcgaggtgaatgtaccaatcaaagctctccgctctggccgatggttacattttttgacatccttagccaacacaaactctttcttcgtttttttcgcacatgtataacaattggggaagagaagcatattatcaatatgcatagggaggagaggataaagcagttcctttggggggatgaccttcacctttagcagaccatcatagggcacatcgtcgggcaccgtccaattcacatcgaattccctgctcaccacaattttagggaccccaaccggataaggggtgtcttaagcgaaggaaaatttcaaaaatgcaagcagattttttaccataattcacaaacggatacaagcttatgatatcgaacatcgaaatctcaacttcttcggttgcttttgcatacaaacaaaaaggcattgtccgtcctcccgcgtaagcatccctcggatttattggacccttatccggcacagcgtcaaagaacctcttcatcgctctgttccgtttcaattccgctttcacatcgcattcctaaatttgttcaataatcaataaattttgaaattggcacacccaaacttcctccaccgagaagtttttacatttttccctcaaaaactccattcgtgtctaagttcgtcggaaatttacctccatacaacgcccattgggtcctatgttccagggcaaaaaacattttggacatccatgaaacgcacatccctttagcaaaaaataaaatagggaaggaaattctgcctacctgaaattcaatgatttttttctcagctccgatgatacaatccacttttaatcccccgatttccacttcacacccattgcatgcgtgtctaagtctcactcttttgctttgagcccaccattcaaaaaatttcacagcaattttactctgattctcagctctctcataacagccttccggaataattgtgagatgattttctctccaaaattttgttcgaaaaaattctcatcacaacccccggaattgttacattgtccttcaacacattcatcccatcagtaacttcaaaaaaaattgc

SEQ ID NO: 4752 - DNA, 1222 bp, Heterodera glycines
  unsure (1)..(1222): unsure at all n locations
aaatgcttttcctctcttttccgtccctcgtcctccgccaaattcgcccttctttctgtgctgcttttcctttctgctgatgttagccatgctttttgatctgatcagcagcggtcgatcacttccactgggcccaaccaacgaaagggttttcttctccaacgcattacggtaagtgttttacttgggttcagcatactgtaacagaatcactacagcataaatcaaaaaatatatttttgttttagtaaccacaaaaacattttacttcaacttcgcaccgtcccagcgccaatgttagggttgaaaaagcgtcggccaaaatttggacgaattgttggcaaaaaatacagaaattgtagtttattttcaatataattttcactcattttttatattttgtttaggcttcttctcgcctgttcagtgcatgttgtccttcagagaaggctccatttttatggacaattacaaataaaaacgaaagatgaatcatcgaaactgtcctcccaaatttaataattataatatcttccatatgaaaaatttaaatgaataaagagaagccttttgttttttattttgttgaattttatttgccttctctacaagaatggaaatctgaattccacattaaaacacatttattatcatgtcgtccgtttaaaattagggcatgcgtgaggtcgaatttcgtcagggttttaccggggttctcggtcctgttattgaataaattgtgtcagtgaaaccatgaattacacggttttttcggtcgcagtcacgattcacgaatgacggcctacaatgagtacagcaaacatcgtctgccgaaaaagccaacagacttcgactttgccaagacgccggagatgcctgaaaagcttgtttgcatagcctcagtcagtgtggatcaaccggtatttgtgcttgcggatgtgactgagttgtagaccatgctagactcagtcacaactagagatcggaaatttcaaatttgctgatcctgttgcaggatttgaattcaaaattttttacaggacaggatccggcaggattaatcctgcaaatcctgcatttaaaatctgcaggatcctgcgcaggattacggattttaggaaatttcaaaaaattctgtattaataaaaaagtctttcaaagtatagcaaagtattcaaatatatttttaaaccaaaaaanntgatgaagatgaaaaattaat

SEQ ID NO: 4753 - DNA, 2311 bp, Heterodera glycines
gaaaaacaacaacaatcgctcggttcacttgtgccgtcatcattagagatgggaatttatgtcacgaaaaatccccaaaaaatcgtcaaaaagtcacgaaaaatgcaaaaaaaaaaaaaaaaatctgaaaattagccataagtaaaaaatccaaatttttaacaatttgtgttggacatggttatgggtttatccgtgccaccacttcttccgccagctatcaaattcaatttactgttcatgcgccaacggaaattgtgccatttgaatatgtgaacgaacggaccaacgaaaagctgacattggagaaagcagaaaacaatgatgaaagtatggatgaagaagatgatgatgaatgggatgagcgatggataatgaagcgatgtcaaattggggagactacggccgcgttaaaccaaaattcgggcaatttgaacaatgtcagctttacgttttatggaaattgcattgggtgagttgcaacagcttttgctttaataatcaaattaaaaatttcgcttaatttaggccattgtcgccaccggcagaagacgaagaagcgggacaaagcgccggaaaagagtcgacgtattgtgacatggatggattaatttggaaatgatcgatcattatgtattatgtgatgaaatgaattttatgaaggaaattcgcaaatatctacattcatatatatgtatgtgtacatgtaaataaatcggatgtataaaaaatgacaaaaataaatgcgaaatcaaaagttttttagaatttgtgtaaaaaaaataataatcataaattggtatttttgcacaaaattattcggtatccggacaattatattcattgatgaaacaaattgagaggagcaattatcagctatcaatttacgggattcccgctcccgtaaattatttattaccgggtaatgtcagaagaaatgattagggaacggatttcaatgcagaaaaactgacaaaaagacacctaaaaggaaaaaggcaaaaaaagggacaaattgaaaaaggaggtaaaaatttcatgagcttagaattctattaaaaacagacaataattggggtgtaaacattatgaccctgaacttaacttttttaattatttgagcttagaataatcagtggtgattttcaggtttaaaaatctgcgtaaaagtccaaaaatgcaaacaattaattaactaaatgtgtattcaagcgaaagaagcaacaaataaatataaggggcaattatccgatcagttcataactatcgatcaatcattcctaataattctttcactttttcttctgttgctgtccgctgggcccaggattcattttcagacgattttttgcgttaatttggcccgcttctgctggtggagacaatggcctaattaaggtcaatttgaattactttaaacaaaagaaaatgttgttgccactcacccaaattgataatgaagatgaagtctgacattgttcaatttgttcgtctttttgtcgtcccatctaaccgttgccgtttgcccaatttggcatcgtttcattatccattttttgtaccatttatattcggtttctttggccaatgtcagcttttcgttggtccgttcattcaccaattcaaatgggccaatttgctttgatttaaaatatttaattcgaatttcgtagctggccgaagaagagttggcacggagaaatgcctataaaatgggaaacgaaaagcaaataaatggcaattaatccgaatattttattgaaaatgtggccacacctctttgaaattggtgatcattcttttggtttttgacgtataatcacaactcaattgctttggctttccattttttgtcggagtgttcaaccatttggacagcgcttggccagcagttgcatttggcccatcatcggcaattgcatcgggcaacaaacgattggaattgattgaattcagctgattgagatcggtgagaattgtcggcgaagtgcggcgacgcaaattgtccaaatgatggctatcggcaaagttcaaatggtgaatctttggcgcaaaaatgggccaaatttcacgaacaaaatcattccaaatttgctgcacactcttggcattatgggaataaggcacatacaaattcaaattggtgcctttgtcccaaatttgtttattggcacggataaacgcgaaaacggagtggtcgatgaatctgaacaggaaatgatttaaggtactttttcactttacgccacataaaaaaataataatttttttgtatttttctggggttttcatggacgcggaccacaaatat

SEQ ID NO: 4754 - DNA, 3272 bp, Heterodera glycines
attcattcattcatttcttctgctctccgctgggcccggcattcattttcagacgattttttgcgttcatttggcccgcttttggtggagacaatggactaaatgaagtgcaatttgaattaattgaaaaaaagaaaatggtgttggcactcacccaaattcataaagcgtaaaaccgattttactcaaattattcgtctttttgtcatcccattgaattgtcttcccaatttgacatcgcttcattatccagcgctcttcccatccattatcgttttcttcatccacattttcatcactgttttctttcgtcaatgttagcatttcgttggtccgttcgttcgtcaaaaaaaaatccatcccatctcagcaaggcttggtttttatctttagggatgtcaattttgtaaatataaatttttttttcctggaatcttcatagctaaataatagagtgccacgggaccgggaattttgggcaaacccgggaccgggaccttttcgggttgaaaaaccgggaatttttggctgggaaaaccgggaaaaacccgggactagtcccggtcccggtcaaaaccgggaccttggtactcagttgtactcagttgtccgctaccaggtcccggtcccgtggcactctactaaataatatgaaaaaaatttttggtcatgtaattctgtttctttatttttaagctttattccactaacatgttaaatcatgaagtgagtttatgaatttccaaaaattagcttaaatttcacgcgcttaaaaaatgaaaatttataaatgttttttatgacgcgatgattttttggcgacatgttcaataaatttcaaaaattttaataaataaatctgtcgaaaaataatccacccgtctccatttatcccttcttatcttctaatcccccttttctgaggaggttgaaaaattaattcgagaaaatagtaagtcgtattatagcattttgatgctgcttagtcactattttctaataattttgaccaaaaaaccaccttttgtaattttatttatatttttggtacaatattttgttttttgtacaaatttcttacatacagttaatcgttggattaattttgacatttggaaaacgacaaagtcaccgcgtgaccatgaaaatgaacagacggtaaggaaattttaaactttcaaattctaatattaattaattatcccgcatttcagttggatttgtagcgacatttggatggacactctcccgttctttgaccatgcccaactcggcctcaaattggcacttctttcgccacggttcaacgcgttggtcgacaaacattttgatggcaaatcagaattgacacttttgggaccaatcgcaatttgcaaggacattgtaacagaagtgccaaaattatgtgtgtttattggtgccaattctgttgaatttccattgcccgaccgtccgttgcccaacaaaattcgctttaacgacattcggatcgtgtaattcaaaactttgttaaaatcattttgattgttgtacaagtattattttcagttacattaaccattccgtcctcacatttctccgtgccaaccagcaaatttgggacaaagccatcagtttggatttgtatgtgacttccgcccataatgccaagaaagtacagcaaatttcgaatgattttgcccgtgaaatttggcccatttttgcgccaaacattcgccatttgaacgtttacgatgttcaacattaccacaaattgcgtcgtcacatttcaccaacaattctcattgatcttgatcagttgaattcaatcaattccaatcatttgttgcccggtgcaattgccgatgatggaccaaatgcaactgctggccaagcgctgtccaaatggttgcacactccgacaaaaaatagccaacccaagcgattgagttgctgtgaatatgcgcatacctcagaaaccaaaggatgggtcaacagtttcaaagaggtgtgacccaatttcgtaaatttggaaaaattgcatttaatttcggtttccatttgttcaggcatttctctgtgccaccgtttcttctgccagctatttaattcgccttgcgctttatgaatcaacggaaattgagccatttgaattgataaacgaacggaccaacgaaatgctgacattggagaaagaagaaaacaatgatgaaaatgtggatgaagaatacggttataaatggcacgagcgatggctaatgaagcgatgtcaaattgggaagacaattcaatgggaggacaaaaagacggacaatttgaacaatgtcatcattgcgttttatggatttgggtgagtggcaactgcttttggcatttttaaactgttcaaaagatttaaattgcgcttcatttaggccattgttgcaaccacagccaggccaaattaacgcaaaagatcttcttgaaatgaatcccgggcccagcggacagccgaagaaatgaatgaattattaggaaatgagatattctgattgatcattatgaatggtattgactgataattgctcctcatattcatttgttccttttttcctttgaatgcatttaattagttttgctatttgtgacttttatagcggaagtgattagtttaaaaatgagtacgatttattcgggtgtaccttagtcaacgccccgtaaaaaacggcacaaataatatacccaatcgattcgtatcgacgagctatgcacgaaaaaataggtctccagttgcggaaatgccaaaaaaccggtttaaaactcgaaaatttgagtgaaaaagtgggcccctgaccctttaaatggtcaaattcgatcaaatttggtatcattcgaaagctcttgatgagtaagtctcaaaaacaaggtctaaattcgaactagagttgagcggtaatcggtaattgtaaaaaaaccggtaccggtactaaccggtaattttccaacgtaaaaatttttggacaaaatttttcaaatacaaaatttttattcaggatcagcggccaattttccaattttgcgaaggggtctccggccatgtaaattaatgtaaatcaatgaccttttttgctttcaacaccgcttttttcgcggcacgtttttctcaagacttttggggaacaacagggggccggcggtgccgataggcgccgccgggaaaaattttgtatttttttatgcgatttgttaacagaatttgtaaaaaagacaattgattaagttttgggttttaggatgcttacatgaaagaaaaa

SEQ ID NO: 4755 - DNA, 2104 bp, Heterodera glycines
ttcaaatttttgggtgtatccgaatagaaagaagttggaaatcagtacttttcacgcctataaaattcggccgaaaaatattggtgtttgtgactagaaaaatagcagatgcatatcaaatgactacagaaaattacagcctccaagaaaataattgctttgcacaagcaatattttgtagagcccatcaaacacattgtgcttataggaaaggcagaattgaacaataggggcctttttattatgattacaacaaatcagcatggcgtctcgctgatatggtatgtttcagttaaggtttagccgatctacaaatttcggcactgtctattttgtaaaagcgaatcaaattcctttggattccaaagtggaattacagaattgcgacggcaaatcctaaatagacaacgacgctttcattataaagctttaagggaggaaaagtaataagaatgttactatctctcagttatcggtaatcggtaccgctcaacccctacatttcagctttaccattcttttgtctttggaaaatttaacatacttaaaaatccatttgcgtaatgttgatttttttttgaatttctatgttgcaattaaattgagaaattgccggaggcgacaaaagagttgaaacatttacactttgttgaaaaaatgaatttttaagctcgcaacacccataattttaaatgcaatcagccgcttgcaattctgatctcccaattttggtatttagcatttattcagagcaataatacgagatgagcaatacaataatacaattataacgcggacaaacatccaatacaatgcacatttaatggtgtcatcatgccaaatattcatacaaatcgctatcctcctccgagcgcttcaaatattctttctcaatcagcgagtcgatgcacttcttgatgatcggcaccttaaaaggaaaggaaaggcattcatttgcacccaaaatcattctcccccacctttggctggaaacgcgttgtcaattggttgagcacctcggccaccaacagctgatgcttcaacgatttgcgcattttcataatacggacaatggcagccttaatgagggagaagaaaggggtcattaaaattgatttgtcaatttgtctcacctggatgaccaacttcatggacccaagcacgggcgaaagatgcccaactattctgggccaactcagcggagtgccaaggctcatgtcgaatccgaccggatgattattggacaacagcaaattagtagacaaatatgtgtgcttaattatcgctgaaaaaagcaattagaaaagcgttttgttatttcttttatggttccagttttggaaaacaaaaattgctaaatttgggttcaattgcactttaggcgtccaatttaggtaagctgaaaaaaggacagtctatgctagagcaattagcaatagcatattccaaagttttaattctgggaatgaatgtttttggaattcaaaaataaacacagggaaaatttggaactttacaaggaaattgtatgattagagaagacattaaataaaataaacggaaacgacatttgtgcagtttaaaaaaagtaaataatgacaaaaaatggagtttggtcgcgaatttatacaaaaaaaatttgctgctggacaaaaattaggtagtctacagcaggtccgaattagtccaatcacaattaccaaatttcacagtatatatatatgtcgtttttgaaaaatttctttcagttaaccgaaaaaaaataatttaattttttttttctcaaaaatttctccttcttcatcaatttcctactcttttctcgaccagacccccattcttaccagtgcaaatttttaccggcggtaccggtactagacaaaccggtaccgatactttgatttttgaaaaaaccggtaccggtaccggtaccggtaccaaaaaaaccggtaattaccggtcggtaccggtaccgctcaaccctatttcgaaccaatgccatctaagcactgggacaactgagtcccagcgaaaatggacacttcagtaccaaaagaaataaccatttaaaagcaaaaatttcgcaaaagggagcatgcgaaga

SEQ ID NO: 4756 - DNA, 1907 bp, Heterodera glycines
  unsure (1)..(1907): unsure at all n locations
atagtaattaatcctccctatttttgctcactgatcaactgtttgctgatcaatcccagccagaaaaatgataaattattgcattgtatattcattntaatccaactcagtctgctgatcaatgtccaagcactttcacatttcacagattttgtgctacatagaaaatctttattttaccatttacatttataatttttaaattattctaaaattacgatagaaaaattaataatattttattgaaagtttttattatttactttttgttggttaactattcactgattgtttcgccacgggttagccgattcacaaaaataagcgattcataaaatcgcaaaaatcaaaatctgacttttcctatgatttttatcaataaaattgttatagagaccggcgagggacgggatctttcgcgggattttgcgggatcccagtccgtaatcccgaatttttttttgtaaaatgcggaattgcaggcttgcgggattaatcccatgggatcccatcccgcaaaaaaatttagagttctaatcccgctgtgggaccctctgttggtctctagcttattgtattaattattataaaaatggttataatttataaaatagaggcttaaataaacattcttccaaaagtttttggcttaataattaaacttacttaatattaaataaaaccatggttagtttactttgaattcattccagggaaaatacaaaaaattcttcatttttaattagaattggttaaatttttatagtactttggatttcacaaatttcccccgttatttacttcgcaatttgcaagcctgttgttggaaagtgactcgacccaagccctgtataataaaatacgcttattgataaaaaaatcaatatttccatctttctataattgttccattttttaaatgggattaaaagtttttgataaatatttaaaaaataattaaactgaccactgcttttattgaaaaatatcattggaaaagacagatttttgattttgcagtttttgtgaaccgacaaattataaggtttaaaaattattcaaattaaaaaaaaaattcattcagatctcttcgaaaaaaacattgaacattgttttatctttggcacacttaatgccattaattagcgaattctgcctccgccgctatgcagcacttgtcgttttcatcgttttctttttcgaacctatgtatgaactcgctatgccacttgacatctcatctgctgtattaattaatcacatttaccatttttaattattgccatcgtttggaaactattcattttaatcagcagcggctctcacttaatttgttaaccgtttcacttaaagattctttaaatcgcatttcaatcaaatttttgaagaagttatattcaatttttgcttctttttctttgttttattaaaagtaaattatgttcacgccatttattaaaacttgaaaaaacgcatcaaaactatttgttaaaaaatgacacataaatcagtgagtgaccaaaaaaaatgtgagtggacagaaagcgtcgtacccttcggcggatattagggagggtcattaaaagtaaattttatgacgggtcaccagcagcagtaatcaaccatccattagaaaaggaaaaacacaaattaagtgataaaacggaggcttaagaaatgtgaattttcccgggatttcttggcttatcaaacaaaccccgacactcccgcggtctttcaaactctaaaggatcttacagtaataaccattattgaaataatttttaaaatttattgggcatactttgtactntaatagtttcagtgatttagcgccttcggctgtttctccgtttgttttatatttttatgtgtgtatgcttaaatgaagtcaccgtcacatcctc

SEQ ID NO: 4757 - DNA, 1852 bp, Heterodera glycines
cgctatgcagcacttgtcgttttcatcgttttctttctctaacctatgtatgaactcgctatgccacttgacatctcatctgctgtattaattaatcactttattaatttttaattattttttggaaattattattttaatcagcagcggctctcacttaatttgttaaccgtttcacttaaagattctttaaatcgcatttcaatcaaatttttgaagaagttatattcaatttttgcttcattttctttgttttattaaaagtaaattatgttcacgccatttattaaaacttgaaaaaacgcatcaaaactatttgttaaaaaatgacacataaatcagtgagtgaccaaaaaaaatgtgagtggacagaaagcgtcgtacccttcggcggatattagggagggtcattaaaagtaaattttatgacgggtcaccagcagcagtaatcaaccatccattagaaaaggaaaaacacaaattaagtgataaaacggaggcttaagaaatgtgaattttcccgggatttcttggcttatcaaacaaaccccgacactcccgcggtctttcaaactctaaaggatcttacagtaatagccattattgaaataatttttaaaatttattgggcatactttgtactttaatagtttcagtgatttgagcgccttcggctgtttctccgtttgttttatatttttatgtgtgtgtgcttaaatgaagtccacgtcacatcctcgattagtagcaacagtagagagtttttggttggttggtggtcgattaattaattaattggctgtctttttgcgactgactgatgtcacacgaccgactcgcgcagcggcagcagctgacggacgacgaggggagaaacaaagagtaagctgaaaatggagagtgcggcgagaatggcagagaaatttttgcccccgaaattacggagcccaaagaagaagaaagaagccaacagcacgcagtaaaacaaatcaacagcagcagcagtagaaagagcacacacccctaatttgggaagaaaacgttggtacatgaaacgttgcgcagtgcgcgcgctcatttcgtcggtcggtcccatcgccggcggcgtcgtggtcggcgttctaaacggcggcgacggccggtggggcacaaaccaaaaagagccgtctcacccccccccccccccctccaccaattttctcagaatgattcatgcatatgcaattcatttggtatgaagtagccggtagggggagagagggtaaatccacacgcattaataaatatgggcaaatggatgagagagcgcagaccaaagggaattggaattggctgatcgatcagcggcggggagaaagacaaggggggggggggggatcagcagcagaatcagcacgccagacaaaaacaacgaatcagcagcaaatttttggttgcaaaaactgccaccgatgtgttgatgatgaggatgatgactactgtctgctatatgtacacaacgacgtacacacacttacacatatgtacaacatgtacatatgaataagagggggaaacgccgctgctgttggcgatgacaccctaaaacgctacgtgtacatccccccccccccctccccccatctgtacaccaccagcagcggcacacttcggcagcggcggcgtcgtcgtcatcatgtgcacagagcagggccgacgaccggtggttggatgaatggatggatgaaggaaaggaagacggacggacaagaagaggacgatgaagaaacaacagcagcagtgcaattgggatggggtggggcggagggcctctgctgatgatgacggggggggaggatggacgacgtgaaaa

SEQ ID NO: 4758 - DNA, 3922 bp, Heterodera glycines
  unsure (1)..(3922): unsure at all n locations
agcagcagaagcagaaaaggagcagtacacacancagtggaggaggagagaaagcattggggtgtgcttgctgttgctgctgcttttgcacaatnntatggtgccccttttcccgggaacacgtacatttataaatgtactactcagcacatgtgtttgcttatgtacacacatacatctttctgttttttgggatatcgtcggcggtggcctacgatttttttttgaatggcttctatggcttattttgacacagaaatttaatcaaaaatttaaatttaattaatttaaattgaattttgagtaccttaaaatccggaactcaatttttcatgttaattatttatttattctttttaaatgtctgttcactcactggtgtcggttccgaccggactgcagccgattttctagtccggaatctgtctttttgggaattcacaggtttttctggatttacggatttttccgagcttaatcttgaaaagtcctacttgaaagattttgaaaatgaagttccgaatccaggaaacaaaattacatgccattactgggctcgtttaaatttatttgttcatatgtattttcattttaattagcaaatcgcctctttcatctttttcacagtaatgagaaaattgatgcttttgttttcaattttcgccgcttaatttatgtgtcattaacctgttatggaacgacgtttttacgttttcctcggcctcccctttcaatttacccaattagcaaacgcatcaaaataatgtgtacacatgcacatgcttacatatgtgcatactttttacaaccactgctgctctcattagctcattaattatgcttgttgcacaccatttttgcccctcgtttcagcatgatcaacaggttaattgtaaaaattgctattgccgacacagcagcaacagaacaacaacaaaaacaccagattccgaatgaatcagtgccgtcaccgccataatcaattgttagtgatcgaaaatggtggtgccaagccaaagcaaaagtgccaacaaaatgatgatgattatgatactgattgtccgtccgccttggccacatttcccattcaaattggccccagcattaataccgccgttgtctttcgcccttttcgccggccccaattttttgccgtttttattgttgttgtgcttctccaatttttgctgtttttgcccgccaattttgttttggccgaccaaaatttgttggtggacaccgaactgttctccgccgacatcatttcccaggcgtttgtccagaccgggtccgaactgcactatttgcgcgacatttcacaccaccaacaacagcaacaccaccaccagcagcaggcggacagagggggaggaggaggcggtggcccggccgcacggttagtgccggccacggcaccatcggccgcaaatggcagcggcgggggcggaagcagcaaagtggtgaaaaatgggtaagacgaaatgggcgagaaccctggataaagggggattttcaaaacggagttggtgccgttcgagttcgctggaaaatttctcatttgggtttaatggcattttctgaaaaaagcaatgattggcatggcccttgggtcgccaccatttttttttgttatggatgaactctaatttttaaaaaaaaatttttgacatcgctgggttttttctacttttgcttattgacttgaatctgaagtaactaccaaaaaaaaattccacgttgaaggtctcggaccatttttttttcttcaattctatgttttaaggttgaaagtggaaaagcgttcagcagtggaggaggtggtgacattgttcgagtccgagtcaaccgattttggccaaagcgcatttggggtaagggaaagtgacgaatgattcaaagttacaaatttaagccaaccttttaagtaaaatgttttttaagaggcaattttaaatcaaaatgattgatttttgttgtccaaaataaaagaagttgaaaatttatttgaaaaattgaagatttgctgggagagagaagctcgtattttttttgttaaaaagtacttttatttggaaaatggaatatttaaaaccaaacaattctcattttcactcaaattttgtccatttttcaggtgcctgtccaacggcgagtgtttctgtccaatccgaccgatgcgaccatttccatttcggccatcacaagttcctccatcagtttccattgctcttttgttgaacaaaaagtgagtgaaaattgctattaaatttactgtttttttttcattttcaaaaaattgagttcaattttacgaccgatttttgtcatttttagatttggccccaaaaagtgataaaattataagaaaaaaattgcgacaattttccggtatttgttaattctgtttaaatttaccaatacagggtgtcatggcaactcgtacaaaggcaactcgtacaaaaaaattctaagaattttcaactaaaacttagaatttttagataaaaaaattaaatgcatttttttacctagaaaaatttaaaaaaaattctttaaaaaattttcaaaaagtttttataggctaaaaatccatttggatttttttatctaaaaattctaagttttagttgaaaattcttagaaatttttttttggtacgagttgccctgtgcacgagttgccattgaccccaatacagagccaaaaaattattcaaaaaaaatttttttttttttctgagcgattttccggtcccatttttcgtgttttatttgaattcgaattggattcacatgtgtccagagttcagggatcaaagataactgcaaatttcattttgaaactggggatgaccttttacaaattccaaattccagctttttttatattttgtcaaatttccccatttttttgcagaggcaaaaaataaaatttgtgccaaaactgtcatatttttcaccattgaattaccaacaacaaattgttttcagtcactatcatcgggacaacgcacttcttttcgcgtctattttctgccagtcctcgagcagttcggcccgcaacgggaactgatcaaagtgcacacgtccgtcggcacatttgcccaccgcgtccagggcgagacgggcggaaacccgtaccggatacggtaacactaggattgagcagtattaactcattgcaaatatccgaatttggcttgagggtaacaaaaatttcttatccatccattcactttttgacacttttgctgtttggtcccccgaaaaatacataagaaaatgttcatgaatgaaaaatataccaaaatatgttgctttttaaatcataaaaaaacaaaagtgccattttttgttttgaatttttctttaggatttaaagtattttaaattaaaaaaattttcgaatttcccacaaaatggcttcttttcggtttatttggggctgaatttattgctagattacatatatccaccaaattgatgcccctaattaaggtcctttttgggcattcatcttcctctgaatgccactttttcggctccgctgagtctgcacaatccgcacacaaaaacgatggtcgtatccgagctgtttgtcagcgactgcaacgtgcgcattgaactgaacgatggcacaacggtggcaatgcaaaagcgacgatgggacggcggggacaaaagtggcggcagaagagaagcgatggattgggtagaaacttaacttgttggacaatttaccatgggggatttaaccgagtaaaacatggggactatttaccatgcggatttacgatttacagagtataaattcggagcaagtcgtccctctcccccacctggagtttttttttgtttttcaaaaaacttttattggaaaaatttctgtttgaaattttaaaaaacttcccagaggttactga

SEQ ID NO: 4759 - DNA, 3762 bp, Heterodera glycines
ggaggagggggagggaaaagcacggggaaatggcgagggaatggcaaaaagggggagggaaaggtgaggagacggaggggagaaggggggggggattgatgaaaaggaaaagggtaaatgcgatagcaccccgggggagggggggagagccgaggaacaatgcgcaattgtggacccaaccaaaattccccgaggagagattggggtgagtgatcgatcccctccccccctttcccttttcccttcttttcccccacttttattggactccctcccccttgtcgattccagcaaattcttttctcacttaactcaatccgcgttgaggcatccaaagcggattatcagagaaagagagaccatttatggaaagagggaaaaaagggggaggagggataaaatgaaatgaaatgaaatgaaatgaaatgaaatggaatgttgtggcctatgtaataattggaaattatggaaaacgaaaggggcggaaaactttcgaaaattctatttttaaggcgaaaaactctttaagagaatctttaattggttgcatttaaccaattgaacagataaccttttgaaaagggtgccaaaaatgccaaaattgccaatgtttgccggggtgaaatttgatttgatggattggactgtggtgaggtgagaatgaatggggaaacagcagcagagcaatcatttatcgtcattagtgggggggggggggggaatgaacgcggcgataatccgacaaattcccccgggggattaatgaaacggtgacaaatcatcggcggaatggcacaaaaggctaattggaccagtcagcaggcacaggaccaccccttctgtaccccgttttgttccaaatgcggccaaaacttggccaattggccaatgagtggtggcacgggagacaataccaagaagaaagaagacgggagggcaaatgtggcgaatgcaaatccaattgagagagcaacgcattgggatggatgttttgttttggcctctggcgacgatgttgggcttggccagtggacttggccaccctcttccctctctctctttccctctctcgtcctctctttctcgcgtcctctctttctctcccacatgtctctctctcgcctctccctccctctcttggtctactctttttctctgcccttgagtgttttgcggttcgatagggcgatggccaagagttgtgcctgcgagggaagagagaaacataacaggcgaaaggggaaagtgagtgccgtcagaccgaacattgcccaaggcaaaatgccatgccatcctaaaaagaggagcaaaatgccatcgcaagaatgggagaagaggggagaatagcaggtgctaaagaaagagagagtacacgaaatgagacggaatacagtgagcgagagagtatacggaatagagagaacgagaaagggagagcatttcacagaaagtggtttttctgtgtagcagagaaagaaaaagtcgtcctctcacactctctcatccgtctctcacttcttatgccctcctctttggcagcactctcttgcctttctttctctcaccgtctcatcattctcttccgttatttttttctctttcgctttgtctctgtcttttgcatttattatgcgcaaatgtaatacatacataatacaaaaagaaagtgcataaaacattcatgtcattatttaatttgaacaaatttgaggggaaaaccgtaaaaataaaaacaaaagagagaaaaaagagaggggcgagagagagagaaacagagagaaagagaggggatgaggaagtggggacggaaaaagatgggaacataataaaataatgatgggaatggtgagaatgataggaagaggagattaaattctgagtgatcggcgcgcgagcgaatgccaaccaaaccaaaaaaaaggtcacttctgtctctgatcagtccttcgttcacttgcctctggtagttcattgatccttctttctccgctctgtgccttaacatctttttgctagtccaccctctattctgataaatccattgcttctgactgtccttccgcttctgatcaactgtgtatcttctggttttagtccgctcatatccatctctgatcagtcctccatctgtctctgatcagtgcttctcccatctttaactctgtctctgatcagtttccgatcaatccttctccatctctgattatatttctccctctgctctgtctctgatcagtttccgatcaatccttctccatctctgattatatttctccctctgctctgtctctgatcagtttccgatcaatcctttctacactcaccccttctcttcttcttctgttctctgttcccttctccgtttgatcagtcgtcctcgcgcatcccttgcagcaacgcattgtggtggtgatgaaagtggtgaccatgcaaatgactgttgttctgcggcagatgcgtgccattgttgatgccaatgcccgcgctgtttgtcaaatgttgcgcgtgtgccaccagtggcgttccgtcgatgcctccgcggttcttcagctttttctgcttcatcctccgattctaaacagtcaaaatgaaaaagataatttcataatattttctatcatttgatcagatggaccgacctgaaaccaaatcttcacttgtcgctcgcttaatcccaacttttgtgccaattcccatcgcttctgcttggtcacatattcgctgaagatgtattcctaattggggaagaaaatgaaaaatgggagacgagcaaagcatagaagccaaaaataattcttctgatcagtgatcgcttttgatttctgatcacaaatggtccttggagacccgccaattaggaaagataattagtctttcgatggtttttaactccaagactgatcatatttattcatccctcctgctcgcgacactaacacttattccttttgatcaattccaatataaggtcagtgagtgatcaaatcagtccctgtccttcccatccgtcgctgaaatcatttcctttcaatttgctgatcaattcaatcttttcccgccctttctttttctgatcgctgatcacttctgcccttccccttccctttacctgctccaactccaatgtctgtccttttgcgtatggtttccgcttctttcgcgatgcgctgcattgagttgtccaatccaaatgtggaatcacatctgaacacttttggatgaaaatgaagtcgatcagatcaaattaaaagaatgccccccccctaattttatttgtcgtgtcattttttaaactgtcccaattaattaattgcctcctccgccccttggcgaggccattccgtgcgttgcgcctttttattcgttcatttccctggggaacaattggccactacccaaaggccaacagaaaagcattgtggtggccaattgggcttggttcaatgggaaaaatggaacattacaaattaagtggggggggggggtagagagagaatgagaaaaataagggggagagagaaagagagagatgatactgtaatggagagaatgggcgggggagggggagggtggaggattgatgggagggtggaggaagaaagagagttggaaaagagtgaggaaggagagagagagagagagagagaggagagagaggtagagagatggagagaaagagaaagagagtgagaaagaggagttagagggagatatagtggaaaaaagagagagatatgctaaaagagagttgggagaaatgaa

SEQ ID NO: 4760 - DNA, 1386 bp, Heterodera glycines
tttcctccttcgtcatcaaaacggagcgcacatttttatggcaatccttcctccccttttttgtatagaaagaggacggacggatgaataagaaaatggggggggggaggtaataaaacggaggacgaaaaacggatggaaatttggggaagggattagaaattgggcagagggatcgatatgatggatggactaaaatgtgcatgaaaaatgctggacgagaaggagccacccccacggcttcgaaatgccatttgattggtctgcaactcttatggcacattccgactgagttggcactttctgctttcatttggtattttcttacaaatccaattatttttggcacttttctcacaaatagcccaatgcttttcctttacccgtccccctggggttcattcaccgattgattagcccctaaatagcacctcttccgccgccactgccgcttatccccggcgtgccaaactccggcgccgtcgcttcgtcggtgccgttttccgctgttgcggtgcccacatagtggtgcaactgttgttgctgttgttgctgctgcatcactgcgcccgctgccaccgcatttgacagtgcgtacgcagcgtactgttgctgatagtaatgccattgggaggaaggcacggaagcggaagaggaggcggaagaggaggtggagggcacggccacgccaatgccattggcagtgtaaaagtcggacgcattggcggcggacgtggaaggcaaaacggcagacgaagaagcggacggcactccgccgcttgcgcacagtgtcgagtcgaagccttaaatggcactgggaattaatcatctttaaccaaaatggggagaaaaccgatcgaaaacatattgatcactattaaggaaattttgcattttagctttaattgacagttcttcagaaaagaaaataggtttgagcagttaagtaaaggtccagatggcatgatgagcagacatttaaagtcacaatttcacgcgatcggcagatcgccaaacaatgccatggacagtaattgcccaaggcactaccgtattcggtccttcccaattcggcaactgttaccattaccatgcaatatgcatactcgcatactcttttcccccatttttacaataacatctgccccgggagatggtattttggtggggtgcccaaagggatggcatttgcggggggggggggcatttaattgtaatatttggcggataattggcaggtgccatcatttgtgggggagggaggggagttgagagcagaagtggaggacgcatcgaattgcattccatcccatccccgccggtcaaaaatgccaaaaacttacggtacattcgaagagcgaaccgaaagaaaaacgggcggtgctg

SEQ ID NO: 4761 - DNA, 2636 bp, Heterodera glycines
  unsure (1)..(2636): unsure at all n locations
tttctccgttngggttacccaaaagcagtgtccctttgatgttgccgacatggagggaaaggaggagagagagagagaaacaaacgagagagagaagagaaagagagagttggaatgaatgaatgttgttgttgcactgtgtttgagcgtcaccccaactctccttcccccccccctccctcaaatattagttcaaatcggattatgccccccatccgatgaatcctctcccaattgtgcccctaccgtatcccgccgggttcattgccgcaaggaatggtgccatcgctgccggtgccgttccaccgactgtgccaagagacgatgtgaagttgttgttgttttttgtactgctcgttgtcgatgccgtcgccctttcgttctccaccttcgtgtcatccgagtgctgctgctcgttgctgccgttccctttgctttttccgccaccgcttttgctttggcatttgcctttcggcgttgatccgttgctactccttttggcactcgcttttgccggcgttgtgccaatcagttcagatgttgctgctgcttcggcactttctccgcctgcttcgccttcgttactgatcattgttgaatttgccgacgccgttgctgctgctgatcctatttttggagggtttttggcattttgtctcccctctggtcggcagatatttccttgtccaactgaccccattcgttcattgatggccacccataataatacattgccgcagttgctgtcggataatttccgctcattagctgtccataggcacttaattaaccaattcacaaggctaattacgatttgagctgagagacaattcattaagagtttcaaatgtttgtgcctaattttgtcattttatattattaaatgttggctgtttttgattttaatttgccaacaaaaccccgtgcggttgtcctaacttttcaccaattatcacacttcaacaattaaccgtggccaattgccgtcgaccattctcacctgttagctcccaacagtgccattccctcctgtttcggcggcttcgtctccaaaatgcccatttctccgcctgaaattggcactatttcggtcatcaattaaagaagatcaccgacctcctcctgcttctcccccgacattaaaagcgttcgaattgagtccaatcgctgccgccgctccaccgccagtggcgccaattccggcaaaaaccgcgaaaggatttgtagcagcaccggcaaccgcattttgagcagcccaattgatgggatttgtcgctgtagccgccatctgatggtaggaaccaaagtttggcacaaatgccgtggacccggcggagggaaaagccgcggacgacgaagatgaagcggcggatgacggaattccaagtggaaattgagcggccacggcactgttgtgctgttgctgcaaggcggccacggcggcagcggacgatgaattgtgccccgcggcgacggactgcgcggcaccggcggagggacaaagcagagacgaggggaagtccatcacatcatgtgccgttttggggaacactgtgctgaacagattgggcgcctgttgatggtcaacggtgccaatgccattggcattgtgttggtaggagggaaaatgggctgcggcggacgattggcacggcacggcggcaccggtcatcagctgattcatcacggaaaccattggctgttggaggtgggaatggtcggccgagaagtggggagggcgttggatttgctgttgctgcagcggatggcgtaccaattgcaaattgtctcttaattttaattttttacatttgaatttcgaaatgaatggcatggcaaattgttggcaaagaatcattgaattattttgccttaagcattgactcgagacatttgaagtgacactgcccgaggcaatgcttttcctccccctttttttttgccttttttcgccctttcctttcgctaattatgctcattatcatccatcccatcaattttgtgctctactccgattgattattgcctgattaattggtttggaggtgtttaatgggcggggggaaatgaaataaaacggacgaaatgggcaacaaacaatcggcggaagaagaaaccgctgctgatcatcacaactcatcaaaacaccaccgcaaactcttctcctcccccccccccccctccccaaagtcacgccgctcgcataaatttcgttcattcgctcatcgatttgagagaatgccgtaaatggagcaataacaataatgggggaggggggggaggtgtgccgtttggtccaccatattgcgctgaccgacgccctccacgtgttcaccggtcatgacagacgcaagttgcgcgctctcacaccactaggaacgatttaaagcatgtatttactattaatatttattcaacttacaatgtttattttcctttttaaagaaaaattccttgtaaaatgccaataccacaaaggcatttgccgaactctgattaaatgctccgtcgattgatctatcattttccctgctcatgttagactcttcttgcgctccgtgtcctttgcggccatccatcgtacgcgcattgcccgcgagaatttgaaaaagtgctgcgacacttagtccataatg

SEQ ID NO: 4762 - DNA, 460 bp, Heterodera glycines
ggaggggagggagtacacccatccaacggggtgaagtgtccctcccccctcctcgcgtcaatggctcctcccccaaaaaggtcccgcccctcccgagagaacgccgattggatgatgcgacgcgacggaagagtggcggagctgggcaccttcgcccctctgccccctcccccccccggcgccggggcttttccctgcggggcgaaaatagcgcccggggatgcttttctaattattttgagagtgaaacgaatggaaaaaaaaatctaaaaagcaaccaatccatttaaaaagttcgtttctttccgaatgccttccaaattgagcaaatttgatcactttccattgatcagtcaaattattaatttggaaaacaaacaaaagattaatttaagcatcaaaaagaaaatggaatgccaaaataagccagagttaggacacaaattcagtgtaagcataa

SEQ ID NO: 4763 - DNA, 1599 bp, Heterodera glycines
cccgttgaagttggtgggttgagtcccagtgtttagaatgccgggagattggagtccattgtttggaatgccggagatttgagtcccagtgattgaaatgcagaagaattgagtctcagtgattgaaatgctgggtgggttgagtcccagcgattggaaagtctgataattgagtcccggcgattgaaatgttggagggttgagtcccggtaattgaaattctggtggattgagtcccgttgattggaatgttggtgggttgagtcccagcgattggaatgttggtgggtcgagtcacagtgatagaaattcagaagaattgacttccagtgattgtaaaggtgctcaatgagtctgctctgattggaatgttgttggttcaactgcccagattggtcattatagattatcagtacttccacatcgggcacgccgcggttgacaagccacggctccatggcgtccttcagccgtaccggatcaacaccgtggtcagcgacggtgggaaacgcggcccaaattgcgcgacggtccaccgacttgaaggagttctcgcgcaagaagcgcgtgatgccggcacggaactcggcaggcccaacctagtcctttatcccatatatctctcttcccaccacccccacaaaatccaaaatcctcaaatccgtccaacaattctcctcctccccacatctctccccgtatcattcattcatttattcattggtcctccacctaaacgacccgatttaaccaacgcattaccaaacaaaaacgggcgaacaaacattgggaaaagcggcaaaaacaaagacaaaaaaagggggcgcagaaccggtggtcgaattggattaggacgaggatggcatttggcacagaaatgtgaacaaaataaatcgcatcatttgtgccgatgggcgaaacgaatggcccgaggcaatcggagaaggagtgatttacggcactttttgttgcgcgagaaagatgaactcatcgccgcggggggagggagaaggaaaggaataaactttttgcaaattttcattccgtcgcccgaggggccaaaaggcatttgggagatcaaaaaaagggaggaaatgggaaatttatatggacaatgtgtgtgtgtgtgtgtgtgtgtgtgtgggtggtataagctgctgaaatttgcggggggcaaaagggggaacagctgaagagattcccccggggggcaaaaccatcgatttgactgactaaaaattgaaaaatgtctgtttctcttccgccttttctttcatctgttattctgcgcatattaattcactcagtgctcttctgctgctcgtccaccgattgattctccgtttgcccattttcgccttggtctttgccccccccgggcagcggggattttcaattggaattccgaattttctcgcgcggaaagggacgaagggtcggctaagtcccttcccctgcccacccaatgcttcttcatccctctgattcatcaattgtgctctctcaatccgttctgtttgtcctccatccccttcaccctatgtccgtttttccctaaaatgttcctctcgttctcttccttttttccctttttctgct

SEQ ID NO: 4764 - DNA, 2813 bp, Heterodera glycines
taagcgaaccgctaacgattttcctggaccggaaaatgaacaattgcagcagcggcagacaaagtcgtgcactgtttgtggggctgtccgaaaaagaattggcggacgaacacaacgaactgactttgtgggcgacggcactccgagtgggcccattgcccggcacaggcaaattaatttgaaatagaatattttagggtagggccacgacctcgaccccccaaaatttaagccattttcgtggtataccccgaccccgacgctcgacaccacttcgaactgaaaggcaaaaattggaaaaccctgaacctccactgatttgtttacaccgaacccgacctagctgcccccgaaaaactccgacttttctcaccccaaccttcggatccttaccatagaatatttaattaaaataaattttaaaaataatttttaagggactcttggaaaatcgacgggcgccacagcggcgggtgaggaagtgcgccagttttacgcgcatgggcacgtggacattggcgaattgtgctgggacatggcggagaaggagcagcgcgagttcactctgactttgcacaaaaaagtaaaaaaattttttgattaataaaattcaattttaaaatgcgttaattgtcagacggacccaccgctgccggcaatttgccgtcagttcccggctggtagcaatgccgccgtgccttacccggcagctgcttccaattgcggcggtttcggcacaactgctggcattggtgccgcgggggacaataaaatttgccttaagggcaccgtccagcggttgtcacgcgccgcaacagcagcacccgcttacgaaggcgtacaggtgcagctgaaactattgaacaattcccattttaaattatcaaatgatttaaaccgtatttcctaaaataccgtcgctctaataccgtaatttatttgaatgttttaagtgtcatttaattgcttcttcattttacagtctttgcgcatgcttaaaagctcggatgattgctgtacttatgatgaaggcgcctcatcggataagcatattatgccgagaaggaatgaagtgttcatttggcttcgtagtgccgacttgcacggcgtcggcaaatccgagaagaccatcgaagtactataattaccgtatatagaccatattcttgaagattactgctgcttacaaattagcacacaacttcctccctctatttttgaattttcctattaattgactctacagtaatccacatttaggcaagcatttctgtggtggatgatgaaggcgtttttcaacccgaagccattgaggtgccatttaaataattcgaaaactgatcgaattactttttatcaattcccatgacattctcgacagattgtcactcccgagggagttcggcatcaaagcacttttcggtgccgcgtttggttctcggaggatcggccaaagctgaacgaactgattaaaatttgtttgccgaaaggcgaagtgcgcaacctgcaccttcaggtggatcatgttaaattttgaaatttaaaccccaattaaaatggcacgaaaatgggggaggggattagaaagaattccctaaaatgtagaaaaatgatcaatcataatcatcatctgtcttaagattctgttctacaacaaattgacagggaatgataagaaattactgagcagcagcagtccttcggcgggtggcccgggcggtgccaaaggccctttcgctttggcatttttgcgtttgatcaacaattacgtactttgcgaggaggacgaggacgaattggtggtgtacaaggtgtggtgctaacgagtgatgcgcggcacattttcccaagaatggaaatgccaaaaatggtcacaggtggagaagcgacagtcatcgtcgtcgggcgggccaagggcatcggtgccgaatgagccgggcggcactcgaccaattaatgtggcctatttggcccaatgggcgacgcgcaaggaaatgcttcttcgccctcgtgcacaatcgagcacagtcggcgccggtgctgctgctgcttgtggagcgggtacgatgagtcggcacgaaatgtcggcactaaatgttggcattggcaccgccaatggtggcggcgccgctccgtacgctgtgcaaagcgacaaaaacaacggcgtacaatttgtgagcttcgtcaactcaatgctgcacaccacaaaccccattctgctgcaggttggttggataacaacggtggcggcacttttttttattatggcatttttaaaatttgtataatttaaaaatttaaaataaattttattaatttcggcagattttgcgctggaaagacaatgggcagcagcttttgagtcaacggttgcacgagttttgtttggcactcggtgacgagcgacggcacgacggaatggtcaaagagttgcgcaaatttttgagaaatattttggacgccctttttcaaatctctggtgaattattgttttcctttttttaaaattatttccttattaagctgccattgtgccgcttcagcgaaatgttttcgatgctttggtaattaaattgaattaataattaattaatttttgcccttttaattttgtcaatctcccaaattcgtctctttctttttaggcttacatttgtcacttttgcgggcaattgtctccatttaaatctctaacttggagcagtacatttacagcacacattgtccaaaagcattcacattcattttgcatcacatcgtttggtcagtttttagtatttaaaaataaaaataaattttgaaatttattttaa

SEQ ID NO: 4765 - DNA, 1000 bp, Heterodera glycines
  unsure (1)..(1000): unsure at all n locations
caaacttatcaggcacttttttaaaattttatggcattttttatttaaatttcagagattcctcgaaagatcaaaatcagcagcagcagaatgaaaacgatgagttcaagcagtacatggatagtgtgtttgctgcaatccgacgtttgctgatgggccccggacggcggatgacctgccaaaatttggcaatgaggcaattggcatcgtccattttggggccaatggcatcggcggaagacatttatgagccaacagaattggccaagttggcgctgaattgatgagtcaaattaactgtggccctattatttaaaagatatgccatccaagtgttggattcgttgtccgaaggtgttttgatgagtcagaggctgcattttgtcggcgaactcattgagacaaaggtggcaattttctgttaatttgagcattaaaaaagaaagtccattatttttttatctttattcttctaatagaccctccgacagttctgtttaccgaacggaaaatgtcaaataatttttaaaaaattataaaaaacgaataatttataaaataatttgttttgagagggtggattaatgatcaaatttgacttttaactttccgagagccttggaagggaggcggggcggggggggggagggctttattacagggaagtcattaaaaatagcctcactttaatctgatcaatctttggatttgatcaaagttcaatgatcctatcctcccccgcttctgataagctgtttgccatcgccgagtgccgaacactgctgttgtgccgttgtttggacgagttggcctctctgatgccaccccacgctcgtgacgaagtgccgtgcgtcggcggcagcgtgacgctctttacgcaccgttcgcgcagtcgcagcgaatacagcttgggcacagcggcagttacctcgggcaatgacagcagcaggtgggggaggagacttcgacanaaagttaatttaacggggaagggaaaact

SEQ ID NO: 4766 - DNA, 2660 bp, Heterodera glycines
aaagcaacaaattcgctttttcagggtgactttgcttggcgacccgacacatcagcggacgctgcacgctctgctgctcggactgttagacaaattttcggcagaaaattttgacgcctattttcgcgcgctctccaatcagttggaacggtaattatgtgtaattatccgacacctttgaacaacaccctgtggccggcgagcttttcgggaacggcttttttggctcagctgatgtgccaatttccgattgaaaaggaggcccaagtcttctcttagtttcgattgtaattttgatctcgagaatcacctcctttctacaattaaattcgaccttttccccgcacttcgttggcattttttgtggttgaagtaagtatctctgttcaggcttgacactctgtccgaaatgcttcacatgttccgcgatttgctcctccgttgtcccgttcccgcggaatggtgccgtccgtcgccactttttccgttaattaatatgtgccaccattttcgcaggcaatcgttgcgccgtattcagctgcgactgttcgccaagcatttgcgaatgtccgccgcgttgtgccgacgcgactttggcacgccggcgcactttgacgcggccatttggtgcgaatgcattctcagttgtgtggcgttggcaaaatgttgcgccacgacgacgactcaaaaatcaacaatgatggcacacaatgccgaggcggaggacaatggcacaacgcacagcgattatgaagagggagaggaagaaaaaggtgagaaatgccaaaaaaaaagatggggccaacagcagaacgggtcccaacccaaaatgggataagacgggaattttgaagcctttagtcctgatttctgccaatttttttgcagactccgaattctgttacgtttaaagcccggaattttgattttccaacaatttttttttgaaaatttcatagatttttaaaatcgaattttggcaaaaaaacgaaattttctttttaagtcttatgtgatcaacaaattgacaattctgaaggtgaacaaaagctgggaaagtatgcgaccgaaattctaaggtaaatttttgtaattaataatttacagtacactcaccaaatacagtaaaacaacaataatccattagtgacagtttagagctctttggttttcacttgtgccggaaagcaaatgtcaactgatgccgcacatcaccggccaattgctcgaggtgggaaccaaattttattccaaaaatataaatattatgaaataaaataaaaaaaactggaaaattgtcaaagaacgcaagcaattactcaagactatcagaggacaaaattaccgaaataaaatttaaaagaattaaaataaattcttttgaaatgaaaataaaataaaataaatttttctgtcacttcgtttctttgattcgcataacattactttcctttcttttctttctcagtatcggatgattatgatgtatgtctgtgtgtcgtggtaatagcctaaaattttaaatttttagtttaattttttaattttcattttttccaaaaaacacacatccgtgccgactcgtctgcgcaaaaatgtccccgttcgattgcgactgccattggagtccctgtgtttgtccgccgatcattgcctgcgaaataatttgaattgtaccgtagttcccacatttcatttttcaaaatggtcatccgtgtgttttgtattggtatacggtacctaccgcatgcacaaaccaatagcccgagtagcggacacgcttaatctaaacgaggaaaaggggggcttgaatttgcatttctgtgttgtgctgtactgaacctggtcaatgatgtatttagacagttggcccatgttatgctaaatttgggaatatttttttaaaattgtgccgaaaaataagtgccgaataatagcggaggccgtcgtttatgaagctggacagtcggctgtcgtaacatgacgccacgttgaccgcgttgacgctgctcgcgccgctacgcaagcccaaccagccaagtgccaccaaggatgtggcgttgcggttctgctgttgatgctgagcagcagccactaaaagtgccaattaagctaatgccaaaatcgcatgattttggcattttatggcggcgcgaaagtgctaaaaacaaaagtgccattcgcaagataaacagacgcctcttaaagctaattctgcgcgagtgaaagtcatctccaaatttgtcaaaaattctagtcctcacagcagtgtaagtgaatctaattctctatccaaagatttactgttattgcgccgattggtccgattgtcgtcgcccatttgtccgtcgttggtgccttttgtcgctttttgttccggtgccatgggctgttcctctccaacgatcggagaagcatttgcgcaattggtgctgatcaccaccgccagcagcagcaaaaccaaagaaaatgccaatggtaaaaatggtcggcccatttgtgcgtttggcttaaacacgagtcttaaaataacccaatttaattagttttaattttgattaaaaatttttgccttttaatttgcagcgagtggttcaaagaattaatgggaaatgaaaacatttggatggctatttattatttatgttctgttctgatca

SEQ ID NO: 4767 - DNA, 3645 bp, Heterodera glycines
atcagcagatttactcgccaatacttttgcatttttgtgaaaatttgggcacaaaaagcaaagaataaattaaaaagaaatttttaaaaaaatggaaatgcctcggggggtaattggttattttaaagaaatgaaatttacagatggcctttgccggcatttttctctgcgagtttgcagtttcaatttttgtcgacatgctcaccaccgaactgcaaatcaactcggcaactgatgttgtggtggtgcgaaggcggaaaaagggtttgtggtatactgtagaaacctaaacattgctactgtatctgtataatacaaatacacacagtatttcgcttttcgaggggctcgcccttacaatacacaaaaatacagtaagacccagaacattgctttggttactgtacccgagattgacttttgtagtggaacaccagcagcaccatcaaaagctcttctcggatgtgttcatcaaccggttggacccgttgttggacttttcgttggccgacgctccctttggcacttttcgccgcgtattcagccgcgcattccaacggtattgcgtggagcaaagtgtggcagctgaccaacaatttgcgtttcgctcttttgtccaggtatggtatgtcggggtactataccattttggcattgtgcacaatttttttgttgtttggttcatccgattttggcacagattgtcgacagactattggaactgttcgccgcctacagatcggtgcagcacagcaccggcgacgagatggccgagttgggcatgttctgcactgctcaactcgttaagtgttgtttctcatttcgagactctcggactttatttggcatttttcacaattgaatttattatgcgattttcggcacatttagggttttcttgcatttctatcatggttttccgaattttctcattgatcaatggattcatgccgttttctgtctgtttatttcccaattttcaggttgacttctaccagtccatcgagcatcatgaactttacgtgctttacgtgtaaatatttcttcgttttttatgccattttaaaattttcaatttttatgccataattaacggtgccatccctccatttactttttgacaattagccaatctattaatttattcttcgcccatcagttacaagctgtacactttgcatcgcaccgttggcaattgggtggaggccgggctgacgctgaaacggcacgccgatttgttgcgctggagcacttcacatcggcccgagtcgttcctttgcgggacggcacggaaaagcggtgggaccgagtttggcacggagttggagttgaaggagtacatttacaaggagatggcggaactgttcacccaaggtacagtaattgggaacagtaattttgatttgcataaaaatgatttttacttaaattccaaattattaaaaaccatacaaaatgcttcaggcgagcactgggaattggccattgaaacaaatcgggaattggccaacatttacgagacggccacctttgactttgccaaattagccgatttgttggcacggaatgcggcgctttatgataaagtgacgaaaacactgcgcatggaaagccactactttatgatcgcattttatggcaaaagtgagggatcaatcgatggcacaccaaaatgccaaaaaaagagaaaaataataccatccctactttcctcttattttaaggctgtccctcccatttggtcaccctcaaatttgtggcccggggccgtcccctggagcaatggggctgtttcaagcagcgatttgtggccaatttctccgacttcaaatttgtggacacattggacaactgcgaggagacttaccgagaaatgaacggaaaattccttcaggcaacagaaaaattttaattttttgttttttaaaattttattttcttcctcagattgtgccggtcacgccgataccgctgaaggaggtgtatgccaaactgttgcagaacagtccatgccgtttggccagttggtactacaaacatcacaggtggttgagaatcagcgcatttttgggcaattaaatatttttaaattattaaattaatttgtgaaacttgttggcaaatttgctcctgtgctcagggtccaacgttttgagttgattcgcagagagttccgcacagacacaaaatggacaaagctggaggacaacgaaaccacgcggctttggcttcataagcgaatcatccaaattcaacggtggcggaacaattaattataattaaattaaattataatttaattctaattttttgtgcctcgtggatttaacaatacattttctttcattaaaattgcaattatgccccgttttctttaagtcctttgcccgacttgctcagcatgggcccagtggtgagtgagttggacttggacccgttgaatccggtggaagtggccattgaaaaaatgcgcgagggtatttttaattaaaacaatttaatttatttaatttaaatttcttacagccaatgacaaattgacagagactgcggcaatggtcggcgaaggttttgcccagtcattggtcaatttggccggaatgattcgcggcattgttcaggccgatgttggcggtggcatccgtaattaccaggtgaattaatggtcggacttcattcaattcctgctaatgtgattatttacctacatgcaaaacaggaatggggtcgagtccttcaatcagtcgcgaagtggcaaaatgtggaagcaaaaaagggggcggggtgagggcacgagaggaattttcgaaattttttttacaatttaaaaaaatttatctaaatgtctccttactgatgccgaaaggtatcggaaagcctaatttcctcacattttttaattgaaaaacccctgggaatttaataaaataaacaaaatcaattatagctacagtaattggtgtttttttctttaccccccccccccatttaagccatttttctcggaggaatcgtacgccgtctgtacggaggaggaacggaatgccattgggacgctgaagcggctgattttggagcaaacatcgcttttggaatacgctttgtacatccattctcaggtgctaatttggtacatacagttttatgatataacccccccccccccccctaaatttcagagtgaacgtgcccaagcgaatgccctcttccacaattcgttggccggctctttcatggagcatcgccagcgggtggagcattggctgggcccggtcaagtcggtgctgcctgaaaagacgtccatttacatgttggaagcgaccgcagcagcagcggtggagacgatgacgtcactctctcacgccgtaacggatggaagcggagggttggaaacattttgaaaatatttttaaatttaaaaatgtttaaaattcagtcgcaaccaatcggcgcaacaattgtccgctgtttcgtccactccaccgccacaacagaaactgacgcggatgacgtcactgcatgaaaatgggatgacaacaacaaacaacaacatgatgatggtctacccaacagcagcagcaaggtgggggcattaatttaccggcaatttgaaaatgatgatcatacatttatcatatattaaaa

SEQ ID NO: 4768 - DNA, 4195 bp, Heterodera glycines
aacccccaaaaatcccaaaaaaggtgtgcatatttaatatttgcttaaataaacctaaaaagtacaataaacaaccaaaaaatggggtttaaaacttaaaaatgcatattttttattgttgttcgttgtatcaaaaacacctccaagtttgccaaatttcgaaaaaattctcattaaaaaaaaaagaaatgttcgcaaaaaaatgacgaaaatatttattgaaaatgccaaaatgacgacgaaaactcaaatttttcgtgttttgtggggtgtaatttttaaaaatttccaaaaagttgatctttaggggtgtatttttcgtttttttttcatttttcttgtgaaaatttccaaaaaatggccaaaatatggactaaaaacccaaaaatggcgaaatatggatttattcccgaaaacccccaaaatatggatttatatggactaaaaaccttcaccaaatcaaaaaattttaacgcagaaatgctatttttaagcccctttcttcatagcatatgcgcagaaaaaatatgttaatccatataatttacaaccctaatgataaagcataaatattagcccggcaatagtattgttaaaattcgaaatctctgacaacttaacggacgggcacgactgggccccgccaactgggccccaaccaactgggccccggattaactgggccccaccaactgggccccaagagacagtaatttttccaccattattgttagggctgcgatttatatgtaagaaaaatcgtaaaatatgtaaataaatatgtattaaaatatgccgaaatatgtacgaaatatttacaaaaaccttaaaatatgtactaaaatatgtaaaaaaaaattttttaatggttattttttggaaaaaaattcttcgtaaaaagtgaaataggcacaaaatgctataaaaatgaccaaaatgaatcactttttagtattttaaattaatttttgatagttaattttttgaaaaacattcgattttttagggatacattttcaaaaaattttttttaatttttcacaaaaaacctataaaaattctcaaaaatcctcaaaatatgtaaaaaaaaatgaaaatatgcacgaaaaattgcgaaatatgtacgaaaaagtccaaaatatgtataaaaatatgtacatatgtaatatgtagaaaaatcccaaaatatgtaaaaatatgtaaataaaagtcccaacttttgttcgcaaacacaaaaaagaaagtgtttttcctactaattagagcatggagaatccaggaaaaaaatatgtatttacatataaatcgcagccctaattattgtataatattatttatatatttttcattacatacacatatgtatgtgtgtttcgtttacaataatctaatttgtgtttatatttttttcgttcagtgcctaactacaataactttccttcagctattttttaaatttaactatcatttcatggcaaataatatattatcgcagaataaccacaaaaaaattgagcatgaaggtcatctttatgttttcgccaaacttagcgcggatggttttatcaaatttttgaggtgtgagaacaaaaacaataaggacatgaagtgccgagggcgtctgcacaccaatttgaatgacgtagtgttgaaacaagtcaatgagcatgtctgtggagcaaaccctgcgcgagtggaagcacagcgcgtcgttacaggttaggttatatcaaatgctgaagattttgaatgcatatttgacaattttaggaataaaatgtagagccattgaaaccgccgagccgccatctacacttcgctcaattgcactccaaaatgtgggaacccctgtgttgtctgaagtcccaacaaaaaatgcaacaaaacaagttgtgttaatttctctgcgctcattgtattgccttttttagctaatcaaaagggcccgcaatgaaggaattactcccgcaatgccgcttaatctaaaccagttacaaatcccacaacaatatcaaatttatgcacggaacgaaaacgaaactgaaaactttttgctagccgattctggtacatttttgttgaatgaaaatggacccccgcaacggtaggcaatgcgttttgttcgattcaccattactttttttgttaggattttgattttcgggcgcatgtctcataatagctgggccaatcaaatgacagaatgttacgctgacggaacattttcattaagcccaccactattttcacaagtttttgcagttcttgcccggtatgctttaattaaatttttgtattaaatgttcagtttttttataggcgcggcaagtgggtcttcccggttttttacgctcttttaacatcaaaaacttccgccatttaccaaagaatgttcagtatgatcaaagcagtttggccggccttttcacctcagtccatgtcgttggattttgaaattggtttgatgaatgctgtacgagaggaattccctaattgcaatttgcgatgttgtttttttcacctcgtcagaaatttcaaaaagaaaatggtcgaacaaaatgttattcaggtcccattcttccccccaaaaaaataaaacatatttttagcggtataatcacgactctaattttgctgaaatggcgcgctgcatcacatcattggcatttgttccgttgggtacactcactcaagcaattgtcgcgctcgaccactacatccccgccgaattagaccccgtttttgattggtccaaacaacgaaaatttaaaacaacaaatttgaaaaaaactacttttaacaacattcaaaaacaacacgactttatatttttctgcaggtttatgaccaactacacgggtagagtgcgcccgaacggaacccggacccaacccctctttgacccaggatgttggaatttgcacgaaagaactgttcacgagcaggacagaacaaacaattttgcagaagcggcacatcgacgattgcagcgcgccttttcgtgtcatcacccatcagtttggcggttcatcgacacaattcgccaagaacagaaaaaaattgacgcagattacgctcttttcgttgccggtcatgatccaccgccaaagtgcaagaaatatcgcgaggcagatgaaagaattttgagactgacacaaaattttaacccactaaacattatggaatttttgattggtgtttctcgaaattaccagatggatgcttagaattttatgaataaatttttgggatgttaaataaatttttgacagtatgaaatggaaaatgtgacaggcccttggggcccaatcggcggggcccaatcgtaccggggcccaatcggcggggcccaatcgacccccaccgaaacttttgatgtggataaaggactttttgagtaataggacttttcgtgttaaaattggggatgatttatcctccagtaaaaaagttggctctggtgtcccccagggctctgtccttggacctttattatttttgatttatattaacgatcttcctgatgctttgccatcaggagtaagaattaaattatatgctgatgatgttaaattgtatatttgttataaagaaagaaccgaaacagaaattatgcataaagcattgcataatttatcggaatgggcaaataaatggcagatcataatctcaattaaaaaaacttttgtactttacttggggaataaaaaccccaaagaaatatataaaattgatggaaatataataaatgttgtggatacaattagggatttaggcataaatattgataataaattgcaattttccaatcatgtcgcacaaataataaagaatgcatatttacgtatgcgttcttaatttcggattattaagtccaagtcttctaggatttggattattttgtacaaaacttatgttagaccgttattggaatatgctcctgaggtttggaatccatcgcttctaaaaaatatttaaaaaattgaaaagtgtcagaaatatttcaccaaaagagtattttttaagtgtaaccttccacccattccataccaacaaagattagaatacctgcaactgtcaacacttgaaagcaggcgaaagctttctgatctgttcatggctcataaaataatttatggccgaacagatatgatcccttttaatattcaaacttctgacgctttacattcccttt

SEQ ID NO: 4769 - DNA, 528 bp, Heterodera glycines
gaccaactacacgggtagagtgcgcccgaacggaacccggacccaacccctctttgacccaggatgttggaatttgcacgaaagaactgttcacgagcaggacagaacaaacaattttgcagaagcggcacatcgacgattgcagcgcgccttttcgtgtcatcacccatcagtttggcggttcatcgacacaattcgcccagaacagaaaaaaattgacgcagattacgctcttttcgttgccggtcatgatccaccgccaaagtgcaagaaatatcgtgaggcagatgaaagaattttgagactgacacaaaattttaacccactaaacattatggaatttttggtcggtgtttctcggaattatcagatggatgcttaaaattttagtgataaatttttgggtgataatattgacaataatggtggaaaaattactgtctcttggggcccagttggtggggcccagttaatccagggcccagttggctggggcccagttggcgaggcccagtcggcggagcccag

SEQ ID NO: 4770 - DNA, 2510 bp, Heterodera glycines
gagtggtagtgatagagtgcttccttttattgggattaacaaacccataatttgtaatttccatttatttcgcttccatgtaaccgagaaataaaaagaattcacttaactaatatataaacgacctaattacagagtcgctttttagctaattaactaaaatggcagcaacggacggaatggtcgaagatggcaaagtgggaaatgacctcgaatcagcaaagttcacaaaggtgagaaaagtcgtgttcgttgtcctaagattgtgaatgataccttaaaggacaaagaagtcgttgacattgtgcagccaacggccaaattgataggattgacgaaggagcagctcgagcagtaccgaaatgaccccttttggaaggcgattcggtaaaatgggctattaaattcgaaggatttgccggaatttgaagctttttcattttacgcgtcttatctttctttgctcagttactcacttttcgtcgccttttggctgatttggctggccatgttcgtgggcgctgttctgattgttgttttgagcccaaaatgtcagcaagtgaattggaccgaaaaaatggtcgcttacaaagtgagacaaacactttatactctctcaaataaaacatcaaacaaatttagattttcaccctcgcatacaaagactctgagtccaaaaatgggttcggagactttgaggttattgagaaaaagttggaccaaatgaagggaattggagtcaatgcaatttggccaactcccgtgctcaaatactataaaaatgcgcttggcccagaggcaatcgaaaagttggaagtgtcggaccaactcggcggggctgaggggttcaaaaaactgatcaagcgggcccatgacaatcaaataaaagtgatcgtcgatttgccattgacagtcaatgccaaaggaaattgggccaacaaaacttctgatacaaaaagtgggaggggccggtatcccatgctgactaaacactctttcaagatggtattgccctgatcgaccttgacagtgcagcaaaccgagaaggacttaaagaagcggcagtgcgctttttggactttggcgtcgatggactggcaatcaccgattacggcctttttgccaattccgtccacttgggttctcttgtcgatcttattcgaactataccaaaggcggaaaaaatgtacagtgattaaacatacaaaaattacttaatcattgttttagtcccatttatgcacgtggctctttgaaagggccaactgaattttatgagattttgtctttggttggcgatgtgccgtccgatggagtgaacggattgaagaaaatgctggagggaagcattaaaaacattgaggagaatgggggtaataagtcgcgaatttggcaattggggagcatggatccgagtggacaaagattggaccaactcctcggcaaagagtcaaaaaggtaaccgaaaatggaattggcattaaaacagttttcttcgtatagtaaatgacttctccgattgtcttttgttttcttagcaatgagcagaaacaacgcatttcttccctcttcacttccgtccatcttttcatgccaaaaccccgtcgtcgttctctacggcgaagagcttggcctgttaagtggaaaaccgacagccaacaaattggccaaccgaattgtctatccgtggagtaacgaaacattcggcaatcagtcgcaaggatttttcgttttcccccaacgtacaaaaaacggagacttcgaggtaatttatacggataattattgggaattattattatgtttcattagagccagaaaaatgacaaacattcgccgctggcgttgttcaaagaaatcgcaaagctacgcgaggtacaataaaatggtgtcttaacccctgtcttttaaattatagcattccaatttcttctctggcgttttgtcgcattcgtcctcctccgatggcctcgacttttacaaaataaaacgcagtcaagggggattttttgtgttggtcgtaaattggggcgagaagcaaaaagcactcgacaacaaaacattgccggatgaactgaagcaaacaaaactgggggcggccaaagttatcgtgtcgacggatgccgtgggcaaagatgggaacgtgaattttgagatgggtgaaattccgatcgaaatgaaaccatacggagcgatgcttatggacatggcctgaccggcggaagagcgaaaaagtcattcgacctttggattaatatccgtgcttttcattttcgtaatttttactttaaatacttttgtagtttctttggctacaagtaaaaacttgcaattgataaaaattttgttagttttattggtacaattctttttattacttttaacttttatgatttttgtcctttttaattaattttggaaatggctggcaatttctggaagagttcccatttgtgagttttccccacttgctacctttatttgtctgtacgtttctttgtttccattca

SEQ ID NO: 4771 - DNA, 5842 bp, Heterodera glycines
accaacgacgacgatgcccttcgagtcagccgcatcgaaatcccgaggttcagcggatcgaccgaggaatgggtcaccttttgggctgccttcgattttgccgtccactcacgccactaccccgccttccaaaagcacctcctcctcctacagtacctcgagaagggatcgccaccacgacggatgattgaaggttacccaccgtcagacgccaattacagcacagtcgtgagcattctacgagaccgctacggcgacgtcggcaaccgacgggaccaactcaatgcccagcttctccacctcaaacctgcccggaacaacctcaaggagttgcgccaactccagcaagagatcgaacggatctgcacccaactttgcagcctcgagcccgagggggagctctcgccaatcgccaacagctcgctggtcaccaatctcatcaaaagcaaacttccaccaccggtactgcttgacctgatccgaatggagcgcgagagctacacttcctggacggctcgaaattggcgtgagggatttgcgacagtcgtcaccgacaaagagcaggtggacttgtgcgtccgtaccttccaggacatggacattcaaccccgcgagcgtcctcccgaaagggctcccgcaccccctcgtccgggcggtcgttcttctcggccaataccaccaccagcgccggagcgacgttatttggagaacactcgggcctttcctgctctcgcccaacccgtctctgccaatggcatcagttgctccctttgtgagcaggagggacaccgtccgagtgcgtgccagcgatacaccaccgtcattcaacgccggcgacgacttgaggaacaggggcgctgcctgcgttgcctccgtcaagaccacgtcactcgcgattgctctcgtcaagatcgatgttcgaaatgtcaggccaacgaccatcacttcctcctctgcccgtcaatcgaccctccggggcgaaccaaccatcggcaagagaatcaagagcggaatggaaatgcgtcccgcaacgtcagtcgtgccacgggagccaacgccgaaccggtccgaccgagagcgactcccaccacaaccgcactgctcgtgtgcgacgaggccgaaagcattcccgaggcggtatgcgccgccgcctttgaccccctccccgtcgacagcggcagttttcccgtccccaaatcgacgagagtagctcatttgatgactcagacccttaaggcgtcatgccaagggggcccacccgacggaattcctgcttttgtcttccacgaccctggcagccagtccggctacataagccgggcaatgacagagaagctccgaccccctcgactctcagagcacctcctccgaattcacaccttcggagactcccgccctaagaccgtccgatcagcaaaattcgccattcaactgcagcgcctggacggaggctgggagaccctcgagctcaacgtaatcgacgagatcacgaccaaaatcaaggccctccagtgggacaccaccgatggacccctccccccaaatgccgtcctcaaggtcgtcgaaaaggcgccggacattctgattggtatccgagaattctgggaattcttcaccggctgttccatgctccgttccgggctccacctcgtccgaacggttttcggtccgatggtggggggagaagctgagtttcccgaggccccacggcacaccccgacaattgccgtgctgaccctcccaccccagtaacgtcgagtcattcccctcatcccgcactgtcaatgacttttggagtctcgaggcgatcggcatcacggacgacccgaatcagaacgacgaccatatcgccatgcagcaattcagcaacaccgtccgccaactaccgtctggccggtactctgttcgcctcacttggcgggaacctcgtcctccactcccctcgaactgggccatcgcttatcgccgacttctttcaacaaccaagcggctgcaatgcgcccctgagctcctcgaccgttattccgccgaattgacacggcagatggacgccgatatcatcgagctgaccgggcgagacgacgacgagcatttcctaccgcaccatgccgtcatcaatcccaagaaattgcgcatcgtcatcgatgccagcgcccacgccaaaggcactccaagtctcaacgattgcctccaccgcggacctgttcttcttcccgacctctgcgggatccttctccgctttcgatcggcatcaatgcctgttttggccgacgtccagggcgccttccatgccattgaagtcgagccggaggaccgacgcttttgcaaaatgctgtggttgaaaaaccctgcccgacccgtctcaggcgacaatctgttggtctatcgctacaagcggctcgttttcggcgcgacatgctcccccttcatcctcgccgccgttcttctccaccacttcgaaaggcacgaccacccattcgccaaggaattggccgcgaatatgtacgtcgacaacctcctcatcgagtgcgagacggaagaggaggccatcgacaagtcgtccatcgccaaacaaatcctcaaagacgccgacatgaacctccgggagttcctcagccactccccaaacgtcatgggacgaatccccgaggacgaccgactcgacaaaacgccggccaaagttctgggactgacctgggacacccccagcgattgcatcaccttcagtctcccaaaagacacagacaccactgctacacggcgttcagtcctgagcatcattgccagcacgttcgacccgcttggactcgtcgggccatgtcttctgcccgccaaacggctcttccaacggctatggggagaatgaaccgcctgggacgcccccctccccgatgccgagcggcaacttggagccaaaccctttccctttggcaacaccaaacacttgtcattccccggcactccattctcggcaagcacagtcgcctacaactccacgtcttttgcgacgcgtcggaacacacgtttgccgccgccgtctacatccgaagcgagactgccgatagctcccaagcgaacttgattttcgccaaaaatcgcctccggtcacgaactgcgaaccagcgcttcaccatccctcgactcgaactcctcgccgttcttgtcggaatccgcgccatgcgtttcgccgagaaagagttccggcgcccgatcgacgggcgacacttatggtctgactcccaaattgcgctctcatgggtgaagtccgacgaacccaaggcccaatttgaacagcgaagactcgtcgagatccgacaagggccgcccaccacttttcatttcatcagaaccgaccgaaatcccgccgacgtagccacgagaggctgcacaccggcggagctccgaactcgccacatttggtggaaagggcctgagtggctcacgagtccggaaacggaatggcccgacgagttaacgttcgcaacgccagcctactccccttccgccgatcccccgtttgaaaaatcggagaccaagaccccagtatatctagaggcaaccaccgatctgtcagccccgagcttcatcaatgtcttacgacgattcatcagtcgtcgcggccgaccaaagcgaattctgagtgacaacgccccgacattcgttcaaacgagcaaggctctcgacattctgaccggccctccgtccgaaaccgacgccgtcacctttgccgcgcgccgaggcattcagtgggacttcattcccgcctatagtccatggatgggggcttgctacgagcgactaatcggcctcgtcaaatcctgcatcaaaaggacgatcggtcgacgaattctcgactacgacgatttgagcgcattccttgccgaaattgaggccagcgtcaacagccgcccgatcacatgggtgtcagatcaaccggactcatcgaagcccctcactccgaaagaccttatccagcccggccttcccaacaacttggaaatcgtcgactctgatctcgactacgacgattgcctctccggtcccgcgcgtctcgcagcactttggaaagcttacgggaggccgccgaccatttctggctcaaatggagtcatgagtacctcctcgccatcagagagcgcgccggatggactcataaaggtccccgccttcgaactcccaccgccccccacatcggccaagtggtcatcgtcgaagaggacctccgcccccggaatttatggccgatgggcatcgtcgttgcactaaacggctcactccctaacgtgagaagcgtccagttgcgaatgccaaatgggcaaaccgtcacgcgaccaatcagccgtctttgccccctggagaccgaaaaccagaccccggaaccacccccggacgccaccgtgtctatccctgctgatcaaggcctcagagaccccaaaaacgccgaaatgtctgtacacgaaatgccgccggtcccttcactttcgggagaaccgatgatcagtaagcacagcggcatgcttacgcgacgaaaatcacggcttttcgcgattcctcccaccacgaccatgatcatggccatcctcgtcactttcctgggcgtccaagcctccccagcacaaggaatttggccattcgcctcagaccatcccgagccacccccaacatctcattgcatcggaaaccacgtcaattgcaccagaagaggcgtccgagtctcctccactcccgccgtccagaagatcacgatttgttgcgccaattcgtgctttgatcggttgggcgctgccaccattgaatatgagttgtccgctgaccttctcgtcaacaattacggctgttccgcaacgttcagcctctcatcgacccgcagttgcgccgccgaaaccgtctgctcagccatcgacgaatgcgagctgattgactgctccgtttgcattgaccaactcgccaattggcggtgcaacccccgcctctctgtcttccttttcctaatcatccggtcgctgatcagctgtctgatcgggtgggtagtctgtttctgctcatccgcccgagttgtgctcaatttcggctatcaaatcaccgcgttccttctctcctggcccctccgactagcattctccctcgccggtcgtccctggacacgggaagatcgagaacgtgttgcggaacgtctcgaagtcggaattcaacgggtccgacggcagacacggcaccacgggcggcgagctcagcgagcagctactcgactgatcggcatcctattggccactcccgtcatcttcggcaacgccgagaccatctcggtgaccactcggaccgaatcttgcctcaagagtcactctggactcacctgccgcgtcaacaccgccaccactctgactctgcttccggcaggccaacagagctcattaattctgcgcgacgacaccggcaacacaatcggcacggttcaaatgcaccttcaatccctcgacatggtgtgccaccagcaatcggaggcatggctccgttcctaccacatcgaagttctgtcagtgaagcggtgcccaagagccggatcatgccgcgacgaccaatgtagccttacccgtccacaaacaccggttcccgagctcaaaaccgtccatcgatttcccggcaactccttttgccaagattcgacgagcttttgggccaatgactgcggtctgcctgcttccgcctgtctctactaccgttacttcgctcggcccaccagcgcgcggaccttcgaattgatcagctgcccatcttggggggttcaactcagaaaacaaaggagattgagtcacccggcggacaaacccgacaaatcaagact

SEQ ID NO: 4772 - DNA, 2318 bp, Heterodera glycines
cgatcacgccactcgccatttctctccccccgctcccgactctcggatcgagattcgtgactgacggacggtccgctgcgatcgccagccacctgccagccgacctcttctgccctaacgaggaagctgccgtcgatctcaactgctctctgtccttaggagcctgccaggagtgcttccccgaccactcggcagggagcgtcgaatgtcactatcgagacctcgacctcgacgcattgcttgaaaacccggaagctcgactgcccatcacaactgcgagagttcggctccacaaccgcggccccaccatatttgcctcccacgcttactcccctgttcaactccacctcgtcctggccaacgtaactctaaaactccggctggctgactcactatgtcgtgtggaggaacctcggctgatcgggtgttacagttgttcgaccggtgcacaactcgactatgtctgtcactccgacatggacaacgcgctcgccactgtttcttgtaacgacgggcaattttttgtcgccaactgcgcgccgaatggcaccaggagtcgtcaagttttaccttacgaccatgccgacatctcaacacaatgccatgttaaatgccccgcgggcgaaacaaccttccggctaaacggcacactgaggtatatcactcaccagcaccgatttggccatcggcaaagaacatcggaaaatctcatcccggaacccgaacaattttcgttttgggccgacctcagcttcgacaaattctcccctctcctttatttcggcaaagcccccataattctcgccattgtcgtcgctctcctaattggtctcgtagcgctatttttattcgtcaaatattcgcctatgctcgccacttatagactcatcctccgattgtttgtcgggatttcaatgattaagtcggcaacttcactatcttcaaatttcaactcggtccacccctcccccccaaaattaatccaaacgttcaacgaatcgtcccacccgtcaacttcacatttttccgtttttcccattttcttttctttttgtgttgtgttgtgcaccatctggcgttttgacatctccctgcgccgcgccccctcttttcagcacaaacaaattcggcaaagtcttttgttcgccgtcattatcatcatcaccatcatcactttggccgttgctcggaaaatagcaccggagggggatcagcccttaggcggcaaacaaaagggagaagacgtcgcagcagtctgctgccatcaccccggggccaacggggcggacatcacacattttcgcataaatagccccctcccccccagagatgctcacctttttcatcgccattcacacttaacaagtgcgtccatttcgtcaaaaatgcccttccccttccacaccaaacccactgccatcgttcgtcccacaccacaaacccccactctcccccctccactagtgtctcggggtgaaccccttcaaaccgacggattcagcaatgtggggttcgactccccgggggaaccgaccggtggatttgggacccaccctccccgtcaacttccccaaattcgaccaccactcgggctccgaagtctgccgtctcaccgctcgccaacgccatcgcctcccggctctccgaccatccagacggaatgggcgcgagccgaccgcctgctcgacatccgtctaggctcgaggtggtggttgcatgccgagggtcgccgccgcgccgaaaatgttctccgagagtcatggctgactcacgccctcaacggccagcaaatcgcctggagccgtctcgatttccttccggccagcgtccgccgagttcaaccagaattgacggtcgccgaccattggcgaatccgacgaaacacccctctccgccgtccagacctcccggcactgctccaggaacggggagtgcgggggacgtgcctgccgcagcatcaaacgacgactccgtaacgggggtgtttacataattagaggaaaaggaacttcgtaagttcgttacaaaaacgaatattttggctgttttagtaatgagagattattatttgttgagaatttagaccaatttagttaaaagttattttacaaagaactaaaatatttttacattgaattttacacaaattataaaaattttttaaactttttaataaaatatacaacttaatattgtaacaaaaaaacttttgagctatttagtgataataattttctcgaaataaatagcgagaattgataatttcaactaattggaaatgcgtctaaaaccgtcattaaaaaaagagttttcttttt

SEQ ID NO: 4773 - DNA, 3007 bp, Heterodera glycines
ggagctaatattaaaaaataattaagaaatttgggggcgggcagttccgaaaaaggcccgccgaggaaaattttttttcagaattttaacggaatttgtttaaataagccaaatttttagcaattccttttttccccttttctaagcctccccccccccccctttatgtatgttaataatactacaaattaccaagaataagtcagattaaatcgaaatatgggtagccttttaataaaaatagaaaaaacggattcatttatctcatttaattaattttaaatatttaaattcaatttttttatttaaattaaaaaatgttcaataaacaaatttataagcataatttataaaaaaaactattgtcagattaataaatttaattttattaaaattcataaaaattggatggattattttattttaaaaaataattattttatttaaaaaaataattacttattaatggaatgtttaattatttttaagcttccctctccctcctttaccattatttcacattttaattatttatttattttttccgcttacgcatttcgccgcttccgcgcgattgccaccgcgtcgcgaattgtcgggtaaaagttgtgcttttgcacgtagcggaaaaagccgcacttttcgaacagatcgcgcacgggcgctaaattattttggcattttgtttcgacaatttgttttaaataacgcccaccttttgccgctgcaaaatacacaagaactctttgctcgcgcatttcggtgaaaatctgttgttattttttcggctattaatgacttttctaataattacactcattagaataattagggtccattagtgtaattgtaattgaacaaaataagtatttctttgagtgcatttacgcccatacagtcgacgaaggtgaagccggaacaatcgatgatgaaatggccgaagaaaatggacgacgccttctccgaaaacttaaaacatctttaaaataaaatattttagtctgatttagtccagctgactaattacgctgatcaatgccggatttcggtgccttttgaatagagcacggcgcgggaatcccgcgtgggattttgcttgaccctaatcagctatccctctcttggaaattgcgggattttttgggattaccggtaatgaagaatttgaagttccatcgcgcagggagcccgcaaattctaattcaaagaaatcagagagaagcgaaacagtggtgcagcagagaaaacatagaaaaggggaaaagggcaatatttcctcactttctcttccacatttttaaccccatcaaacaacttataacacttaatgaattttcatatataagtaaaaagcaatgcaacaaatgttcgcgagctcagtgagaatcgtttggtgtgagattcggtaaaaacccaactcgtactgtttttcgacaaaaaaatggtcataacttttgtcaaagtcgaccaaattaaacattcttggtaccattcaatagcccttaatgttctccatctatctgcaaaatacaagaaaattttattgcttttcaaaaaagttatggccaaaaattgtaaaaaaaaaattttcgtccataacttttttcaaactttatcaaattttttgaaacttggtggttagatagagaacattaagggctatcgaatggtaccaagaatatttaatttggtcgactttgacaaaagttatgaccatttatttgtcaaaaaacagtacgagttggggcagtacgagttgggtgtcgtccgattttgtcgtcccttctttaggtgaaatgttcgaggaattgcgaggcgaccccgagtcgagagtggacaccggtaattaattggccagagggggagggggggggtgtcaagactgccttctgatcaattcaatcactccctcccccgaaaggcactctgtcgctggtgattgcggtgggtgtcgcctgtctgctcacttctctgatcactggtcatccctttttttctctgccttcttttcccctttatctctcctttcccctctttctctgctgattaggctgtgtttgtgcctttcgctgctgtggcaatttgtctcccgccgaagagaaatcgctaagtgcgctaattgactcgggcaatggcattttggtgagttttgcgcctcaccccaaatattttctaaaatttaaaaattttttcgttccgtttttttagtcaaattcggcccttctttctgagcccatttctccccaaaatgttccacaatttcgccatcatcccaattttggctcccgacgatcgcccacccctcccgccgctcataatcaaccaactcatctcagttttattgcgttctctgacacaactgttgtttgatcaattcatttattatttttaaaaaatatatatttttttctatacatactaccattaaataaataaattattgtgttctctgtttaaataaatccttatccaagctaaaactcgatcgcatagaaattttgacggtgtttcagttctctacttcgactgtcccttatggctctaggaaaatccgacactggaaaatccgacaccggaaaatccgacactggaaaatccgacacaagcggaaaatccgacaccgcttgaaaatccgacactagcggaaaatccggcactggaaaatccgacaccaactttaaattttaaaaataatttttgatattttgagttaatatttaaatacatataataaagttacagtactgaagttatttaaaataaatatttttatggtcatattctatctaggtaggcatatgaatatttttcgtatgccattttttgatcatctcaaaaaatagttaaaaataatttctgtgatccctgtgaaacgtcaatgtaaataggcttaacaatttttaacatatgggtgaggtaattctccgattttgaatgctattccgtcctctgttctcgaataattagggtctaccccatcccttgagtttgttaatgtcttctgaag

SEQ ID NO: 4774 - DNA, 2833 bp, Heterodera glycines
  unsure (1)..(2833): unsure at all n locations
aagtgcgctaattgactcgggcaatggcattttggtgagttttgcgcctcaccccaaatattttctaaaatttaaaaattttttcgttccgttttttnagtcaaattcggcccttctttctgagcccatttctccncaaaatgttccacaatttcgccatcatcccaattttggctcccgacgatcgcccacccctcccgccgctcataatcaaccaactcatctcagttttattgcgttctctgacacaactgttgtttgatcaattcatttattatttttaaaaaatatatatttttttctatacatactaccattaaataaataaattattgtgttctctgtttaaataaatccttatccaagctaaaactcgatcgcatagaaattttgacggtgtttcagttctctacttcgactgtcccttatgaagggtatgcatatttttgtagatttccctctctttctttctctgcatacaaaaaatgcacaatggaaagagagaaaaagaattaaggaaatagtgtgtggaaaagaaattctctatcgttgtttttcggtgtaaaagtggacagggacagtgaagaagagaaaaaaaaatacgtaatacatagttacctattatttgtccttatttttcgcgaggctcacaattggaaaagtattcaatactgtatgttaacttttattttttatgataaagcatggaagactctgagcagaatattaccgaacaatcggtatcggctcccaccactgatcacgacgaatatgaagaactttgcaaattggtcaacccaatctcaaaaccgcttgcaaacagaaaattggcaaagaaagtctacaaattggtgaaaaaagcggcaaaagagaagggctttttgagacatggattggctgatgtgatgaaagccttccgaaagaatgaaaaaggaattatcgtcttggcaggttcttgaccatttacgctctattataaaatattttgaaaggaaacgtttcaccgattgacgtgtacagtcatattcctgccatttgtgaagaaaaggtcaattttctttttttcagtttaccgattaattttcaattctgtcctttcagggtcttccttatgttttcactccgtctcgtgaacaccttggtctttgtgctggttcgtcgtctatatattttttcctttatgttttatattttaaggctataaacgtcctgcaattgtccttttggtgaagcgacacgattcgttcgcggagcttttcgatcaaacgcacgagtcaacttatgcgctggtggtggaaccggaataagcttttaattccaaaattgttgtttgttcgttttgtttcactcaataaacaaattgtcttagcatttacatctttcactagttgatttatcattttcaatttgattcttttggcttgtatgtatttatctgtatgcattaaaggcgtttatttttgaatttttatgatggccaaactggtggttgaacaggcaattgatgcgagcgagaagtttttgatccggaatgtatcaatatctttttagaagaaatttggtgaaaaaaatatttaggttgtcactggaaaaagtgtcgaactttgcggctgctgttccaaaatgacgatgtcggtcttaatgaatggaactgagtcggttcctttgtctttggctgtggatttgcgccaggagaaggcgtttgatatcggcgtaggagtttcgaaaagccctgaccactcagaggaatttcttccggtggaggccgatgtgccaaatgtcgagaacaacgacttttcaagcaaaacaattttgtgtgagcaacataccggcggtgtaggcacaggttgcaaaaaggataacatgtttacaaagtggtctcataataaagaagtaaaaaaggggttatgcaattcttagacgcattggttttttgaacctctaacccggattcgaacatttttcgaaaattaaaattcgcgtttcttgcaaaaattgttaaggcattgttcgaattttacaataaaacacaagggattcagatatgaaaacggaaaaacacattggctgcattcaacaagcaatgttagtaaaaaaaaatgagaattttaaattttcaaaagagttcgaatctcagttcagggtacgaaattaaccgaaagaaggccagattcgcgctaagcgcatcggattaatttttgggaccgataatctttaccattgccttaaatagatgctgtcactgctgacaatgaacactttcactttggccaaaaccgtgaggaaacgattactttgaatgatgtgcatgagcaacagaaacagagcgatgaagtaattgacagtggttatcgtgatgaggaggcaaaacggcagtttggaatcacttcccggatcgaaatcccggtttcgcttcaaaaattcaacaaattaattgataaggtgcgagtttttaggaaagcaatgacgacgaattggacaatgaccagccccaaaaatcaacagcaaatgccaaaaagaaacgtggaacaaagcgaaggcacatgcccagtgttgctgcgacaaagtgcctcagcagtgatcgaccttttttgttatcattttttttgtgctttttaattgatgatgatattttttcggtactagtgtagcttgagtccgctttttaggtaaagttttttcaaaatttatttttctggtttaaaagtcttgaaaacaaatacccaggggttttcaaggtcgctgattacgaatatggcatccacttcgacctaatcgggatcccggaccagaatttgaacaaaaaggcgaacatttaaatttttgaaaattc

SEQ ID NO: 4775 - DNA, 2640 bp, Heterodera glycines
tccattttggactcttccgactttctcacctctcttttatcaccaaacacgcttaaagagaacatgaacagcaccaagatggacgaagccggcaaattggagactatcggtgaaagcattgaacggactgcgagttcgaccctcagctgtagcagcagaaccgagaagagagggaaatgatggaaggacaaaagaatgacggcgaaatacaatactattgattttatgtttttctgtataacagtgattagcgtaaattggcgcaataaattctctctctctctctctctcgctgcattttttctagactttgcgtttttatttaaccaattattaagaaaatgcaatcgaaattcaatttcaaatttaagttccaaaattagctcaaattgccaaattgaaagaccattactgatttttttttctaaaaccgtctattgtgttgttaagtaacatacctaataatttttacaacttttagcaattcaatggcggcttggcactttgagaaattgttacgtgatttttctttccaaatttcttcgccggaaaatgacaaaaaaatttctgttaataatcgaagcttaccacaacagaatgacactttccttcaaattgagcaatgcgttagggaaatgctgttggaaaaagaaagcagaagaggtgagctcggctcgactttttccatttgtgattttctgcccgaaattacgaaaaaattctttcaaattcgattatttttctgagaatgccctctcaattgggcctatttcccaaaaaagtctccaaattgtcagttggtttctttccattccaatttgttcttcgcttagatttgtttcattgttcccttcgtccggcacttggtcatttcgtcgctcttttgcttcattcttttggcaatgattccgacgttaatttacggtgagaaagtttcgtccgcaatttagtttgttggtttttggattttcaggttgagaagtggcgaatttctgtgtttgcttactcagttggattttgccgatgaatccgctgattttgttgcttttgttcttcccgggattttttcgggctgtcgtcaggtggcaatttcgaagagtttaaaagcaaaagttttacagattctcttaaatgttctgcccaatttgcattcaattgacctcgtaaggtgcgcttgtgaagtgagtggggaggggaggaaaagccatttcaaatggcaattaattaatgctaattgaaatgaccaattttcatatgattttacctttttgccttcattatcagctggtcaccaactccatttgcatttccttctcaaaaatcaatgtcaccgattgtttgagtgtttccgttggaaagtgcgtaaaatcgccgtcctctgaaaatgtcctcagctttcgtcgcgactccaattggctccaaacggcggcccagcgaattctcccccaggcaaaaatggcattgctttttcattttgttttctttttcagatttgttcacttttgtcacatctttccgcacattccgttgactccgttcgctatgagtcagccaatattttatcaaaaattcaacgacaaattccgtcgggtgtttgttgtttccatttgttacctctttgctatttatacactttttccagattactttggctcttcctttgtcaaaatgacaattgatgtctcccttttgctttacagtgacacaatgccaaagtttgcccttcgcgtaatttcccagcaaatgctctcttaaggacacgccatttggcacatcggataattgacgacatacggctccaacaaaaggaattattcgagtcgcattccctcgacaaactcaaaaaggcaatgaaatcgctcgaaagtgacgtcaaaaatgcatccgacggcggagtttacctccaaaatgttagtttttactacttttgcttataatttctcttttttttgaacagttcgtaaattgtgctcaactcgttggtccccatttgttgggtcgtctgtttaatttgccagaatttgttgacaaatttctttctccattaattcggctgatttctgttgatcacaacaaagaaatgatttgtgattctcttcatcacaaaacaaatggtttttaatttcaatctcctaatatttccatctttttagggctccaaaatttaccacccctaaaatatgggataaacgcaaaacatttgacacaattggccactctcatcgtcgaaactcacaattcagaggtaatcggagcattttgaagaattaaaaaaagagtatctttaaattattaattaatttccatgggttgccctccaataaatgcttttctttcccatttttttcagaaactcttcgattggtgcttcgacaatttccacttcgaccgttcggttgggcggcgtttgtcaattgcctatttttccttttttatgctgaattcacccggggaaagcaatcagtcggtgtgcccttttgtggacgatgttctccgaatgttggcctccatggagtgtctcctcgaagacgaagtgacggaccatcgaattgccaattcgccggttgtcaattcgacagagtcttccttagcacagttcgtgacttatgcttcttttgttcgatttggtatttattatat

SEQ ID NO: 4776 - DNA, 2592 bp, Heterodera glycines
ttttttaaatttcagcttcgggcagaaattacgggtctgttttttgttgcagttgtccttgtgtcatgtttcagattgcttttgcactgtctttccacttcccgttctcttccttttcatccgttttcctctcgagtttgcctttccatttcttttttcccaataaatctgtttcacagcttcacattgacgttgtttacgagcttctcaagtggtgttcgtcctctaacttttgtgtcaaaaatactgccgaatccgcactttctcttttcgctgaagttcaattttcaaaaactcggaatttgagttcatcgctttgttgtaaattttagttaaatggtcatccgaacgtttgtctgttactccaatgccatgccgaacaaattgtcttcaaactttccatggattctcgcgacttttccggttaatgtctcaagtttattcacaatttcataaatgctactcccttttcaagtttgtcctcgatttccgctcattttcgctgaattggtctcgcggtgtttttctctccaaattattctcccccaaattcgaagtgttgtcgccgaacttttgctttggctcgaccggagtgatcagaagcgaattatcattttggccaaagcacttcgcgcttatttaagcgcacttaacgaatggtttcctaatttgaagccattggttacgaatttgagcaaaacgaacgagaaatatgccaatttggaggagacggaaggggagaaagatggccatggagaggaagagggggcggagaaagtggacggacacaaaaagcaatgggaaggagacccaaattacccactggtgaaggacgtcgtgtccatcctgaacaggtggggtgcacaacgttaaaaataaattgtcaaacttagagaatttttggaaaaaatcagaattttccaataaatcaccgaaatttttgaaattttttaaaaaaattttttcgcaattttcttgaaaaaatcttctaagattttttttggaagttccttttacgtattgttaacaaaatgaaattccgtaagtcagaattccaatttaatgtgataatttcgtttttctttacgactaaattattttgtgtccccttttggtaataattttctatttttttcattgaacgtaattgaatttacaggacaaagcatttcattgcgtccgccaatctgccccttttgctaattgttcttgacgttctgcgcctctctttgctttttgtcagagattatgaagacgaactattgccaatgattcatcaaaattggatgggacttattcggctctttaaaattggcactgccggtcatctgttggattcacaaaaacttattatgatcaaggcgattgaggtcaattgaaaccttatagatagttcttgagattaattcccatttttaggttgtttcgtgcatttgcaaattgtcaaaagattttgtgtatcggaaaattgttcacgaatttgtcccttgcattgttgttttattgagggctcttctaaaggaatcacaaaatttgggcaaattgtacgcacagactgccacattcaaacttcaatgtgcaatattagatgggtacggtattttaattgaatcatttaaaaggatgcctcgcaaaataaaccaagaaaaggtttttagaataccggacattcttggcgctgcaaaagttgcgcctgaacacttccagcaattggaagaagtaatcgcggaatatgcaaagcaggaaagaaaactaaccaaacaattacgagacaaagcattgacaagcttaaatcacatcgaaaaactaaaaagatagctcccacatcatatttattttcataaaatttgaaaacaataaagaaagctctttagaaaaaaaaatttaacatttttgcagaccatttaatcgaaatgcaagagcgaccgactaaaaattccgaaaatggagaaatttaaaataaataaagacccattattaagtagcatgggaagatgaaagagcgagcgggagaagagaaaaggcaagaagaaatgaaatgtgaggaaaaggggtagtttcttagaaatcaaattgtcccccccccccccccccgctgatcattcattggtcggcactgttgtaaagcacaagcgaaaggcaaacggttgaggcgccaaagaaaaagaaagtgccggcggaagtattgtcgaagatgagaagggacaacagagtgactgcgacaatcgaaatggaagaagcgaagctgaaaacgaaaaatattgggggaggggaatgttgggacgaaagacgatagtgcaattagagaccttttatacaaattgtccaaatgtttcataatcagcgaaatgtaaatgccgcccagggaaaggaaaactgaaagtttggccgattaacagcgtcaacaataattaaatttctccgtgattataaattaacataatattattgtaaaacttacgaatgatagcaaaaaccaaaaagttatatccgtggaagagtccgttcctttttacgtgaatctaacaataagaaaagggaattgtggagggtaataaacaatttctcaacaaaaaaacttacataatcctt

SEQ ID NO: 4777 - DNA, 1866 bp, Heterodera glycines
ctaaattgggctaattaaaagaagaaagggcaagtgaatgtatgacttatagtggcatgggcgagtccgcaaatggcacttgctgaagcgggagagttgacatggttaacataaaaatacccataaaaaatcgctttttacctgcgatccaattccacgaatcgtcctcatcgcgaaatgtagccgaagtgcatgaagtaaggccaaaggtaaaggaataaaacgcgggcagaatcatcctactactaaatagccacccccggaacgattggatgacaaactccactgcttcaaagcgaccgacattggtggctgaaacaaaaaagacatacaactctttgattgaatatgacctggcggatcatatccacgaagtgctcctgcataagcaatccaagctaaaggtgtagacgcaaattaaaagcctaagggcgcgtcagtcaaaacaaaactcactgatcggcagcgaatatttggccagtgcaagtcccttttcgaaacagccctcattcattggtttatcccaaaaacgcggccaagccaatattttaggaaatagagggaacaccgtgccaattggacggtatttttggcgaatgatcgagtcgagcgaagggttgaccgcaatgcccgggtgctcgtcactgaggtcccatttttcagcgatttgtttgtattgcgaacagttctccctgatcttaagagaagagaccaaacttaggatgaaaacaaaataaagaaacctgcttctggaagtcttcaaactttccgggaattccccatttgaccattttactttggtggtagcgactgtccttcccttgcggcccgaccatcgaagttccatcaggcacttaaaaaaaacataatcgggtacttccttaatttaggttattttttcgaacaatttttgtactttacaccccaccgaacttttgtgaatgtagaaagaaaattcgaaaaaatttacccgaaaataaaggattaccggataatcatattgaaaaccaatttcattctttttgtcaataaaacaatacatacctttcgaatcaacataacgaatgtccctttcctcaaaaaaaggataaaaaccagttgtcaagccacgcttcaggtcaaggtctttgtatccaagagaagcccaccattcggttcgccctttgctagaaaatcaaaaaagtcaatgtttaatatagaaatttgaaaaaatgaaataaatttttatatatggcgaactttttgaggtggaccctaaattatctttgctttgattgtgaaaaaattttctaccgaaaaattaagaaaatttaattaacataattacttaactattctttccacgaaggaaaccatggcggtggatcaacaggcacttttggagccaacggaggagcataaggatctttgtaaatatgcatatcactcaacccactctaatctaaaataactgaaaagctataaatgattcgaaattgcttgagaaaacaaaaatgaaccaaaataactaaaactagagtagagcgggaccgggaccaaaacacggacaactgagtacaactgagtaccgaggtcccggttttgaccgggaccgggaccagtcccgggttttttcccgggtttcccagccaaaaattcccggtttttcaacccgaataggtcccggtcccggttaagcccaaaattcccggttccgctctactctaattaaaacctttaaaaatgtgtgtaattcgcattaggggcgctacttggaaagcggtcctttacttttttttggtcaaattttttaaaaattttttttatgtaaattgtttttttttattatatggtacgcatttcacgctatttaataattggttatga

SEQ ID NO: 4778 - DNA, 2584 bp, Heterodera glycines
gaacatggccaaaatgatgacaaacacccactctaaactttaatgtagttgtttattgtgtgcatttatggcctaaaatcacgaggaataacactttccatggagtgcccgtcaatgcacctctccatggtcttacaattccaacagaatttattaattaaatacaattgaaaaataaatcttttttccaatttgttgtttttggttttaaaactaaaatataaaaaatttttacaaaagaaaaaagaattagaaaaatagaattaaaagaaaactccatcataaaatcaaaaagctttttttgtatttatttgcttttccttattggctttcacctttcggtaccaatccgtgaacattttcgtatttgacatgcagagcctccgcttcctttaatttaccaaaaattaccaacttgggctctccttcattttccaaaaaatgataaaattatgcacgaaatgaaaattttgggtttggtgacccgtttttcctttttttttaccctccccttaattttttcataaattctttgtatttttcaagtgccaaaagggagtggtgcacaaattgatggcggaggcgacggacgacgaccacaagtcggacaaaaatcgtgtgccgtcggcgccacggtttggcacaacggtggaagcggaggaggaggacggcacggagccggaggatgagcaccacccgcaccatggccaacagaagccgtactttgcccgccgctcgttcaagccgatggtcatcggacggacggcgccaagtgccgtcaaatatgtgcagcagccgaacggacatcccaacggcgacggcactgtcattgtgcaaatggcaggggtttgtacaaatggatggaaaaatgtggcaaaattaggggcgtaacgatgcccgaaaaatggaaatttaattaaaacactaaattttggcgcctatcagtcgccattttaagcaattgtttttcataaatgactcaaaattcacccattttggcaaatattcaaatttacggttgcgatatacgccaaaaacgttgttttaaaagttttttttcaaaaatctaggtgttactgaaacaaaatttgctaaatttctagggaaaaaacgaaatcggtccatcccttcttaataatcgaccaggagcagcccttaaatataattttaccaaaaaaatacgtatattatttacgattgttttaacaattttagtctcacaaagtgcgacaccgacgcccagcgcagaaacagcacaaaatttacactttgcacggctttttgcacattgtgtacattccgttgctgaggcgaaaggctgttaaagtgagttttatgacaaaatttttttttatcaaatccatccatttttggcttttgcaaattttgatttttaatttttttaaattaaattttaaaaaatttgaaaatgctttttatataagaaaactttaaaaattgctggaaagatttaaaaaaaattactggccattccatccaattttaaaagtttttaaattttttcttcggttttttttattaattaccccctcccaaattgtgcccagtttgccatcctcgtcacgatggtggcactgtttgcgctcggcatttacggcctcagccgttcgaccatcggtctcgagctcagcgacgtgttgccggacaacacggcgccggccgccttcctgaaaacgcgcgacaaattcttctccttctacccaatggcggtagtcattcgcggggcaaacgtcgattttgcagcgcaacagcaccaaattgacctgctgaggcgggacattggtggggaaacggacggacggacggagggggggggggggggggggggccgaaatgaacttcataatctgcaaccatgaaaaaaccaaaatctgggggcaaaatttaaaaagggctttgcttattaaaaacaggttaccgtatctcaccgctaagggatggtattttttttttgcacgggaagaaagttgtagcgcgagatcagttggataacgcaaaaataattgggtcgataggcgcagaattcccattgtcccgaccacatttgcagtgagcccccccatttttttctatataatgataagcaaaatcgaaattttcatattcatccgaatggtctgaaaatcagtatccgggggtaatttggggtggggaacacgattctgacatttgtttggcccgtccaacacttagccatcgggggaggtgttgggcggggcctggagagtgaaaagttatatctcagcgcaaagcgcccggcgagagacggcaattttttttccaagccttacaggtcagcagacgtgcggggaaaaaaattttgactccctagcattgatggttcaaaagattgctgtctatggcgcaaagctggtccacaaaaagacagcaatctcggcgccaagtgtgcggatcgggtcaaaattttttttttaaatgctcccccacggcatggcacgcatatcgccgagcggcaccgagccgctatctgtgcggagccgggcgctgcgcaacacttagcgaaaacaggttagcatacctcaacgcaaagggatggcatttt

SEQ ID NO: 4779 - DNA, 2885 bp, Heterodera glycines
aataagaaatgaatttggcattttcaggattgtcaccttccccaggcaaactaccggacggcgagccgagtgagttttcttaataattacatataaaatgtttttttaattaaatttcattagataaacaaaaaatgcaattaaaaagaggatagcatttccgcccttaattcctctccccaaaatttaaaaacattttaaaaatccgattaaaaattgtacattttgccgtgccgttcaggtgaacgctattggctccagttgttccgcgattggctgcgcggtatgcaacagcggttggacgtggcgaagcgggacggactgttggacaattttgacggggatggcacaacgacggcgacaacaaattcaagcagtatatccgcagcagcaacgacaccaaaggcgaaacatcattcgcccgacctgcaaattgcctattcgttggcctgctcctacgggcagaactacgactgtgccagggtgagttttttttatttaaaaaaactaaaaactgaaaaaacacaaaataaaaaaaactctaaatcaaataatacaaataaaagtattaaaaaataaaaatgtaaagaaaaaaaatataaaatcttttttttaatttttttaaaatttatttttttatatttttagcttttttcttgcatttgcctacaaaatttttaaaaattcaaaaaatttcggccaaaaaaaatcgaaaaccacgtttttaatgaattttcatccatgcttttgaaaaaacaaaattttcatgtagagctatcgaatgatatcaaaattctgtttacttggattggttgaattttaagaaaaattatgtcggtttttcaatttttaccaaaatgaaaaatccctcaaatcaaacattttttgttaaggccggcacagtccgtctgattgatgagagcggcacaatcaacacggaaggcttctacaactatttgtatggatggcacgaatacgaacaaatggtatggggttgtccttctaaatttactgttttttctcgaattttttatgaaaatttgaaaaattaatcaaaaaatgtaaaaaatttcccttcctttcagttctatgccgtctctcaggccagcttctacccccgtcttcgcaagttgcgccaggggccgcctgggccgatgaaatatgtccgtttttgttgcatttccatttttaaaatttgattttggtttaggtccgtaatagaaaaagtttttccgggggttgggaagggaatccgaggagtttttcttaacccctcaaaaaaaggtacaattttttgttaaattaaacaccgtaaatgtaaaaaaaaaagcatttttagtagttttgttacaaaaaatgaatccttatggcatttaattacgaaaattagcgctcctactttaaaaattaaaaaaaatttccataaaattttttttaatttcccatttgaaaatttttattattagtcctcaattaattcattatttgatattttaaaatcaaatttatttcaaattatatgcatacatttttcaatgtatctctcccattttctcagcgctatttcattccgcccgcgccgaagccgttgttcagccgaattccgttttactgtgacgggttgcgcgacacgccgaccatcatgcgcatgatccgcgagatcagggcaatcagcgaaaattacagccgtgcgggcctgcccaactacccggaaggtgttttttttttggaaatttaggaaagttttcggggaaaatacaaatttattttttcaaggcgtcgctttcaccttttgggagcagtatttgcacttggactactacttggtgttggctattggcgtaagtttttctttctttttggtgaacaattattatacgaaaaataaaatattcaactaaaagttaaaggattttttcatagctttgcttgattatttcttaatttaaaaaaaaaatttttagaaattaaaaaaaattacattttcatcacaaatttaaaaaaagttaattcgctgaacacttaaaaattcctcattaaaatatataaaattgatgaatttatctaacaaattatacaaaaaaaagatttagatcatttccgtgtccgtcttctgcgttatctccaccatcattttcaacccgtgggccgccgctttggttggttaaaaaaaaatttttttttttgtcttgccgaggccccaaccccattctcctgtatacaatttgttaaattttttggtcattcaaattctccaaacatttctaaatgtgtttctgataaataaatcatattttgtttatttttgacatggtcggtaattgttcgctaattacttttccgcttttccgatcacttcttctgatcacatcatttcatgccaactttttaacttatttctgattatttctctcgtctctaatcactttccccattccaccatccgatcacatcactgacatcaaatcatacaatttcctttttctgatcgttcccgctcattcagagcacttcctaatcatttgtttctttgctttgctttttcctttttctgatcacttaccatttatccccaaacaacacaggtcacctgcgttgtggccagcatgaccgtggagttggccggcttcatgggccttgcgggcgtcaagctgaacccgatttcgtccgtcactctgatcaccgctgtcggcatcggtgtcgagttcactgcacatgttgcgctcgcatttctcacctcgttgggcacccgggaggagcggatggtccaatgcttgcagcacatgttcgtgccggtcatccatggcggcatgtccaccctgctggtcagtcagtcatccagtcagcaggctgaaagtggaaaatgccagaaaattgaaaatttc

SEQ ID NO: 4780 - DNA, 2085 bp, Heterodera glycines
  unsure (1)..(2085): unsure at all n locations
aaaaatcgctttttctttactgagctttaacttacctatttattcttttggatgttgtaatattttgttttttgctaatccaattattaccgtaatttatctcgtgtttttcctattaatcgtcatttcgttttgttcacattttgctttaaatgtaaattataatccatttgtcgctgttgagcttcattttattttgtgtgaccgagaataaaaaaatggaatgcaaaaataaattaccattatcaaaatgggttttgaggaaaataatgtcctgttttttatgtcataaaatatgtgaaacaaatttaatttaaattgaataaaaataattctaatttattattaggaaaatcgtgaaatagacacctaaaaaggcataaaaaatcgcaaaataggcttttaggattttttttttaattttattcaatcttaggggtgtattttctgaaaaaattttttgggccattcttaggggtggtttttcgtttttattgcatttttgttaaggaatttttcgaaaattctaaaataggcacagaaacccagaaacaggcaaaaatagataaaagtcatcgtagacaccccgaaccaagcgcaaaacgcgtttttcgtgctatcttttcgaatcaaatgtgcaaaattttaggcacttgcctaaaaaaagaatccctatttattatgtactttaataaatgtttttgagaaaaataatgcaaaaaatattttaaaaactaatgaaaacaattttgaatcagaaccccatactgtcaaatttaggtgcatttccatgaacaaaatttaggaccttttagcctctggtcaaatgatcgggaccgttttctgtatgacataaggcaaaattggaaatcacccgaacccggtctatctgctggagagtgagagagcgtaagagagagtgaaagacaacagattttttcaaaaatttttgtgttcatcgagttgattgatgtttgggccctgactttaagattttttagtttttaaaacccaaatggcagggccaaatccatccgccaagtgttaggaaaataaaaaatttaggacatataaattcgtatcttggccaattttcaatgaaattaataatttttggtatcattcaatagctttaagtgttcctatgagaatattaatttataaaatttttatatgaaattataaaaaagttatggtcataaattttcaataagttttgagtcaaaattattttaccaggacttttttaaaactagatgaaattttttgaaattttaaccataaatagagaatcataggacaatcgaataaaaatttatttggacttaattgcattttaatgacttgaaaattaatgtttataattatatttgcatgaccatggcaaaaaacatagcctgttcaatgctttataactttttttcagaagcaattagattaaattttctttttagaatttcaagtactctttattctatttattgtttaagacaaaaaattccgacataagatttttggaatttaataaccataactttttaatactattttaaaaaaaattgaaaattaatattctgatagataacacatagagccattgaatgatataccataaatactattttggttgaaattgaaccaagttgtgaatttatatattatacgttttttgtttttctaccccttggcggtttttaggaaacgccctagcacctttagaaacattgaaagaattttccaggtacattttcatgcgaagtaaaagtgactgggaattgtttttaaattttcttaattttttatttatataaatccaattcctttttattgaaataaccgtttcatctctcctccaacgggtcggggtcattttggcgcagacaagtttaaagattcataacttttttttaattcgaccaaataaaataatgttgatattaatcaataggtctaaatgttctttattagcctgcaaaatttcaaaaaattatattaggttttanaaaagatatggcgcgctgcgccaaaatggccagganatgcnatttttttgaggttntttggcataaacttttttggttctca

SEQ ID NO: 4781 - DNA, 2385 bp, Heterodera glycines
cccttcacatgtttcttcactttcttttcgaacttcatgaactctgtcttattttctgtagacaggacaccagtggtttttcgggctttcgccgccgccatcactttatagcgaaggccaccaaccttgccaatttgtttgttttttttgatcaccgctgatacggctatgtttttcttcacaaaaagcccactggccaaagcatacagcgcgattaaaatcgctgccgacccagattcgccgtacatctttccatcgtcttctgggcccactggtggggctaacacctcgattttcgtggtctcgaaaaaaggtcctccatttgcttggcgaaagatgctttttgcaacttcgtacgctgtttgccatgatcgctttaaaagagtttctgatgatggtcatatttagcaaccgaaaattcaaatcctagacactcatcagcaaaaaatatatacgaattcagaaaattttagaacatttcagtccgaaattcctgcttattaattttaaaggttcaagaaattagatttttactaatcacattgccattcaccgaatgagcggacgggccaacgagtctttttagtgtgaccatttattgtgagtgtcaaatgaaaatcaaccttttttattaacaatatgtatacatatgtggaattaaatactattattctcaatttcgcagttccgaattggtttggccaaaatgaatgtcgtgataagcgacccaaaaccccagaaataagttttcatgtcacctgaacacaaaaaataaataaattcaattaattgatctgagctcagcaggtcccccctaatcgggtattttttcacactagaaaaatcgaatgaaaaatttttattttattttcctccgggtcaccaattctccagtgttaccaaactacgcataccactcgatttctgacgtagaagcacggcaacccaattgcttcggctttccatcgcttctcggaatttgcaaccatttggccaatgcttggccaacagttgcatttggcccatcatcagcaatagacgcgggcaacaaattatctgatcggattgaaatcaattggttgagactgtagagaattgttggcgaaatgtggcgacgcaaattgtcaagagcatggccataagtaaaataaaaatggcgaatgtttggcgcgaaaatgggccaaattccactggcaaaagcattccaaattggctggaaattcgacttctacatacattcaatagctcgttcgaaagctctttttaggctctacaacatctgtgtatgagttttacgcccgactaattttcttaaaatgttggaaaaaaatcaagtagtccatgaaaaatcatagataaaaatcaatgattttcaaaatctgagttcagattcgtgatcagcgcacttttttagccccagaaaaattgcttttcaaaatttccccccgtccgttaaattttatgaaattcatttacagccaaatgagcaaaatatttttgtatggaaatttatttttgcccaatttttactcaataacaattttatccaaacaatgaaaccaattagcaatcattctcaaaacgccttaacattgttggcataatgtgccaccattccttctctttgtacaacacggattcgttggaattcttttgttgtcgctttgcaatattatgtccagcaaattggcgtccatcgccgcctttgctttgtgataaagccggccgattcgaagcaattgccaaataaccaaaataccgtttatccgttgtcgctcggctgaatccaacaccaccaatccaatgacaccaatttgatttgccttcgagcaattaaggcatttctgatgggggcgagcgtctccggagatgaagctgaaaaagcaatgttccttcttaaaatttaaattatcaataatgagattacgaaatattgttgctattagcaaaactatttaaatattttttggtaatagttaagatgatagccccccattttttggcggaaattttcaaaatttaaaattcgttcaaaacaagtttctaggtgttttcgaggtcgctgatcacgattctgacatccattccgcccaatttcgaaccccgaacccgaattcgaacattttttaaatttctaattttcaataaaaatttttttttgactttttcgcccaatttcctttgtcacattaaatggctgcgttactttccagagtttgtgtggcgtcagcgttttggtaaacgcgagaatgtgtttttcaatttttggtcgcatgtatctgagttttacccatgccaataaaatgttgctgacgtaaaaaactcaaaaaaattttttattgaaaattagaaatttaaaaaatgttcgaattcgggttcggggtt

SEQ ID NO: 4782 - DNA, 5432 bp, Heterodera glycines
taatggtttttaaccatattttggtcacttacagcagatgcctgacccaattcatttcatacaaaaagcccaaataaataatttaccaaaattttttgccaaatttactctgaattttgattgattggtaaataaaatttcttcctaattattgaataaataattaattattcgcattttatttatgtttcataaataaataaattaattaattattagtccaaattaatgcgacgatcaattctttttccatctttcatttcttggttaagctccgttttgttccaatctcagcagttattgcaggggcagcagcacatgaaaatctgacaaaaatttaataaaatttaatttaaaaataaattctgaatattactaatacacactcattatgaggatttatccacattttttgacaaaaatcggtgctttactgtaatctgtgcggagattcacaaaaaaaaattaattaagaattgtcttggggtttttagggtcgggaaaaccttctggtatctaatttgtcccaattcgaaccccgaaccagattcaaaccaaaagtagtaaattcaaatttttcagatttcgaatttttgttcaagtccggttggctgtacttttgttgacaaatgaattttctacttttttcgagttttgttcgaaactgggttcggggggtatatgaggaggaggggggggggctttaatagagcaaatacgatacggttttttacaattgccggccagcgacagcgccatgaacaacggcatgggcaaaagcaacaactgctggcccacacgcacaccaccaatggcacccgacttggcagtcggcttcccggtcggaggcgctggtgttttagcaggatcaaaaaaggcactgcacttccaactgttgtcgaacagagccatcagcaaaaacaccacaattaaagggcacacaaaacggggaaacattttaagtataactaaattaggtatagtttgattatttatttgtacacggacgggggtggctgtatttgaaaaaaatgtattaggtactttatttttaaaaaaatgccaacaaatgggggagcaaaatgtgcgggagcggtgccaaaaaagtgtggacacagcaaagactgacacggtggaaaggtggcattgtaaataacgaactcataacaaagttaaaagcctactggtccgttagtgggcaacccttgaaaatttagccccgaggctttaatttttcaacccccccccccccccctcaatagggggctgctatatatcaggggggagcttgtcattcacagcaagtaggggggaggcttttgttttccaccccctcccctcaataggggacttatatttgaaaggagggagacttctataattattttcgtaaaaataattttcgctaatggccaacccccaactcatttgcttcacccatcccaataaaatgagaatgaatgaacagattggtagctaaagccaaacaaacgatggtggtggtggtggaatttgtgaagctaacaaatggttacgtggcacaaaaaaaagcaaaaaaaaaaacagatagcaaaagcaaattggttttgatgatttggccaagtccacgacggaccatcaccaacaaatgaaccaatcgccaaaaggaaaatggaaaatctgtgctggtaatcagccgatccaatccatccaccgattgtcatcattttgagttgagcccaacaaattatgcacatatgtaatgaagttggtaatataatcaaaatgaaaagccaaataaataaataaataaaaatatacgaaaatattgggatggacttaaatggacagccttaaaaatcctcaaaaaaccctcattcggcagagataaataaactctcttcagatggatggatggatatgtgtgtaaatttgtattcggaccccccggcttaataattaaagccgccgtgggctctattagaggctaataacgataattatattgaaaataggtatgcacattaatttgtgttcaaaatgaatttcttcgaattcaattatatttttcttgaatcattttttcaaatttccataaacagaagaatatttgtcgttaatcaattaaattaatttctcaaacccatttatggggaataaaatttataaagtttccattcgagcatttaaattaataatcaaaaaggtcgttaattaattaattaattattgattaatagattgatgattatgaaatttattaaaattaataaattgtattttttgtcattttcaaagcatatactttttatatttacaaaaaagcaataaaaaataagaattattccaaatttttacaagatcaaggaaaatttcattgtcattaccagccttaagaataatttttaattaattgttctcaaattataaaataatttggtactttcctgttttgaaggcaaaccttggactcgtatttatgtgagtttctttggctcgaggattgtaagcaaccaacgtctatgaatttgacgaaattttggcaaaaattgttgcttttcatatgcctccaaaataagtcaatgttatctatccaattttttctaataatttcgacaaattttttgagcaaattcgtcttgaaactattggttcatttgaaaaagtacataaaatttccagtaatactcaaaactggaaattttaaaatttcagcactcgaaacacaaaaaagccgaatcttttaaaaaaaatttcttaatacttaaaaacccgaccaaaaaaaaaaattaaatttaaaaacaattacttttacagttaattgagaagctctaatttttttgttgatgagaagaatttgagaggaccaaactcaaaaaaaaggacaaattttcttttattttcaaaattaaaatcaatttaaaatctgcaaattcatggtcaacagaagaaaaatgttaatgagcagtgagtataacctgttgtagttgaacgagttcaatttagtcatcaaatttaggcaataattaattgaattttataaattttccataattagcataaacaattatgaacaaaatttagttttatttaattattaatatgaattaattaatttttttgtaaatggttttgagaaattaatttaataattaatcacaatttttgaggtgataattgacaaatattcttctgttagaaatttggaatatccaattaaaatcacaatcctaattttaagtgcatttgtttaaatagcaaaaaatatataaagtaaaatcactaaataaaaaaacaatattaaattttatacattaattttataattaattaatgaattatcgatcaattttacggcttaagacaccggatggatataaatgcaatccgttgtcaaaactaatctttgtatattcatttaaaaataacaaaataatttttctttttttcaatttttttttaaaattccaatgcatttattttattagtaaaaaaaattcaccgtttcttgctaacttttcaatgacttaaaatgaaaaaatttatttgttttgataccagcaaagattgatttttcgaagcaaaatttcctattttaaatttaatgaataattgaaatggttatatgcgcgttcgaattttgttcgaatgacagcaaattttgtgtaggattaatcggtccgatacagtcggaaattggttttgaatctaaaatctaaaaaaacccaaatttgggggctttttttctttgttgtcggattcggctggatccaccaatgttttttcaaaaattgaaatttataatttctgcatgattgaaatggtaatgagttagaattttgtttttgaatgactgactgtctaattaaaaaaaattggtcgaacttagcaaataaaaatttatttaaattattttcaacaaattctcgattctcgagctgacaaatttctcgagttttcaactacaaaaaaaaatattgaaattttaaaattttatcgtaacaaaacccaacaaatggatcaacaaagcactatgggtacgcgccagtgtcagacaaaattgctcataacgccaaatagcgcatttggcgtaaatttttgcgcgttaattcaaaagatatactgatcactgccttttttgaagaccaattaacattaataaactttattcaattgactaaactctttatttaataatactatagaaagcggaaaagatgtgttcaacataatattcagatagtggaaatgtgaaatggtgaaaatgtttggaaaaatgaaatttgatcaaaagtttgggtatttgtttccattttcttgactgttttcgacacctcgatagtgaagggcattcagcagtgtcacgtgtttcaccaacttctcaacaaccttctctggagtgccgagatgagcataacgaccgacctggatttataattttaatgggaaaaattattcattaaaccaaattgttgcacattctgtgcatatgctccattccctgttcactgatcagtccccaccagagatgagtgcgtgcaaatggaacgacgtgagcagcgagaagatgaagctttggccggactgggtaacgagcggcgtcaattgttcggagttgctgcctcggtgtccaccatctccaccgacggcacgtccatttcctgcggtgtcatcggtgatggagttgatgttggtcgtccgtcgttgtcccgcgccggtgcctctgtcgacggcccttcttcagatggttgtggcatttcggcatcggtgtcgggctggggagcggctaaaaattggaaaatttgggaatttatgaacaaaaatggaaaaactcacttctcttggccaaataggcttgtctcgccttggccgtctgcgcttttctctcctcccatttattccaacgtttttgggccccttttttgctttgtagtttctttattactagggctgggaattatatggaaatccatatttttttcctggactgtggaaggcctgaaacgcacgaaaaacatgtttttagcttggtttgaagcttctaggatggatttctatatccatattttccatatttttccatatttcgcgatttatgtccatatttccatatttttccatattttggcattttggtccatattttatgtccatattttggcatttttcaaaaaaacctctattagaacggcccccatcagctaaattagcctttttgagcccaaaaaccgaaaatttttcaaaaaatcattttttcgccaaaatttctcgagaatattgaataaatttaaattttcttaaaaattaataaatttatgtcaaaaataagcaaaaaagcgaaaatttcgcttttgtggttgattttgcgctaaaaaaaattaataaattttatctttcatgttttttttttctaaaatgattgcacagaattgccgaaaaaattcgagaccaat

SEQ ID NO: 4783 - DNA, 2839 bp, Heterodera glycines
tccaaagttgctcaagtcgccgccacacggaaatgcagtgcctcatctcctgaaaaatcacaccttttaaaattgacccccaaaaaaatgatatgtcccaccctgctcatccaaaaggcccaaaaatccgtgttgcgcgcaaacggaacaaagtggtgaagcagcaaatgggcttttgtcttttttgaaagaagcgttcgcaccattggttgttcgtcgagaaatgccttgaactggtaaactgccgtctccagtccatccaaatcacctggagacaatggctgggccttaaatttaaaaaaattatttccacaaaaatgaaaaccaattactttggtgaaaatttggattttccccaaatgtgccattgttttgcaaattgttttggcccattccgtttcgaaaagggcctccatttgatcggcatggacgaggattttgcggatgctgttccccgtcaagtcgcgctcgcggaacgcgagcgatcacgatagatgacgcccacaattgcgtcgacgatgtcgcgcctggcgctgcgctggagttcatccacccttttcttcggtcttcctctgtttggaggcgctaaaattgaatgaaatgggttttttgaaatttaaatgaaaaatgaaggttttttaaaattaaaatgtgagattttcactcacttttgctgctcgttggtggtgccatcggtggtacaatgtgctcgtccagctgccgacgcagatcactgatcgacgcagatcactgatcagcgcttctcgattgcgcacctgctcgcgcagaaatttgatggtgtcgtcccggtccttgagctgcttctccagttgttcgatgcgctctgatcgctcgtcaatggccagcggtggcggggtcgtctctccggtgtccattggcgcagttggtgttgtcgaaagcgttgtctccaaatcgcccatcttttctgcacagatgtcttcatgtcagcgaaaagccaaagtccaaaatttcctcgtccatctccggcgttggccctggtcctggagttggtggcggcggttccatcgctttttcggcggatgcagcagatgttgacggccctgcttcgtcctgcggtgccatttcggcattgggattcggttgtgtagcggctggaatacaaaaaattgattttttgagataaaattgatgaaaaaactcacttttctaggcccatcggccttgtctcgccatctccgtctgcgcttttctctcctcccatttattccaacgtttttgggccccttttttgctttgtagtttctttattacacttctcttagccataaaatctaatttaaaaatgaaatttttattagaaaatttacaacttttgagcttgaccatagacaaaattaaattcactatagaaagatgcagaattcttttctctatcgatttgcaaaatttggtgtggatttaacatacagaaaagaagctaaacagaacgaagtaaatgttgttttttacataattaaaatgaagagatagtacgccaaagagagagaaattacaaagaaaaagagaaacgacgagatagtactaggcttttctctgcacagtgggcgtacccatagtgacaaagcaatgcgatcagatttcactatctattttcttctgctgatgcctttactggaaaatgcgtcagagaaacaaaatttttgggaaattcattcattgattaattttttaaaaaatttgggattactttaaaaaaagaattgtgtttagaaagtttaaacatttttttgaaaattactaaaaattcgtaaaaaaaatacagtatggttttggtggtcgtcaattgataccgtaattttgacaaaaaaaactctgtatcattacgcatttcccactgacgcattttccgagtcagtcagtggcttttgtccatgtgtcattcggacggcaccatttgccatacggatatggtgaaaggatgacatagagacaaaagaaagagacaggaagagaaaaagagacaaagaggagagaaacgagactttgatgaaaaacgaatttattaattgaactctatcaaaatttattttaaagcgctcgtatcatataattaggtctctgtttttagggttttttaaattcttttttttttggcaatttttattatcaaaatgcaataaaagataaaatgaaaaatcattttaagctgaagagatggccttttttaacagttttttttgttgtaaaatattaattgattttttttaattaaatttcaaaaaaatctttgatgaaattcaaatttggcttttttaaatatttatttcctttgaaaattaatcggacaaagagtttatgcggtacaatcaatgatcacctgatttttcggccatattttttttgttatttgtttaatccatatattcttggtatcaaacgaaagcttaaagtgtatggaattaacaagaaaaggacaatctgtagacttaacgctttcaatttgaaccaagaatgtaagttttgtccaaataagaaaaaagcggaaccgctcagttgggcgcgcacggttgggcgctcacggttgggcgccagcatgtttttccacgatagcttttttctttggcacccaaatccaaaaatcttggtatcattcgaaagctcttaacatgctctattagccttaccaaaagcaaaaggattttcaagcctggaaaaattttattaagaaaaaacttcaaaaatttcgactttttgcaattttcataatataactcttttggtaattgtctaatggctaagcaatagcttagaaaaagcttaaagacagattaagctttcgaatgataccaagtttatt

SEQ ID NO: 4784 - DNA, 2575 bp, Heterodera glycines
  unsure (1)..(2575): unsure at all n locations
ttataaccgaggcgctctgtcataattaagttttcaagaaactcccgaaaaaaatattttttcgacactctcgaaaccaaattggtgctgtcaaagcaattagcgaacaaattaggccaattagtaatggacccagtcaataaaatttttttaaaaaacactcactccgtcttggagcaaggcttttccaccggcgccgcttcttccgccgttgcgtttgtttctttggcctccggcgccgtttcatcggcgctcgccaatttgatcagttgcaccgtttcattcattgtttctgtgacggcggctgcttccgcgcatgggatttgcagcttctccttggtgcccacagtttcaattgcgcacatttctttggaaggcggcgccgcttcttcagcgtcactgtaacacaaatttgaagtgatcagcccgactgatcggaaacccaaaaatgattccctttgatcatatatgcgtttataccaatgcaaattgattagattgaagtgatcagcccgatgatcggacccaaaaaattgctttttgccttttaccaatgcaaaactgattaaaattctttctgatcaggattagacttaaatttctttgaaatatgattgtgattggttaccagattttcagcaaaattttttgaaaaattagagaaaaaaagtgtcattctcttagttattgagcccatcattaggaagttaatttttcccgaaacttcgagtaatttatccaaagctcgaagtttgaagctcaaaaaaactcgggagtttcccaagccgaagccgaggtttcgtcaagccaatgaaatcaaaaaaactttaaaattaaaaatttaaaaaatttccatggctcttacctcggctcctccccgctgccctccgcttcgtcgaatgtcaccccctttttgccggccgctgcctcaggacaatttgtgccctgagcgtcctcccgcgccgtcacattgtccgcgcagcagccaaactcggccacggacgaacagttggagcagccctcgaggtaagggccggaggcgaacgactcgccgtccggacagcagccgaactcactgtcggtacaatctgtgaagtgtggcaaggcaatgtcaaacaagaacgtttcttttctttttggtccaaagtgataggacgacggacgaatcccaaatgcttaatgaactccgtactatctaattaaccctgggtgattgattataccatgagcctaattaatcctgcctaatataattaactctgaaaaattggatttattattctatgacacatggattaaccataaaatataattaactcaaggtgattggataaattattattgtttggtgaccacaatctaaataattaattaaccccatacgatgtaattaactctggacgattgattagtgcgtgggtccaaatgaacgctgtcgtaattaactctgggctatcagctaattaacccatacaaatcatattaactcagggtgataggattatctccataagcctaaaatgattaaattattactatattcaaatccatttccccactttggcatttgtccatgccgcactcctgctgctccgccggcttttccttctcatcgcaccattccggcaccggctttttatcgtagttcaggcagactactgtacgcgtctgtgtgccaccgtcgcatttggccgtacagttgctccacgggccggtgaaaaatgtgccggtgcatttctcctcgttgacgcactcctcccgtgccaccggcttttcctccaggctttggccacacagcgcttcatccacacgcttggtttggcccagctcgttgatggcacagaacacctgtgaaggaagccaaatgcggggggcgtttggtaccataatcgtttcgaaaatggattttaccaaagttactgtatcgcttacaacagtgtccctgcaccccgccctccctaaatttgtgctgccttccaaaaaaaatgttgtaattttttgatggtttttgagtaacgatcccggcaccgtcccaatcccttaatgttgtgccaccccccccccccccaacgaaaaaactaaaaacattgaaaaatttttatagtcaagggaatctcaaaaaacactgcccgagatagaaaaattcccagcactcgagaaccaaaccacaattttaaaacaaggtaccttctttttcacagtaaatttatttcgaaatagcaaaataaattttcgaatgttttcaattagccatgtctgtggttggacctttcgttgtttgtgcccatgtccacattccgtgctgcactttgaccattgcgatgtgtgccattcataaacgcaaggctaaacagaatgccaacaataaaacaaaaaaattttcaaatttgaatacttttgtttgaaaatgcttttaagaactgatcagaattattttttaattggtcagaattgngaaaatttgtgactgaccgcttggcttgcgcatggcctcgtgtcctccgnaattttggtgacttncttnccatccnagcacttctccagcggatactctcttccatttttgtctacacag

SEQ ID NO: 4785 - DNA, 4197 bp, Heterodera glycines
cactaccctaggtctgatcagtttcttgccatatatatctctgactctgatctgatcattcgtctactgttgatcagaagcctttcaattttcttttataaattatctctaatcatgtattctgatcggcatatccgctactaattacagtacgcgatctcccacgacagtaccctctgatgccgctacaccaccgacctgcttggcgtcgccgcactgggaagagcaggcggaccacgggcccgcctgccattccgggcatgaccagcgcgcacacggctgcgacatctccggccggggcagcccgcgctcctccgtgcagttggcgtccgacacggtcatccgtcgcccgtccgcgaacacgcggtggcagtacagcacgcggaactgcacgccccgatcaccgcaggtggtcgagcagggctcccacgcgccgacaaaccacctgaaaattgtgggaatgatcagaagcaggcagcaatgatcagcacagcacggcagctgtgtgttggcagggatcaagtaaactattgatttggatcagtctattgtgccgttgatcaatatttgataaagatagatttggcatgggcgtgagcgatgccggtgatcacggatcgactcagttccgtgcgcacgtttccgtgccaaggagttttaaaaaaccataacttttttctcagttgaccaaattctataaatctggtatatttaaaagtgcctttacaaactcattattaattcacaaaaaatcatatgattttccaaaatataaaaaagcacggaaacgggcgcacggaacggagactaaccgcggcgatcagtattgattttgtcaacaaaatgatcagttagtataggataatgttttattgatattttgcagcactaattacttactgctgatccgaaaatagcaccaaagtttgatcaaagagagaaagagagagattaatgggataataaaatccagcgacctgttaatattttcctcatcatcaaatgatcacgaaatttgatccagctgattgtagtttctgccctaccgtaccctttacagtaaatccgttacaaccacttactctggctggcaatccaccgtagtgcacttcttctcgaattccggcttcgtcgcattgttttcatcgcacaatgagtcgtccaggcgcagttgggtggccgtctcggtacagtacagtgcgcgagtgtgaacaccttttcatggtacagcattactgtatgccaaccatttcacaacaactcccattgcctcccgtttcccctcccttttttcttggcacccattgcctctgtcttttttcttggcacccattgcctctgtcttttttcttggcacccattgcctctgtcttttttcttagcacccattgcctctgtcttttttcttggcacccattgcctctgtcttttttcttggcacccattgcctctgtcttttttcttggcacccattgcctctgtcttttttcttggcacccattgcctctgtcttttttcttggcaccaattttcccctttttcgtggcaccccattttttgtctaactgttttggcactcgactgtttaggtttccatggtaacttgtctgtaaccctcccattcttggtaggtatcattttgccctgttgtattcgtcttggtacccatttgtctgattggtcgaaatctttggcactttttgtgcctttgtccgtgtgccatttctatcccatttttttacctctcccgcatgtcactgaacattgtgaccattcgcccggcttgtacaaatacttcacgtccttctccaacggcaccgaatattcatatttgaccgcactttgtttggcgccggtccgttggagcagcagcgaaacggtgacagattcctgataaaaaagcaagaaaaattactgtaccaaacggtactgtatttggcttactatccttaaattaaaaaattatcaagcgtgaatttttttattttataattcaaagattactgtgcatagtaagtaaaaaaacaactaaaattcaatgaaatatttacagtatttttttcaatttgataccatgaatactggcatactgtattttccaatgctgtaaaatttgtataataaattggtattttgtgccactcccccaagacatagcttcctctcatttcgaggaaggttgaaaaatgggtcccgtcggggactgtattttagaaagacggtattgttttgataactgtacttgtaatggaccgttagctgttagccgctcagtaccaccgttgcccttctcatatttgaatgggacaccaccagccaaaatgttcttgtccaacacttggatttggaagttgccgttcaggtagaagaagccggtggcatttttgatggctgaaatgggcatttcattgcatagaatgccacggtaggttataatttagcaatggtaaaaatttaaatttttgaaatttttgaaatattattttgacttttttaaaattttaatcgcccataattcttcttaaaatgattgaagcagttcaaattttaactggttagtaaaaagacaaggaaaagctaatcctaaaattgttttcatttgtttcctttagtaattaattaaaattaatggattttcgacttttttaaatattcttttttgcctctttttgagctaaaattttcaaattaacaaagagaatcctacgaatggcacaaaagtaccaaaataattatgcaaaaaatgtcaatttggcattttgagtaaaaaaaaaaagaacaaaaatggcacaaaatgccatttgcggacacatagagaaaaaatggcataaaaggtgacatttcggtggctttgggatgccgaaaacttttaccgaacacattgctggacgggcgcaactcttcgatgtgaattgcggtggcgccgacgggcaacgcgatgatgtcatgatatccggaagacagcgcgcgttcgtcgaacagtccctccaccgttttgcactgggagccgtcgccttggcaaacgccgcatttgtcacgctttgcttctgtagtacaaaaataaagcggtatacggcaaacatacatcagtgtgatgagtctcagtgatcagtaactaccgagcgagaattgatgaaaacccaattttgttgtattaatcggtatgatcattatttgggatttcgctgaacagtgatcaaaaaagacttttggcagatcattacataagtcatttttgtgcagtttataccgtacccgagcccaatttgccgtcgcatccgaccggcaggcaaatgccgtccacgcaaatctcttcgccgtaggcgtcgcattttgtgccgtcaatcactttctcggcccaattgtagtaaaagctgtcgccctccggccgacaggtcaattcgcatttgtttttgcttgtgtgtgggacccactaaaatttgatttattttttaattataattattgataataattttatagttctattaattggaatgaaatataagttttccaatttattttgaaagtcagctaaaaaacaaagagctttaatttcatttaaatgttttaataattttgagttttaatcaattttaatataaaattgaaaaattaatttaatatttaattttaaaaatctgttaacctaatggaaaatcaaattagatgtatttctaaaattaataagaaatatttaaaatgtttaaaaatatttaaaaaatgaaaaacagaaaattctttaaattttttacatttctccccatttctgtaaattaaatacctaaaaaaataattaaaaataattattttaaattccgcgcctcctattaccttataatatttgtcggccactgggtcgtcattgtgcgccgcgcactgttcggcccggaaatccatcgcatccgctgggcatggctccaaattgcaggaaatgtagcgaattgacgggcccgcgcagtgtccgtcaccgctgaaatttcaaaaaaatttattttaatttatttaaaatttttaaaatttaaacccgcaaatgcgccgttccgtgtaaacaccgccgccacaagtacgcgctgaaaagggcgcaaaaatagtgtcaacaaattgcaaccattgagcgtgtgatcatcaggataagtagtgatcagccaggtggggttgttatatttatcctaataaaatcatgggggcaaacaa

SEQ ID NO: 4786 - DNA, 6627 bp, Heterodera glycines
atgaacatttgcatgtgctacaggtggtatgtcaacatggtgatcattggctggatgatggtcaacagtttgagttggtgtggctctatcttccggcaaaatttgacgagtcggagacaaattccgattttgtggtgggagttcggcattcaaaaaaacctcggtttgtaccaccattttgatggtcattgtcatcagatgaatgagtgacgagctcgagacctgtctcatttgaattgtgcacaacggttggttgagtcaccaaattttgtccagcaatagagaaattattttgctcattcgctgtatttgatgtatttcccatttcatgttttgccatccgtcgtttccttcttcctgacagttctttttgtggcatgatggaacagtttttgcagtttccaaaaaatgtttgaaaagcggctaaaaagagtaattaaattaataaaaatttaaattttaccgttaagcaaatcgtagaaggaattaacttttctgcgttccattgcgttttgaattttttcattcagttttcggttcttgctcagctccatttcaaccatattttgaaccttttcttgcaatttcgggtcttttttcaaatttttgattaaattttccgtttcattttccattttatttaatgtattctctatattttgcccttttccaatttcttcacaatatttcttatggatttttgtcattatttccgaaattgttgcatcaatatctttaccatttttaggatatacaaattttgttttttcgcaaaaccacaaagaaaaacattcctttgtgaatttgttgaaagaaacaaattcagaagcattcgaaaacccattaaatgatcccataaattcattttcatattcttggcattctttttcggcggtaatttgatggcttacgcatattaaatgcaaaaacaatgcagaaaagaaaaaatgtttgaattcaatgctcatttagcgttattattggcgaggaataatattagtaaacaatataattatattttagctttttcctaaataatattttctttattttaatatccattttcgttagaagtttttgcggctctgacatttacgcccaacatttacgcctttgtccaaaatcgggttgaaaattaagttttttcaatctctgatcgcgtgaaaattttgaaacaacagaattaatgctcctaataaactagaagaccgtatatcttaattttaatgcggttagactatcagggcttgaaaaaattcaactttgagtccgattttggacataggcaggcgcaaatgtcgggggccgcaaaagtcggggctccgtgctggtgaccacccgtggtgagccgaagctaaaaaagtatgagtgtggcgaagctaaaaaagtatgagtgtggcgaagctaaaaaagtattagtgatgggtgatcggaaggggcgggtcatttcagtacggaataaatgattttaattaattaatatataattattttaatttattaattagatttgcagaccattattataatgtcgatttattatttaatatttcccaaacaaattacatttttatgagagaaatatagtctcttacaccaacttgattagatcactccttcctagtgacccggacacttaaaagacactgaaaatcggggaaattttcgaaatccatagggagttgggaaattttttctagagaaaatgggcaagccctctggaaagagcacaaaatttgctaccgaattgcttttggaatggtgggtctgcgatttgtacatagaaagtaatacttggttgaataactgatcaccataaaaatgatcaatttttgaccaatgcccataactttttgtagaagcatccaaattaaacaatattggtatcttttgatagccctaagtttcctctatttttctgtaaaatttcaaaaaatttcattgtgtttcaaagaagttgtagtcaaaaaggtttaccaaaattttttttgaaattttacataaaaaaatagaggatactttaggctaccaaatggtaccaagaatgattaatttggatgcttctacaaaaaaaatgatgcattaaatttatcaaaatattacatgatcgtgtcttatttcgtggtcgtgtaaactgaaatagagccagatatattttattatttattagattattaattaatttctaattaactgttaatttaattaataaaatcatttattccgtactgaaatgacccgccccttccgatcacccatcactaatacttttttagcttcgccacactcatacttttttaaatggaggaaattgagaaaataaattaataaaaaaggatgcgttgggaaattatataatatgagatgcttaaacaacgaattaatcaatttttgacatgtcacttgacgattttatgtaaaataaaatgaaaattataaagaaatggcagtgtgtaggagaggaggccatcaataacaaaattggtggtggtgaaatggaaaaagtggggaaaagacaaatcaacattttaattatatatatgtttacggaaattaaaaaattgacgttgattttttatttatataaatatattacacataaacattaataccaacgccatttttatgggtttttattttaatgtgaaagaaaaatattttatttgttttgtatgcaattgaccatccgccggtcgcctcccgccgtctctccatccgccgattactctgttgtttccggttgtttttaaaattagttttttaactctattgaggcttttttattagccagagaggcttttggatattgcgagccctgtttctagcccgaaaattcttagtttaacgtcactattcaacattaactaagaatcactgtttgggacttttcacaccaaaacgaaatttgcgcctcgacacttgcgccaccaagaaaaattggacatttgcgccgctcagtaaaaaaacatttttttaaatattattaccatttgtttagaaaaggcataacatttttataaattttttacaattcttgaaaattattagagcacaaccagaatttgatccatgcatttcattatttcacgatattctgagctaaataaaatcttttaatattatgccgtcagatggcaaacaaataatcaatatttatttggagcagaaaaggaagacacaaatttagggaggaatatttaaataacaaacgaaggaaaataatataaagaatgcacgaatgacggagaagggtcaacctaggggttttttaggtacgtagattccgaatctaatatttaatttgctctaattctaaccctaaacctgaattcgaaagacccgaataaatggatgaaaatcatagataaaagtatatagaaatgaaaatctgagattggattcatgatcagcgaactcatttacccatagaaaaatgtttttaatattaaataaaaaattttggatcaaaataatttggtggatttttgggacacttctcaaacgacaaatttaaggtgcgctgttgagcgcaacccaagtatttggcgtttgtcgttggtttcaatcacaattacgaacgccaaacaacaaacgccaaatttcagacgacaaattttttaattgtgattggagatagggacgtcgtaggaaaaagaatagtccaatgggaaaggggaattgtatcccaaatccaaaaccaaatcgccgtctcttttcactgctttcttttacttccaattaataaaacagcacacagccaatcaattacaaatttaggaagagcacatatatcacacatactccaaccaaaacaaaataaaataaagggtcacaaaaactaaaacaaaacgccaaaataattcaaatcaacaatgatatgacatcctcgccctctacaaagcgatgtcctcagcgcttcaaatccatcggcagggcattcggcttccaaaaggggcagtaaggatggacaatcagcagtggcacagaccaacatcataatttgacctgtaaaatgtgcggaaaaaacgaaaactacaattttgaacaggcctgatagcgtaacttgacgcagatttattcgtaattgtgccatcaacggctgacaattttcgttctgtgtcggctttcaacaacttcgtcgttggacctgttgagtcggccaattcctccccagccttcgaaaaaacaattgtcctcaattggccattccctttcggtgttttcactttgctgttgattccgttttctttggaattttcccttttcctcaatttttcaaatgcaacattcaacggattccataatgccggcaatttcgagctgctactagccgtagagctgattcggcggctatgagttttagcctttacattcgaaaacgcgttggcaacaaccaaaaatgaagcaaaaagaccagcaaaaattgttgaagcatcggctgactctatcggtttctgcgacaaattgcgttcgtttcggccatcctttgctcgtttaggggcggagacttttgggaaaatttttgctctcggtaaattgtcggtcctaattctttggttctctttttgaaaattcatattgctgttattttgttcaaagccgcattttttccaagtgaatttgaccttacaatttcgcgcgatgtggccaattttacggcagttataacagacgcttttatttgtcggtcggacgtaaaatttttcccaatcggtggtcgtcttttccaccttatttggtttaaagctgcgtgctatgtgtgcgttttcattctctgcaattgactttgcggctttttgcgctatttccgcacgcacagccaacgcgaccaagctgtcgtagctcaaacccggacgacgagccatttccaatgcaatcgaaattttggcattttccaaagcacgaatgaagtgttttgccgcataatcgttgtacaaatccaatggcaaacctggatatgcacaaagcacaagttggtaaactcgttctgcaaattcttccagattttcgcctggtcgccgttttggtccatcccacaattcgttgaatgcttgaattgcggtacaatcccattcgtccaaaagtgactccatttcgcttcgtattgcatcaaatttcgccggccgattcactgcagcggcgctgaaagcacgttccgcctttccacttacactcgagtgctgaaattcggcgtttttctggccattcttcggtagctaacgaaaattttttgaaaaatgtccgtatttgctctcgtccttcatttccatttagttcgggaagtttttccagagtgaggagaaattccaaagaacaaatttgtttttgttctttctcactttcgcatccaccattttgtaatgaaaccaaaaagttgcgattgtctttccaattttcctcggccgaattttgtgttgagaagaaattgcatgttgaaatgggattttcgtttcccggttttgaagtcagtttttagacgaagttaatttaccgaactgacaaatcgtgatttgtttcacactttacggcttttccttttcgaagttgcgttttttttttatatgcagagggatttagttttcccgttttactgatttcgtggccacaaccaatgaagaaacttcattagggatttgtttcccttttccagagaccaggatttgcttttcctgttacaaattgcagaaggatttacttttccttttaaaatcgttgctcgtccaaatttgtcgtttattgccactgctgagccacctttgtacaggagcgccacgtcgtaggaaaaagaatagtccaatgggaaaggggaattgtaccccaaatccaaaaccaaatcgccgtctcttttcactgctttcttttacttccaattaataaaacagcacacagcaatcaattacaaatttaggaagagcacatatatcactagggttgtaaaatatatggattaacatattttttctgcgcatatgctatgaagaaaggggcttaaaaatagcatttctgcgttaaaattttttgatttggtgaaggtttttagtccatataaatccatattttgggggttttcgggaataaatccatatttcgccatttttgggtttttagtccatattttggccattttttggaaattttcacaagaaaaatgaaaaaaaaaaacgaaaaatacacccctaaagatcaactttttggaaatttttaaaaattacaccccacaaaacacgaaaaatttgagttttcgtcgtcattttggcattttcaataaatattttcgtcatttttttgcgaacatttctttttttttaatgagaattttttcgaaatttggcaaacttggaggtgtttttgatacaacgaacaacaataaaaaatatgcatttttaagttttaaaccccattttttggttgtttattgtactttttaggtttatttaagcaaatattaaatatgcacaccttttttgggatttttgggggtttacaacatatattttggcattttttatccatattttggtccatatttggccatttttggcctttttagtccatatttcgggcttttttagtccatatttaatgtccatatttcgcgttttttagtccatataatttacaacccta

SEQ ID NO: 4787 - DNA, 2499 bp, Heterodera glycines
aataagaaaagaaattccgaatgcgtcatgcgacataacttggtctaaatttttcaaaaaataacacccaaataaatgagtgagaattggtctcggggatacgacaaattcaaagcatttttaagccgagttttcctcattactgcttggcctttgttcaggcaatcatccgcgaccaaatagcagaaaaagcgatggaattggaggaattgggagctgatggactgctcgcttttccacctaccttttcgcttgatcaccaaacggaccaacgacagaattacgagtcggccgccaacacaccgacgagtgacgacgactcggggaccggcactttgtcgtaggaaggagacggacgatctcaacggcattcactttgtatcactcactcatctctctgtctcttcgtgccttttttgtaatttattcgttctttttttgtttgttttttaatcttaagccttaatttgctttctctttcttttattttgatttattaatgtacaatgaattaatctctttttacttaaattgttctgaatctgaattcaagttctgctcggactatgtaatatttccaatagtttttttacctttttattatttattttttgctaatttccatcagaaataaatgtcagacgaaggtcagcagttgttggagtccaccttgcgcaatgtgttggaccagcagtcgcttcgatggattttcgttggcggaaagggcggcgtcggaaagaccacgtgcaggtcagttgatgtggatattacaaagaacgcttattgtgcgaaaatgatgccttgaattccgtcaaaatctcccaacttttaattaccatttcgaagtgccaaatttttagttgctctttggccgttcagttggccaaatatcgtcgcaatgtgctgatcatttccaccgatccggcccataacatttcggacgcgttcaaccaaaaattcacacggagtcccaccaaagtgaacggcttcgacaatttgttcgcgatggaagtcgacgggtccaatttcggggaccatggtgtgcccaatttgggtgacgaggacgacaagtgtactcacttaccaatctgtattcatttaattcattgtttccgtttttcagctgatatcttttccatcggaaagaactttttggccgattttgctgccggacttcccggcgttgacgaggccaccagtttttctcaaatgattaagtaatgtcataccaatttgctattttttcactaattgggttccaattgaccattcaaaatgtccattttatcgcgccctttcagactgatccgttccatggacttcgaagttgttttgttcgacaccgcacccaccggtcacactctccggttgctccaatttccgacagttatcgagaagggtctgtccaaatttctgaaggcgaagacgcaatttatgccgatagtctctcaggtggttttatgattattattattgtaatttggtgtacgaaaaacagaaaggtaattgctctaggccaataatctgtgattgtatttcatttcattttcttttaaagatggcaccaatgttgggtttgcccgactcgactttggactccacgacggacaaattggaggaaacgcttcaggtggtacggcagatcaaagacgaatttaggaacccggtataattttgaattgtgtgtaaatacgataagaggttctttaggatctcaccacatttgtctgtgtttgtattgccgagtttttgtcgatgtacgaaacggagaggctggtgcaggagttggcaaaacaggcacttgaacatttattaaatattttttggaatcaaagacgaaatgtcaaaatgaaaaatccctaggaaatcgatgtgcacaatatcatcgttaatcagctgctgttccccgacaaaaattcggacggttctgtcagctgcaaaaagtgcctttgtcgtttcaaagtgcagcagcgttatttggcacaaatcaccgaactctacgaggactttcacatcacaaagcttcccatgctggacgaggaagtgcgaggccccgaaaagatcaaacagttcagcgaaaggctaatcaccccttattcttctgctgttgttgttgaggatgacaaatgaatgcgtctctcttttctgctgcttgtgaattgatccttttgttgttctgctctgatcacaatgtttggtgatggatgagttggcgtaacgttctttgagaatatcaaaacattaaagtttattccctttatacacaccaatttattaattacctttctttgttttacttttgttggactctttctttggttttgagagtggttgtttttctgctcattgtcagaatttatttgtgtgtttttctccttgggctgtatttttttctgtttcccgtgttttttacgtataaaacattttttgacaattttaattgtactttttgctttttcattaagccgtgttttatcttctcacaacctcctcgttttt

SEQ ID NO: 4788 - DNA, 2872 bp, Heterodera glycines
tcggttcaatggcaccgcgggttgaggtcccttttttgttttgtttatttatgtccaatcgatgagcattctctactccctcccccggtaataaaaatttcgatccattttttgggtttttattgaccatttatacctatctttttcacacgcagcttctctctgtctctctttttcctccttcttcttccttttcactctcttttctttccctctctcccacttcgtccctttcacgtgcactattcccctctctctttgtctgttggtcacttttgattcgtttatcttccccttttcagcttcctctgctcgttgacatcgttaagcatcgtcatgagctgaacagcaaatccacggccatccacgcgcttctgatttctcccggacaaacgcgcattttcgacaaattcgaggaggtgccaaattacgctttgggtcggtgagttaattcaatgcctccgaattttagaatttcacacttttcagaatgttccgccaccgaaaatgtcgtcgttcttttcccgtcaaagaattcgcagtccatcgcccaatttgtgcgtgaaaatggcccccttcaccgtatcgtcgtgctcgactcgacatggaacaccgtgggacaactaagaaacatggccaacatcgccaaactaccgatggttcaccttcgacagtacacaacggactactggcgaccgcaagtgggcgaatgggggggggataaataaataaatgaaaaatggacggaataacgacggaagggctcaaaagggagatgggggggggggcagagtctgcgtttagtggccaagttttaaggtccgcttttcaaaaaaatggatatgagagggccgcaggcgccgtcggggataaatttcgtttatgaatttcttgaatgtaagaaaatagccaaaacagtatttcttgaaaacgagtccccaggggttttatttttcaagcccctcaaaagggggctctaattcaagggggatatttatatgttgcgtatgttttggttcttttatgattacggtacccataatcttaatttatttttcccatcattttcccctgctaaaaaggaatttttttgggaatgttatgaataacataatgcattgcattacattaaattcaaaaattattcttggcgtcgcatcactttaattattgatcatctttatcacttcagaatggtctttcagccgaccatttggccacaatcgaagcaatttactacgcatgtgtggaaagtcaggaagctgaaagggaatggaggagaacggaggaaaggaggaggatgggagagggggaagaaaaggaagtgagagaaaatggaggaagcgaagagaaggcggaggaggagcagcaccgcctggacaagctcctcttttggttttacttcttccgcaaaatggtgcccgcgaggatatttcggatgaaaaaataatgtgccaaagtgcgttgtgcccttccctctgtttggcttaacccgtggcattatctcctctcctcttttgttctgtttttcactttttgttttgtcataaattgtgttttcgtacatttgtcactttctccgattgttttcgatgctttcgatcatcgactgattattttcttgttttgtggctttctcaatcattggcacattttccgcttttgccaggtgtatgaggccggacccgactcagttgaggaggtaccagttaagtacagcagcagcgaacggcgtccccgcgggtgtttttgtcggcagtgccaaccgaacgcggcgacagtggcgctttctgctgctgctttccgtgcttttctccgtcactttcaccttcggattttggacttttcaatctgatgggtccatcttctcgccgccttaccacaagttggagcagttcggtcagtgattggttggcttttggccgtccatgtttgactaattcgtcttcgactgatcgttgtttagtattggttgaagaaaacgtttcgacctcagcatggaatacaacagcgcaaagttcgacaacggaagggacgaaagaaccaaatggaaatgacgagggaatttctgaaaaaatggcaaaaacgaatcggtaacgttttaatgaccgattggtcacatttttgactaacattgaaattcattttgtactttcagttcctatgaaaatttcccagtggaagtgaacggaacattgtcaaatcaaattgaattgctttccgtaacttatgcccaaaatgccactgaagttgcgctaaatgtctcttcgtctttcgcggttcccccacggcattccgtcgccgatttgcccgcgtgcgctgaccatcccccgggactgatcggtcccattccggtgtggatggacgggccgggatttgagacgctcaacaaattgtacccgcgtgtgaggcagggagggcacaattggccggacgcatgcgcggcacggcatcgagtggccataatcattccgtacaggtggaaaaattggggatagaaagggtgggcgaattaacaattgaaaactgctctgatttacccaatgcgttcgattatattcgttttctaacttacggttttaattttttttttccccgagaaaaagataaatttgtagttttttattgaaaatttcagggggaggggggtgtgggaagtacaataagggggaaacagcggggggggggggcgaactgttccctgctcctcctcatttgttttgcgctgttcagagaccgcgaggcgcacttgcgcattttccctgcacaatttgcactttttgctgtccaaaacaacagatgaactacgcccatttttcgtccgttgaacaggttgaaaaaaggccagaaaattggaaatttttgcgatcac

SEQ ID NO: 4789 - DNA, 2031 bp, Heterodera glycines
cccccccccctccccgccccctctgggggggggggggcacacccggcaacgccgacggaaatgcatcgattattccgtcctttcggcaatgtcccatccatctctgtgcgactgtttgcttctgtatcatcactaaacttttgcctcgtcgccatcgacagccccatccctcccccctctatcgccatcccctcattagcaaagccgtaaatgatatttattcactcaattgtttttcgaggctaacaataagaaaaagaaagaaggaagacccagcagcagcaaatacaacaaattcattaagcaacttcaattcctacaacaaaatggacgtcgtttatgccgtcgtggaaggttctaacaaaatgaatgggcaaaagagataaacgggctgaatttagaaaagcatttcatccactttacatcatttaaagaaatattatttaggtaaatacaaaatttgatgttaatatactttgagagaaaaatgggggaggggagggggaaaatgaatgaatagtctatttaaaataaatttattcaattcgtatttcacaagcataagttattaggtgcgcaattatttattccgttcttcgctatctttgtgcttttgactgttctttaccattacaataaaagtggacgattgctggatggagaaaatcatcggatttttgggggagaagcggacaaaagagaggaggaaagaagaagtgatgaagaggaagaagaggaagcggagagagaagaggaggaggaagaagaagagaaggatgggacaacggaaggtgaacgaaaaggacatagaaataggggagagtgactagagaaaaggagagggcagaagaacgggcaaaaaataaatagggacagagaaaatgagaaattggcataatgcaatccaagcaaaagccaaccctttccccccccccccccggtgattacgatgcattcattgctttgttcagattattatggtgctaataatggaagaaagcaaaggcgacagaacgacaaggaaaagtagggaggaaaaggacaagtgacagaggaaaagagagaaagtgggcgccgtgaagggagaacataaggccaaagtgaaaacggaattaattagccattgtgcctgtctattgcatacaaaaaaaaagaatgccaaagaataggcaaatgatcaatcgaattgcgagtgatcggaaaagcgtacagagagaagggcaacggcactcgcgaattgttgtggcaaaagcgagcgaaagttaagggcgccgcaaatcatcccatcagcagggcattgctattccgactgcaatttataaattgtaaggccaagctgaacgttcattcgaggggaggggagtgaaaaaaaaacgaaaattccattgtaaggtgtcaaaagtttaactgcaatggacgaaaaacagccccacttttgtcaccctttgtactgccattttccaccagcacccaactcactgttcgatcaccgaccgaacccatgcggcgaattcggcggtttcttccattctttcgtgccgtttgtagaaggcgtcggttgccaacagcgccagcgttgccctctccgccacattctttcgcagacaccgattcacaaagtccacaaattggtcagagaaaagtccacgcggcagcacgggagggggctgaacagaaaacggtttcgggggggggggggggggggggcgtcggtccctttgcttccaaatgactcactctgttcacaatgtaatccaacagttcaaaaatggccattgtcttcggcgttaggtcgtccgccgtctgttcctcctccgttccgttcttttccattttcacatcgttcggatggaccccgaaaagtttggcgtactctctgcgcgacggggccgggattgggtagcggccgatgacgagttcaaccagcgaaagaccgaaactccaaacgtccgatgggacgctgaaacggggcgcccggccaaacgttcgggctgaaaaaaagggaacaaatgactttcaaatttgcttttt

SEQ ID NO: 4790 - DNA, 1394 bp, Heterodera glycines
atgcaaatagaaatgtcattgttggtggtgaaagcgccgtaaaagcataaacggacaaaggcatgtgaaattaatggacattcaaaaccccaattttaagaaaaataaaatgcaaaaattaaaaaaaaaactgaccgacaatgtacggactgttgcatttgtgcagcacttccaactccttcagaatttggttacgcactgacggcttcacctccaaatggaccaatttgcgggccaaaaccacgccaccgccactttttgtgtgccgcattttgtgcacaacgccgccgttgccgtggccaaggtcgcagatccgttccaacacatcgtcactgagttcgccgatcttcaattgggaaatgagttttcaaaaagcactatggatatgaaattcctccagtttgctttggtcttgaattatgcggatgcttaggctacctacataaagcccattaatcggctaattaaccgcgttgtccttacgccaattcgtccctttgcgttcgccgacattcacccatttccaataggccgtgtcacttgcctgtttcttcaacgttatccactcgtacattcgctgctgttgcgagcctgacaaattgagcgagcgcagtttcgagtccaacgacgcgtcggccgttccttccgttccgactccttccgtcggcggctgtcctccgacccatgcgccatcggcgccgaccgcgccctcctcattgacagtcggcggaaggctcaaattgagcggattgcgtcttttgctggacattttgttcatcgaaaaaataacactgacaaaatgcaacgaaattacgagaacgaaaatcaaagaaaatattaaataaaatttacaattaatttaaatgtcaggaaaaataatgcgttttctttaatcttttattttctttttatatacaaattaaaagcataagacaaaaaattggttgtttcaattatagaaaacaattagaataatcaaaataattgagaggtgagttttcgtggggaaggccctgcagaaaaaagaaaaacgaacgactaattaaaaaagaaaaatatacaaaaaaaggaaaacgaaatgggaaagcaaaagcaatggaaggaaaaaaagcgttgaagagaatggcaaaagggtttatatggcaatttgtcgcgagaaaaacaaaaggaaaagaattgcaaaacggcaaaaagaacggagcgattgctgggatttgtcaacgtcaaaaattggaggaaagcggccaatgggcaaccgatttgactgcacaaaagagggcactgtttgccgtccgttttcgcttccgtcagtgtggccgagttggcacccgaattggccttccccccgccgtgaccgcgcgaaaaggaaagtcgcgccaaaaagtcgccgtagc

SEQ ID NO: 4791 - DNA, 1896 bp, Heterodera glycines
aaaaattttcgataaataggaggaattgccctcccatttatcattcaccatgccattcggcagatcacctttgagcgatttaactaatcgctcgagtgaaacaagacctggaagacacccagagtcaactggacaagaaaatttggatccaagagatccaagagaggaggagaacccttctcttacagaggaagaaattcctcttgaacacccaaggaattgggagaatatgtctgaactcagttcagactcaccgacttgggctggaagagaggacagcccaatgtcagatctctccgacagaacgtggaacccaccacgttcaatctggccgagggaccggagagaaccattgagttcttggtttcctcgaataatgggaaaccattggttcgaaagagaaaggcgatcagcggaagcacttctcagagattttctgagaagtggggcctttctccgaacaaatcacctcaccacaaatcgtgaagttcactttgatggactttcacgcagtggggctgagcgaacaccgattttccccggaatgtctgttcaaagacattttgaaagacgggggattaccattaatccccgtgtaccacttgtccaggaaagtgggggattttcgcccaacagaggggacatccacatggactatttcccgacagaggtagtagacctctgttacttcggagaggaggaaaatatcctccgcgccatgggagtcccaacaaacggctccccttcacggggaggtcaatctccccctcaaagagaaatgagaccgagagagaattctcggaccatttttgagcctcgaagaggtcaggagggaggcccttcctcttcctttgttcaggaaaggggaaggggaaaccatcggcaggaaaggccgacaaatacgatctcggcacacagtccgagtcgtattccgacaatctttgtcatttttttaatgatgatttttcatcaaaatgtaatggcaaagcattacatctcggaatgctcaacctttccgcaatttgcggcaaagcatcctttaatagagatgcgagtgcactctatgaatcaccaaattcatcgggaagagatgaacaagctcctccctcaagaatgggaaggaggaaaccagtcagtatttaaggcactgactggagagaagaaggatcaattgaaattaattgaaatgtcctcctcctcctcttccccttttgctccatcaatggaagatggagagatttctgagtctccctcagaaaacgaaattcctctttgccaaagagggataaaaaatgccaacaccgagctggaagatgccaccaatccggtgggtaagagggtcaaaaggcgtggaaaggatttggaagccctagggcttatcaacgctgaggccagggaggttccggaaaggaagcctccccattgctcggtctgtggcctgagtggccacagaaaggggacaaaaatttgtcccttttactccagcggagggcagaataaactccgaccttccactcctattcaggaattggaagaggagagaattggccgttcgaccaatcgacgagcgttggccgctcgaaagccttcgccaaaagtggctaaaagagccaccaaggagagcagtttgtattccgggctgccacgcccggatacctctggcttagtccgtctctcaaaggatggtcaagcgggcaccagcggtttccgggagaacccggtggttcctctgagagaggaaatccgcgggctgcagtcagccatcgacgcgctgacggaggaagtttgtgccctccgtcgggcaatcccccctgtgcttacagggggaaacgcgactccactggggagacgccgagagcgccaacagcgttcttcctcgtcggaggaagaaccgaa

SEQ ID NO: 4792 - DNA, 2171 bp, Heterodera glycines
aatccattacatccatctaaagacaagcagcttttatctattatatgtgaacgttcttgcggcaacaaaatttccttcactgtttctgatcagtgatcactcattttaaccaaacattgccgaagtaacaatcattagaaaaccagtattttattgtggcctttgggcattccgtcatgtttttgaagcaaagaacggaatttaaaccgattgaacaatttggataaagacaaactaaaattttaataattgtgaaataatttcaaacttttcgaattaacacaaaataaaacattacttatttttaattcgtgtttcaaaaaccctaagattttcaagatatttttaaactgctgaagtttgagaagtaaagtcataatagtgctcggccaaataattttttacggctaaaactcgttgaaagaaaattctgtacttcaaggattataatctcgcaatcaacctatggatcagtcaagattttaaaaaatgagaacaataatgatgacagtacaatacgaaaaaaaaatcgtgattcaaaatgtcgctatgccgatttctgaaatggcattcaaaattgtagcctttgggcattccgtcaagttgaaatgcacaagcatgcaaatattcccacaaaatatatgtttttttttatttctttgaccatttttattttcggaagagatctctgaatttttatttcctgttttacttctcttagatctttttttattttgtcatgtaaacctttttttgaaggtgaaacaattagtaaatttattttgattgtctgaaaaaggcacagtacatacacttaacagagacttgccgtataacaatgatccaaaatggtctcctagtaaatactgcgttagtttctaccagattgtttttctacagttttttttcttccaatcaccaatgatttttttttccccgtttcaccgaataaaaccgatgtacccattaaaaatatgccaagtccgtccagttcagcaaggttatttatggcgaaggtattcttggtaaaaattacagcccattagattataggaagtattaaaaaacttgataatttatcaacagactgtaatgttggcagttgcctattcgacggtttaaaatcacggtcttcggacattccgtcaagaattaatgagccgaatctcatattgatactcataacatcacataattcaaaatcttaaatttctctgttctaaaccaagcagtcagaaatgatgcctcaagaccttaaccgaagaaaatttggatgaagaaaaagtttattttgggtactttctaaaaattcaaatcgatgtttttctttaaaatattttatttatctcaggctgttttcttttgatttagtcatgcaaacttaattaattttattttaattgagggagaaataaaagggaggaaggctcattcggccatcagcagccgactcttcgtcttgcccaaccagtggcaagacactcggccatcagcagccgactcatctagcctaacccaacaaagggaaggctcattcggccatcgccgccgctcattcgcctaacccatcaaagggtaggctcattcggccacccacggcctgttttcatggagcggaatgtcgacggtctggtgttgtcaaggatgtcggctgcacgcagaaactcgttgtcgttggcgatgtcgatgcgcaccaccttgcgttccttcagcacatccttggtcagaccgagtgcctgaaaaacgaaacggaaaattgtggcataattaacaattaattagtaatgatgatgatcattccatccatacattttttgtggtgccgcggtcgctcaagtgcattgtttcaatccgaatcagaaagttgtccttcatatagtccgggttggtcaccaccgttttgcagtacggaaaggcgttccacgaccgttcatgcagcgtcgtcgaacctcttggcataatcgtcctcagaaaagcaggcacttttctggagaaaaaaaagacgaccaaattagcattaattacatttccacccctccctcgaaaactcacgtatctaagtggataatttttgtgcgtgaactgtcccggacgggaagaggccatttgaacagactttgggccttcaaagggctccgatgcgaaccaattgaaacgccttcaccaccgcc

SEQ ID NO: 4793 - DNA, 1493 bp, Heterodera glycines
aagcacataaacagcactcctcgggactttgcgcgagtttcgccaacctgtcgcgatgcctcggccacagaaaacaattggccaatttgatactcctcaatggtcaacggcatgacgatgcgactgaaaaaaggaaagcgtaattaattaaggtgtcagaagaatgatgatgaaaaaagcaactcactattctctgatgagcattgttgctgaagtgcagtcaaaaggggaacaaagtgaagaaggagacagacgcttattatgtcagtaaaggacaaatgaagaatgattgtttctgcgcttaaatcgtcccttttatacaaacattttcctacccgtcaattccgtgtaaaaattctctataaaaagggatgaaatttgcgtgatccactcattcttcgcattggcgactttcactctctgctgaacaatttcttctctcgacgacactttgcgcattcaatccgagcacacttcttcacccattggctggtcccatgtctctgcaatacgtcggcatcgctgcggtaatcctcggaagtaagtgccaaaacaattgttattaatccatgttgatttgctgctaatttatcgccatttttcagctgccatcgctctgttccaaactgtgtcgctcagcaccagacgacaaatcgccgcacaaaatggccgaagcagcagcagcggcagcaaacgccaaagcaagtcgccgtcgtccgcaaaaaccttggcacacaaaatcgctgcgacggtcatcgctgagaagagcctgagctccatcccggacaacgaaatcttgcagctgatggacatcggctttcaactgctcgacgaggtgggctcagcctggatccgggatgaccagccagtgcctctgttaattcgtgccaccactgttttcaggagccggcgcgtgttgatgtgcatgccccttgctacgttttcggtgacatccatggcaatttgtcgtaccttctcaagtgggttttggactcgtcgactcggctttttaacatttcagcggcacttgcaaatccgttgttgttcaggtacttctccgacacccacatcgaaccgcagctgctcaagctccaaccgccgctgttccatttgctgttcctcggcgactacgtggaccgcggcgagttcagtctggaagtcattgcgctgctcgtctcgctgaagatcctcttctgggacaagatcactctgctgcgtgggaaccatgagatcgcggaagtcaacgcggagtgagtgccattggcgaaaagtgccattgtcgtcattcaattccccttttcaggtacaccttcgaagaagaactgagaacgaagcgaggcaagggccatggccgcatttacaaggtgtcaagagctaccaaaatgaatgaatttttaatgttttttgttcccctttcatttcagaggtgcaacaagctcttcaccaagctgcctctgtgtgccatcattttcaaagacgttcctctgcatgca

SEQ ID NO: 4794 - DNA, 1081 bp, Heterodera glycines
ggtggattttggaggactgctgacacagcattttggtgaccgcttttttaatactttcactgtcattttcaggaccgcgagacttcaattcagttcaacgaccgctttgcgcaagagttcttcaaccgctttccccacatccgcggcatcttccgggcgcacgaaaaccaaccgaaagggcacagcatcaacgaggcgcgtacaatttgcacggtgttcagctcgcctcgctacatggaagacacggactgtggatctgtgctgcgggtgggtgctgcttttgccatgccatttttttgctttcaattccttttttttccccctcagctttctgccgacatgaaacacattcacttcgtcacgctgaaaccgaaggctactggagagaaattgagccaggaagaatgacagacgagcggcggaaagaaagaagccccgacgacgtaaatgaagtgctgcatattcaattcgatcacctcccatttaatgatgttgaccattctcctgctgttgcccgagtagatgtgataaataattgctccgttttatgctgtcccgatacatatttgaccacgtatatgtcattgttgtattatatgtgtatattgtatatatgtatgtatgtttttgtatatgtacttgttacaaaacgataaaaagaatgtttaacccgcaaaattttggaattccaatcccgcagcgggaccagggacggacgaagctcggcttggcactcgaagtcgaagctcgaatcgaaggccaatttttttcgaagctcgaagttcgaagcccaaaaaatcgaagttttcgaagcacgaagtttttcgaattttttttatgtcgaaaaatatattcaagactaaatttttaatacaccccctaagaatcgaccaaaaaattttttaaaaatacaccactaagaattggaaaattttttcaaaaattcttcccccaaattttttttcttgacaaaatttttgatttaaaaaatgtcaatatttgctaagagaattttataaaggaaatgtactcatttgcaactgcaatcagtgaataaaaattattttttgctcaatttttg

SEQ ID NO: 4795 - DNA, 5987 bp, Heterodera glycines
  unsure (1)..(5987): unsure at all n locations
cgagaaatttcagtacatgctgggggtatggtctatcccgnttgtaccacataaattaaatttttcaaagaattattatgtaagagcattcgtggaaatgtatgaagcgttgggcatggctaattcagaacgttcatttgacgtttcaatggatcaattcaaaaatggatgggccttttttgtcatctctttgaattcaaccttagacgatagctgtggatttgagctgttgagaagcggtacaaccagtattagggccacatttgattcaccaattccaaagggaggagtggaaatgattgttctcggagaatttgaccaaatgattatgattgattataatcgacacattgtctccgactcaaagcttgggtaaattattgttgggaatgttcatttgctcatattttaaatttcccgcgcttttaatgctgaacatcactattattgatttcagccattttccctttttgacccgtccttaaaatatcagtccttcctctcagttgtcgcctcctccacacatcattatattttgctccttgactccgccattttcattctgactttcattttcatatttatttcttgtttgtcttttattttatttcttcaataaatttgtatttaaaagtaaaagacacaacaattggcgacgcctgatcgctttccagcattgctgtgaactcacccaagtgtgatctcaaggccaccttcccctaacccataacacaaactgtgaacctcccttaaactcgccaagagatttctcagtttcaagactgattaaaaccgagtgggggttcagttttgttggttaagtgagaaggagtttctcagtattttggctgagtaaagcctcgttgtgcccaatttttctcatttaaattttcatttcattatttcatttgtctcaatcattcatcattctctaaatggcgagtaaggaggagttgaaaacaatattggaggcgcaacaaaaacaatttttggagttaatgaaaactctcatgtccaaaaatgaggctccagcccattctgacttattttcaaaattgaattcacaaattccggattttcggtatgatccggaaaatgactcaacattttcattatggtatgaacgatacggtcagtttgttgaaaaggatggtcaagccctttccgacgacatgaaggtccggttagttttaggtaaactttcggccactgatttcattcgttatgagcaacaagtgctccccaaaaaaactgccgaattaagttttcaggaaacaatcaccaatcttaaggctttattttcagacacaaagtcagtgtttgttcgacgatttgagtgtttccagctcacgtgttctcctggacaggacgttctcgactttggggcaaccgtgaatgccaaatgcgagcgtgccgacatgaatttgtccaaggaggaaatcaaatgtctcatatttgtcacaggtttgggtgaaatgcaccgggacctccgtcaagaatgtcttcgacaaatggagaaggcacggaaagtgacaccgccacgcgacatcaaattggaggcattgttggaagaatgccgttcaattcaatcattgcaacactcagctgcggcgctcgcaaatcctggtcaagttcacgcaattcctagtaagccaaagattttgagtgatggtagagccaaaaattggcaatcaaattccaagaattggccgtcaaaaccaattcaatttcaaaaattttcgggcaacaattcttatggaagaaataatggttttcaaaataaacttgttaaaccacaggataaaaatgttgagcagcagaaatgtaagcgctgcgggcgtgctcatttgcttaaggaatgccgttatccagtggatgttcagtgctttggttgtggacagagaggacacatcaagacgaattgcccatcatccgcaaagtcaaattcaatcggagttgcctcaattttcagtgtcgctaactcgaaacgaggatggatttggactgaacttgtggtcaatggccatcctatcaatttggcagctgattcgtgttcggatttgacaatcattcagcgtcctgtttggataagtttgggtgaaccaaaacttgaaggtgctggacggttggtcggctcattttcagggcataagctaaaacttttgggtggtttcaagtgtaaggttgtattcagaggtgtcgaattaaatctgttttgttcagttgccgacacagacgctccaagcataatgggcctcgactggattgaaccttttgaaagacacactcaaatgcccatcgcgacaacattaaaggtcgtatctgccggcaattctgggcccgtctcatgcacaatccaatcgtcggatccaacgcagctggccaaggaagtcagggcaaaatttccaaaagtttttcagccaggacttggacggtgcaccaaaatgcgagcaaaattacatctcaaagaaaatgcaaagtcggtgttctgccgcgcccgtccggtacctcatggagttcaagaagcagttgatcgcgaaattgaccgccttctggaaatcgatgcaattcgcccgattgatttttcgaagtgggcagcgccggtgcttgcggttcggaagaaaaatggagctgttcggatttgtatcgatttcacgaccggtttgaatgaagccttggaacttaaccggcacccgcttccaagaaccgacgacattttccattcccttaggggttcaaaaatattttcccaattggatctcagggacgcttatttgcaattggaactcgatgatgaatccaaaactttggtcggaattaacactcatcgtggattattccaatatcaacgacttccatttggtgtcaagtcagcgccatccatttttcaaaaagtcatggatcaactcacgtccggtattagtggtgtttttgtgtatttggacgatttgatcatcgcttcgccgaacatggctgaacatttattggttttagaaaaattgttttcccgaattcaagattatggcttccgaattcaactcgacaagtgccattttgttcaacgcgaactcaaatttcttggccatattgtttccgcggacggcatacgacctgacccgagtaggtcagcggcaattcgtgaaatgccgcctccgcatgaccttggcacattacgctcatttttgggagcaattaattactatggtcgttttattaaggaaatgagagccatccgtgctcctttggatttgttgttaaagaaggaaaccccttgggattggggtccaacacaacaaaacgcttttgaacaggcaaaacgtcttttgcagtcggaacttcttctgacccactatgatccggagaaaccgatcattgttgctgcggatgccagtcaacatggaattggtgcgacgatcagtcacaaatttccggatggatcagaaaaagttgttgaacatgcgtgtcgttcgttaacttcagcggagaggaattattcgcaaattgaacgcgaagcgtagggattaatttttgcagttcgcaaattccatcgcatggtttacggtcgaaaatttgtattgttgacggacataaaccgctcttggcaatttttggtggtaagaagggtatcccaattcacacagcgtctcgtttgcagcggtgggcccttacccttgccaattacgaattttcaatacaatatgttaagtctgaaaattttggacaggcagatgtgctctctcgtcttatcgcagcaaaacggactgatgaagaaatggtcattgctcacgcatccgaactgcccgataacgacgacgacgaattggtcgagtatgttcatctcgccaatttggagccattgcccgtcactgccgatgaagtgagtcaaaacacggtaaatgatgaactgcttaaacaggtcatccaatttacgcgtgagggttggccgaggaaatgtccctcaaataatttaatgccatttttccaaaggcgtaccgccctttcggtggtgggtggatcccttttagttggcacgcgcagcatcattccgcaaccgctccggcaccgagtgctcacaacgcttcactttgcacatcccggtgttgtcagaatgaaggctttggcacgtcgacatgtttattggccaggtcttgaccatgacattgaaagtatggttaagcactgcgccgaatgccaattcgctgccaagcagccaccaaaagcgccgctccaaccatggccaacacctgacggaatctttgacaggattcacatcgattttgcaggtccatgtgaagatggccgcacgtatttgattttagttgatgctttgtcaaaatggcccgaaattgcccaaatgaattcgacaacagcaatcaacacaacggacgttttaaaccaaattttctatcgttatggttttccgaaggagatagtgagtgacaacggaccaccgttttcatctcacgaatttcggagattttgcgagcaaaagggtataaagcatagcttttcacctccttatgtcccgcattgcaacggtttggccgaacgaatggtagatacattcaaacgacaggccaaaaagaattcacaatcaaacaaaaattggatttctgatttccttttcagttatcgaacaaatccaagtcaggtgctaaatggtctttcgccagccgagttgttccttggtcgtctaccacgcacgccactttcaatcttggcaccgtcatcccgttcagagcctgtgcaccaaagtgcctatcaacgcaaaatgaaagagcaatacgatcatcaccatggagttgctgatcggaagttcaaaatcggtgacacggtgctcacgctcaattatggacggtttaacaagccttcgtggcttgagggtaaaatcatcggtggaaaaggtttgatttggcaagtccaaatatcatcattgggtattacggtaaatcgtcactcgaaccaaatacgtaatttcttccccaaaattcccgttttacaagaaaacgaagacacggaacaagtgcaggaagacgatcaaaccggaaacacacacgttccgagtccaccgcgacaacaagtactgccagccgaaccgcgtcctcagcgaaaccgaaaaccgccaaaaaaattggtgatggatccaaaagctggtggacgatatgcacttcaagaataggagggcaacaaaacttgaagggggaaatgttgggaatgttcatttgctcatattttaaatttcccgcgcttttaatgctgaaaatcactattattgatttcagccattttccctttttgacccgtccttaaatatcagtccttcctctcagttgtcgcctcctccacacatcattatattttgctccttgactccgccattttcattctgactttcattttcatatttatttcttgtttgtcttttattttatttcttcaataaatttgcatttaaaagtaaaagacacaacacgtccaaagaagctggccgaacctgcagattgtcataatcaattaataaatagcgtgaaatacgtaccatctagtaaaaaaagtaaattccgtatcaaaaaaaatatgtcaaaaaaagggaaaaaattttcaaaaacaaaaaaattatgtcaaaaaagtgaaaaaattttcaaaatggacctctttgcaactagcgccaattttccttaaaaagcagtaaatgtaaatcaaaatttcgaaaaagtacaataaaaattttgacatttgtttttatctcaatttggacacttctaaatacctataccgtattttcatacttttttagaatttcctatcttcaaaatgaagaagttattacataaattttggaaaaattcgttttttgagaaaaaaaattaatagcgctgttctgaaaaggttttttgaaaaacacgaaagtcttcctctataagcttctgtttattctatattcttagaaggcttttgaaaaaanagtacaanaaataaactgattt

SEQ ID NO: 4796 - DNA, 4206 bp, Heterodera glycines
attgcagctcttaatccgatgatccacaaatccttctttgccgtttgactttgtcacagttgtattttcacgaaaagaacagcatagcattaggaaaaaatttttaaattattttcggaatccatgtggatcagaatttcagcgggacaagaaaaaatctgggttggaaagttcaaaaaaactcaaaattattgtcgtccaacccaaaccagcaaatgatcattgtcattatcatcttaatattactttaataccgagattgaatccgaaaaagccgggaattgggggccactcatggttaaaatcccggcaccgcccgaccttaattgacgattatcatctctaacttcttcacaaatccagccaacacacacatattaacaccctcatatcaattcaattgaagcacttttaggcaggcatatcccagggatatatccctccgcctccaacaaaatctccgctcgatctcccatcagatccttttatgaggaagcaaagcctccctttttcgcccactcagttccattcattcatcccatccaataatatatgctgcacactcaaaaaagcacctaaagcattcccaacaaacaattaggctcattgaaaagcatttttattcaccccgcagggcatatacacatatcccatccatcatttcacagatccatccatctaaaaaaggctttattgtttcagaaactaccaagtatgacctcaacggagaaggcacatttggttggagagtttagcgagcaggatttgaggtcagaggggggattaggaaaagcaattaaaaaatgaattttacaaaaaaaacaactttttccctcaaggcatttccgccgggtggcattcgtcgctgtggcattgtccacggtgacaatgttggcatgtgttctgctgatgccggttgcctaccagtacatccagcgagtgcagtcctccatctccaatgacatcgaattttgccgtgtccgttcatttgattttttcgtgtgatttttcgaatcaaaaatttttttaaatccatttttttttattttccgatcctttttaagagcagaaaccgcgatctatggtccgaagtggtgactgcacaactgggcaaaggccaattggaacatgcggagcgtcttcgccgcagcacatccgcaagcggcagcggccgatggctgttcggccactacatccaggaaggcgcacgcgggccgcccgttcaaggacgtgaaattcgccgtcaacaagccgcttacgggggcggtgcagcaccggcggaacaagcaggaggccatggtggcgcgtatggacccggcggatcggcagccgtcaatgcgggaccttccgcagcggagggcggcggagaggagtgctgtgggtgccaggtcggcttgccaggagcgcctggcgaggctggacaggatggagcgccgggacgcgacggacaaccagggcagaacggtgtgcccggcgaaagtcagtggaacaggggaaccgcgccgagccgaggcaaatacatcatgaaaaatccttcgtccagatgcaccagctgctgcaccagcagcgccatgtgttcgtgagtgtcccgtgggcccgcctggaccacccggcagtgttggggacaaaggaccgaagggctaccctggcgagcagggcgagcccggcgcggccggcaaacctggcccgcgtggacctcccggcaaacaaggaccccaaggaccgcctggactgcccggacggcctggcgagaaggtagagcagcagcatttatcgaaatgacttacagcaatcaacatttaaatgccattaaagggagaagcaggaaagcatgtgcccggtgttgcaccgccaggcccacccggacgtgccggcgaggtcggaccccctggcccacctggaccgcccggagagaaaggtccgtgagaatcctcttggatatatcaaagcgttcatgcacctgtcttcaactacaggcaaacttggcgagtcgggcccacaaggtccacagggagaccagggcaacccgggaccgtatggaaagccgggcgcgctgggcgctcagggcccgcccggacagcccggagcggtcggatcgtgcggtaagtgtgccgtccgtccgtacggatcccgttatgtcgaaattactatatttttttctttttgtaagaccattgcccaaaaccgcgaacaccccccggctactgaagcgttgtgccttttccctgacgacagcagcagaagacgagatcagatcaccgttactactaattgtcacattattattgctatacagtagtgtacagtaaccccttccattgtgaaaaattggatagatggaaaacaaaatataaaaaaacacatttggccaacagaacattgtgccaatcaatcatcacagaaataaattgtttataaataagactcgaaattatatgcaccgaaaattgcaaaaaaaaaaaaaaaaaagtgaaaaatttgcttataaaccttgccaaatgaaggtggaaatttctcaatttcacatattccattaaatgtaaggtaaaaatcttgaaaatagataaatatgtatggtatgcaaaaacaatacaaaacaaagctaaaatttattaattctgaagaaaattgagtaaaatcggatttccattttgggcttacataatttttggaataatttccatttttttaacaatttatattttttaaaattttatcgataaaataccgaaaaaattaactttttgtgaaaaattttcgctccttaaaaaccaaaagggccgctttaatagagtgaaccgtttaatagaggattttgcatatatttcgagccctgtttataaaaacttctcaatcagtgtccgtttctgacaatgtcctttttgtccgtcactggatgcagatgttccaccgggattggcacaccttgggactcgtccactgcttgggcaatgtactgcttgaattcttgattggggaaacatgggttatcagacgcgcaattacatgggcaatataataattgccatgaaagttgattttgttgtctccgttgaggtcagcatttttcagcacactgatcagaaagcgcaagtgcgatttgtacgcgggatcaacatggttgtgctgaagcaattggttaaagaacaaattccatcaaactgcatcactttcttcgcattcaacagcatgcaaatcagatcctcgcgcccaatgtgcccattcatgtccttgtcctaattttgggaataatcatagttggtatggtatcggattactgtattctaaattaacgcgctcactcgccccctcccctaaccaaagcatagcctcccttttgagcgaggggtgtgaagaatttggcaacgttcgagtcagtaatttgaaaaactgcggacccggatttccgagtcggattcggacagggtcccggacaaaaaatcctgctttaacaggactctggctccttttgaattttcaaaaaaaaaatacagacctgaactagggccctggaaaaatactgtacaggatcctggtaaaagcaataagcttgaaaaagcgtcagaatttttccatattttgaatttctcgaaacagtcgaactcactaccaagagtgtgttacacaaatcaaccaaaccatatgtatgtatgcattattgtatacctgttctacgaacatctcgcgcagtttatgttctgtgaaatggacaaaaaatgctgcgtgaaaattaagaccaaaaaaccgaccccaattggccatatttgaaggcaaaatagacaagtaaattaataaatatcctctgggctggcaaaattgactttgtcgaaaacagaaattggtgaaagcaaaattagaatttcagctgataaagaccacaggaactgacataaaacggagtgtccaatgcagaggctccggcgagctgccggccgccctctttccgaagacaatgatagccgaaggggtgcgggagggggtggtgatcagtgatcactgatcagtagcagccagcacacagtgatcaagacaacaataatgacaatgggagctaacaaagattcacagtaaatagggagaaaagatcacatttcgcaattccggattttggccgggatgtgtacagacagactcattggatgtgcgattttcatgaggaaagcaaagaaaaaattgcttggatctaagctacttgatggagatatg

SEQ ID NO: 4797 - DNA, 2489 bp, Heterodera glycines
ctcgaaaaatgctgaattcaggggtttactcattgcaattttttctatcaatatttgtatttttttgtattactaaattccagagacattaagctttaggttaataccaaaagtgtaggcactagaaaagttatattccaaaaaaaggatagtcactgattgaacgcgtaaactagaatagagccagagattctgccattactggaatattcaacaaaaacggaaattcctatcataaattaaagaatgtgggaaacaagaacggcagtgtttattataaatttggcacttttcaccctatccacgggaattttttttttgaaatttttggcagcagttggttcttcatccacagctttccattcacctataccgtatttcctaaaatacaggcacccctctgaaatgaaacccctcttctaaggaggggggatgagttgaaaatcaaagccaccgggggctctattttagggaatacggtatgcgatggtcaggcatgctctctgatcatctgctccggcgtcgtgccctgcgtcgtcccacacctccactttgctccccctcaatgccatcgatcgcttgcgcatcaaacgatgtgccgtcaacgctgggcggcacataatttggttgactggaaatgaagaaatcgtcgaaaaaggtgaacagatattcaaaggtcggccgtctgtccgggttttgatcccagcagttcaacatttcttggtaaatttcatccggacaattcttcggacatgccatccgtttgccttggtccaggtcacgaagaacatcatgattttgtactcctgcgcaaaaattgttgaaaactgtattcttccggaatcaattgtcagacggggacgcgctttatcgccccccatcgaaaatttcgcaaaaaattttaatttttcaaaatttttatgatgaatttactaattgttggttttccaaaattaaaatcaataacggcggggggggggggggcggtgttgtttaactgtctgtaaaaaatcaaaatggtatttttatgttctcttttttactattttttgagttccgaatgtatatgagaaagtgaatgccaatttcggctttacaacatcatgtaaaagggatgtctcaggaccaattttcaaattttctttgttgacagttttttttggagattgggtccgggatgccgacaggcactaccggaggaaaaaaatagaattttttcgagaccaaccccggtctgagctatttgtgcacactgcatgcactacctggatatggcgtatggccaagtgagaaaatctcatagagcagaattccaaatgaccaaacgtccgacttgaccgtaaaatttccacaacgctgtgcctctggcgcagtccctaaattgttaacaaattttttttttttaaatggcaggtaaagaaaatgaatgagcactgccgggcccggatttttcttgcttttaaatttaattttatttttctgattttttttttgccccatttttcaccccctggttacaggcctacaggcccggattcttcatgggccctgcctggcctaggacatttcgtcaacccttgttttttgtccataaatccagggtaccaatgactttttcaacaaaccgttaaaaatcccatggtaaaaaaaactgacatttgactggaaatttggcgcccgttgccgcttcgtaaatgttctcatccatcaatttacgggccaatccgaagtcagccactttgacctcgggcacgccggaaattttgtcgcccaccaaaacattacgagcggccaaatcgcggtggaccagctttctgctttccaaatacatcataccactcgcaatctgtgaatgaagaaatgaacaaacagttaagtgaaaaactagtcagatggagtcaaattaatcaaaaaaaaaaatcgggtgcattataaacctttcgccctccatgtcattttccattctagttttgttaattttttttaatatttttcaaaaaaaaaaattcgggtgggcgaggggagagttcaaacccccctttttttacacttcggtcccaaaactgtttttcccggccagtgtaatatttttttaacaagccatcacaaccacttaaattgttaagcgccataaaaaacatgtcaaatcaattgcaacacaataattaattaatgacctgggctgccatgtcgacaagtgcatgcaagcgcaaactgttgttggtatcacgcagatactccaacaaactgccgtttcgcatatattcagtgacaatataatactggaaaatttgttttttagcccatttatgcccattcaaatcatcacaaaattaccggttctcccttagtgcacacggcataaaggcggacaagttttggatggttgcattgcttcatgatttgtgcttcgcttaaatgttttgggaaaacggttcaaaaatttgatacaaaaaaaacagtctctattacgggaaactcgtaaattt

SEQ ID NO: 4798 - DNA, 817 bp, Heterodera glycines
tttgggatgacgcagcccccaccagtcgaaattgctaaatgggaaaaatacttttaaaagtatcaacaaaacaggaaatttaaaaatgttctaataaaaaaatttttttatgaaaaacaaaaaaattccgtaaaattttcagtgtcttttttcaaaattttatgctgaatttaccgtttgtcaaaaaaaagaaaataatgcctttcatccaaaagaaccatgatgtctccttttgcaaaacacacatcgccttccacatggttctggtactcgtacattgcgatcacgcgatgttgcgctaaaaattgaatgtctatgtatctgttacaaaaaatcaggaaatcgaaatatgaatgccactccgtttggacaatttaatctattttttaggtccacaaattgagtgggttttactgattaaaaaaaaaaattttgtgcttactgtggtcaactacaggcggcagggctgcccttcgaacatcaacaaccgtcgccatggccgtcgttgcgctggtggcaccaggactaccaattggtgccaatgccggggatttaccagcaacaccagcaccgccatggccatgatggtgcggatgataattgacgggataatgcattgggtatgcatgatgatgaggatgatgctgattgtgatgatgatgatgatgttgctgactgctgttgttgttgttgccctgttggtgatgcatcatttcaaccgatgaaggctgatacacataacgaacagctgaacagacaaaaattggataaattcactatttgaaaaaaagaactgaaagcagtaattgtaagagcc

SEQ ID NO: 4799 - DNA, 5139 bp, Heterodera glycines
accttgttgttgccgggatggcaatgtccacaaatttcagcggcgagtccgtgttggccaccgcaatcaccggcgtgttcacgtaggacgcctcacggaccatctggtggtccaactgcgggtcggacaccacgagcagacgcggttcctgtacaaacaaatggttgtaaaccaaggcttttatgaagtgcaaaattttgggtacttttccgtttggctgccccacatttatttaaattaaaaacgttaaaaagcgcgatgaattttcaaaaacggcgcttcagctatttgggaatcataaaagcaacaatttggcccaaagtataatcgaatggatcagcatggcggttgacgttttttaaactaaataaatgtggggcccccgaacggaaaataccaaattgtgtttaaaaatctttttgatagaagcaattaaaaaccttgaaattcttttggatttggttggtcaaagagccgggcgtgaaacggccaacgattggcgtggcaccgatgtgagcggcgaactgaaacatgaagaaaacttattatagaaaggttattgccatcgattcagttaaacaaaaaagagggacccgcttcaactctgtgttttcatttaccttggaaaaccaaactaaacttttccatgtaatgcatttgtaacgggttaaccgctgcatattaaggggaccgaaataaaaaaaaaaatcacaatcagcacgaccccggaaccatggaataaggaaaaccttgagcacagcgcgttgggcgtacggctgggcagagacaaccacacatcggacggattttcaatggccgcgatggcacgggcggcgaacaacagtttctcccacgttttgcgaatgttgatgatgtgaatgccttaacgcggtgggtggtttatttttctaaaaatttataagattttgtgctcggcatggcaattgtaaagaatgggggtccctaatttaacttttttttattttaggcttaaaatcagtttccggtggttttcgagggttctgattacgaatctggactcgggtttgctcaattccgaaccccggacccgaattggaacaaaaaatttaaatatttttttttcaaatacgcgttaaaatcgatctaattttggcgtaaattgcatattttttatgcaattaatagttgaagcattattttgatcagaataaatagttgttaaatgaattcgaagcttttacccagaaaaatgtacctttcgaaaaaaaattccaactttttatcatgggtcgaaaatgaaaaatttactggttttgaatatgaaaaaaacggcaagttttgctttgcattacattttaaaaaaatttattgtgcaagtgaaaaaataaaccgtctgatcgacgcttccacacataatgctccatttggtagtccatcttttttggtgccgatgtgcgattcgcacaacaaaaatttcattgcgtcatcgtccgtcagtttgaagacgtcaagactgcttgacatgttgaaggcagaaaaataatacgtttattaatctttaaaaacggttattgttaggactaaactcataaaattgggcgaatcggactcatcgggggaaacgatttgcgagaaatttggatatcagagaagacattatggggacacgttcaggaaagaggccaaaataaacagggaatttgggaaagaagctgacgtcaaaactacaaaaatctatgatttcatcaatgattttcatcttgattttttcagatttttcgaaaaagaaataacgagtcttatcatatatcaatttaacgccagattcatgatcagctcctaaaactacactagaaaagtgctttcctttgccgggaccatgacattttcataggggtagcaaaaccggtacttatgtggtttacagaccataaaaaaaaatttttttttaacacattaaaatttcggaaccaatttttaaaacgaaacagtgcacaaaaagagaggggggggggtagaagacgagagtaattttttgaaaggatcgcaccccatcgaatatttccttatttctttttaataactgtccaaaggtgactgcgtcattgattctcttctgtagtccttaaggtacttggactttccacagtaagatgtggtacaaattttgttttttgtcgaaaattaaatttcggtttttttcgagtagggttcgttgttcgaattgtttggcactccattttcggcacttttcatcctgaaaaagggcaagcgcgcccctaattctatttttccaacacatttcaaacctttttacatcgattctgactgtttttaagcatttttgagtttggggcctatgatcaatatttaccaaaatcactttcgagagaattttttgaaaatttttaggcaatatatttgtttttaaatttatttttaaaattttctttttgtaaaacagttaaaataacaattattaatgggatatgaacatatcactggaggaaatgcgaattccgttagaaaattatagcactcattttttcgaaaatttcaaaaaccaaataaatgggaagggagcaagcgatgccaacgggactgcagaagaaaaatgtgctaacagaatttatccaacagacccaattcaagggttttttgtgaaaataaaacaaattaacaggatttagtaagtaatatagcagttccgactggcaccccactaggaaaatttgggttttcatgaaatttataacaaattttgcaccaaaaatgggtaattttatggatgataaattaatttaaggaataaaaattatttagataaaaaataaattatggaaaatgctcagtgaaaattcggcagtagaaaatgcagcagtaacactgtatttcgaaataattttgtttagaataaatattatagtaaaaaggtcaaattatataagaatagcgttcagtctcttttcgtctaaccatccctccctttttgtgcactatttcattttcaaaattgggaacatttttttgtttgtttttttgaaactaaaatgtaaaaaatttactaaaatatttttgattttaaataatacttctgttccgaattttttgactctaagaaattaaactgtaatttttagaacaaataattctctgaagttttgaacttggcttaaccatgtttttaagtcccactgtgaggaagggacagttccaaaatttgtgccacatttcactgtggaaagtccaagtaccttaactggacaattacttgtcaacgaacacagtcgcctctggcctcttatggaacagaaaagggtaaatatcagatggggtgcgtcccttcctaaaaagttctcttttcgtctaaccatccctccctttttgtgcactatttcattttcaaaattgggaacatttttttgtttgtttttttgaaactaaaatgtaaaaaatttactaaaattatttttgattttaaataatgcataacatatatataaaaagctgaaacaaaactgctctaatggatatcgattttgtcttgcctgttaaatcagggctcccatcgtccatgctccgtttccaaggacgggtatgccgatttgcaaggacatagtggggaaaattcatgaaatccaaggacatttaaaatttttattatatgcaatgaaaaatggttaaaatttattaatggcttgtatttttcaattttttccaacattttttgttttcactgatcattttcctcatttgcgacgacttttttctgctttaaaaacgctttttttcggcgcgctttttccaaaaatttcgggaaaaagggggggggggggggtctggcggtgccgacaggcgccgccgcggaaaaaattttggaaatttgaatttttttttaaatttttaaaatttttttgaatttttaaaatttcccggttggtcccggttcccggtttttcttgcggtcccggtcccgaacaaaaatcgaggtcccggtcccggcttctcaggtcccggcaagtcccgttcccggttttggcaaaaattcccggtcccgtggcactctagaacaaaataatgctaaatccccaaataagaacagatccaatccctggtttatgccgcccaccttttgttggagcggcgcacaaaaggtaaaagaacaaacatttttcaggggtgtatttctccgtacttagaattgccgatacattccatcgaaatccctttatttgtttgatttcgctgctccgttcgctcaaaaaaatctcttgcgaaaattccgccaatttgccaatttccatcgcaattttcccgtttgttttgtttggatttgaataatccaatttctccgtatttttttccttcacaattacatcgatggccaatgtcactttgtcctcttctttattgtaatgtcctttgctcgggtccatcaattccttatatgtttttatacgtaaaaaggtttaatgaaagttcaccgaaaaagtgatgaatttgaagaatcccctaacagatgctttgttgttaaaaatacgattattgaatttccccattaaatcctccgtttcgctattttgagaaacaatttgaaatgtagctgaacacaagcagttccaattttgatcttaattgtaattatataaccaattaacattttaattatcactaattatcccaccttcccttggggcattgcatcgaaggaaaaagcccaaacttttttctgtgctgtctttcttcatatttatcaatgtcaatattttccgggtccattaattgcttaattaccgactatttaaaaggcattccaaatttgccgctcacttcaaaagtgatgaaaccggggaaaccgaacgtgcccattttaatgctaaaaaagtggtcattgcgcagggctcccatccgtccttgaatggcaaggacgtccttgaaattgggccctctttcttgaaaataaaaaatgtccttggatgccaaggacgtccttgaaaatgaacatttagaaaagttttaaaaaaattcaaagaaaatgacacatacaaacatacatacacacactcaactttattatataagattattattattaatatggtattaggaatctttcttgaatgaaatgtaatttttttctcatgattgagaattttt

SEQ ID NO: 4800 - DNA, 1805 bp, Heterodera glycines
agccatcaaatgagcggtttaatttaaaattttgcgaaatcaatcaaaaaaatcccttttgtacaatttttatggccaaattgagatgtccgtccgccacttcaaacacaaagtcaccatattcattcgtccaccatctttgaattgtgatgacacaaagtcagcgccgagtcacttaaaacggatgaaaatgattcattcattcattttgggccgatggttttagccacaaaattcgcgccgcattttatttgcggtttcgctgtccgcagccgatgctaatgcccggcccgcggcggggggagggggtggactgcggacactcttaggccgccaaaagttttgcttcgggtgttggaccaacggattttttttgaaatggcaaacgggggaaagcaagcgaattgatggaccgatcgttttatggaagaggaggtgatgatgatgaatttgctggctgatgtgatgaataatcggctggtgagaccccccgggggggggggggacgactgtcatcaaagcaaaagcacacatttttatatttatttgaattggggggcgatggagatgagtcactcaccgccgtcggtccatcgatggccaattgggaaaccatcaaaacacagaagagacaaaatgtagtaacataaagccaaagatgggggaaaaggagtcactaaaagttcgatcagatactttctttctttctgctgtacgaacgttggggagggagctgaagcgggcagagattgggagggatttatgagactgatcaaagagataaatgttgaattttaaatttaaattttatttttaatggtgagaaggagttgagagcattgaattttatgctttgtggtgaaatgtccagagaaggctttccaaaggtgaaaatattaagattatctttgctttgggttgagattggaattttaaaaataaattttaaattaaaatcatttaaaataaagataaagtctgaaacataagctaaaatccaataatttagacaaaaatttagtgcagggttgccattcgtccttgaatggcaaggacgtccttgaaattgggccctctttcttgaaaataaaaaatgtccttggatgccaaggacgtccttgaaaatgaacatttagaaaagttttaaaaaaattcaaagaaatttgagaaatctttgtaattttcaacgatattttgattatattatggcattatgtcaatttttttgctcatagttgagaattattatttattattattattaatatggtattaggaatctttcttgaataaaatgtaatttttttctcatgattgagaattttttgaaattttattgcataaagtcactatttttcttaaaaaattagcccaaaatcgcaaattttggtcatttttggacaaaaacctgtaaacaaatcgcattaaaaattacaaatttttttctcggcgggcggcgctttttcgggacccgcgaccccccccccccccctgttccacaaaatttttggaaaaagcgcgccgcaaaaaaagcgtttttaaagcagaaaaaaggcgtcgcaaattaggaaaatgatcagtgaaaactagtggtacgggaccgggaattttgggaaaaaccgtgaccggtaattctcgcccagacccggtcccgtcccgacacaccgtagtgaaaacaaaaaaattggaaaaaattcattccggtgaaaaatacaagccatttgaataaattttaaccatttttcattgcatataataaaaattttaaatgtccttggatttcatgaattttccccactatgtcc

SEQ ID NO: 4801 - DNA, 1331 bp, Heterodera glycines
aaatattattattattatcattattattaaatgaatgaataaaatgtaactttgtgggtgtacgattttttggaatgttaacaaaaacacggtttttgagaagaattaaatttattttgttaaaaatgggattaaaatattttattgttgtttaattaaaaaatgattatcatatattaattaaattagccttgtaaaccaattaattaatatatgaattacatcgattgtgatttatttaaaaaccgttttggtaaattcttacttagtccatgagataaaaaaaatgaattaaaatttataattttaattcaattaatagttaggacaatatatattagtaaattattaggtaaaataaaataattaaaataaatgaataaaattttttattcagttacttcgagctatgaatattaattaaaatatcaaaaataaaaaattgccataataaatttaagaattttacaaatattatttgaataattaaggtttttattgaaataaaataaatatacgaaaatttatttgtcgttttttaagatgacagaaaatgagtcagaaatacataagaaaacaatgtgaaaaaaaagatgacgcattttttgctgcttcaaaaagtgatggcgaaacaggccaaaaagcaaacaaaacataaaaaatgaaggaacaaacggaaaaaaataagttgggccaaattgaaaaaattaactcacaaaaagcacaaaattaatcttattggcaaaaaaatttattaaaaaaatatagcaaatatttattaaattttttgaagtatttgtttttggggaaatgaaataaaaattttgcgaggaaaataattccaattttacatatttttgtggtaatccgacgatttagcgggggaagtaaaagctaatgaatgacattggccgattgattgattgattaggttggaattggaatatgattaacagaaattgcccgtttcgtgtgttaaagccccgagcataaaaatgggcgaatgctttgtgtttgtggccatatgattgctgatgggttgggtggactcataagcacgtgattttgttgaaagccaaaaatgcaaaaatgtaaaaagaaactagtaaaaataaaaaatggaaaatgtaaaaatattttaaaaaggtaaattttttcgtacatttcaaaaagtttgaccattttctctcctgcgaattttaggcaaaaagaaaatcttgttgacgataaaccagggctcggatctgtcctgatttgtcagatttgtttctgatttggaggtagcgaccaaagttgtcctgatttcttaaataaactcaaaccatttttga

SEQ ID NO: 4802 - DNA, 3756 bp, Heterodera glycines
ttttctcaatttcatttttcattttcccgttctccgcttcgatcttcgctagcagtgcattcgtttcctgctgcttcaacttttcttgaagtcccttctaaatttaattaattaattaatttttttaaataattatcaattcccatttaattatgaaaaattactctttctgtaataaaactcacatttttgagctccaatttggtatttttcaatatcaattccattttttcaaatttttctctaagttcctaaaaataaaatattgcattaaaaattatattataattataattttaataaattataaatatttccaaatttctatgttttgttcaccttcatttgttgcccatcagtgaatgattcaccgtttgtcttaacaacagtttcttccttcaaaatactcaattcatcataattcatttctaaaaagaaaagcatttttatttcatttatttatttttaattatattaattttctactgtttcccaaattttattttctaccgtttccccttttctcgttatcacaatcatcagacgaaaaatcgtcactatttgttgaatcgtttgaaattgacatttccttctgttcaatttttttataattgtcaaattgggtttgatgatgagaaatggagagaagtttgagtactgtttgtatgtaacaagccttttgaaatttttttggtatctattgcactttatgagtccaatcaattaacaaacaacacctgtggttttttagaataattttgttttgtttatgttcgaacaaaccctatattttaggtatcattcgaaagcacaaagtccgaataatgtaataatacgagaaaacaagataattctaacagttaattacaaacgaaaatatcaacaattttttaattaatcaaatctttttttgacatggcctaaacgctaaaattttatatatttaaacttctttaggctttctactttcgaatgacatcaaaaagatagggtttgttcaaacatgaacaaaattattttataaaaaccaggtattgttaattgattggattcattaaatacctttggtttcataaaaagtcgattggactcataaagtgcaatagagccattttttggacaaataaagtgaatttttaattaaaaaataaataataataataataaagaaatatgatattttaaaaattgtagtaataaatgaacatttgctgactgctgttgcttatgttaatgtatttatcgaggtcaatcaacaataatttagggcaaaatgatgactcaacaattggagaagagcaaaacgaaaatattataattgactcatttatccattcatttttgcatttctgcattattaatagggctgctaattttatgtaagaatatttgcgaattatgtaaataaaatatgtataaaaaatgctaaaatatgtacaaaaatcctcaatcagtgaatgattcaccgtttgtcttaacaacagtttcttccttcaaaatactcaattcatcataattcatttctaaaaagaaaagcatttttatttcattttatttatttttaattatattaattttctactgtttcccaaattttattttctaccgtttccccttttctcattatcacaatcatcagacgaaaaatcttcactatttgttgaatctgttgaaattgaaattttcttctcttcagattttttataactgtcaaattggatttgataatgggatttgattaagtttggatattagtagatatagcgcgcacactttactgcccctacttgactttttttgctgcaccttttgctgcacaacatttggctgcccctatatgtttttgctgctgctggtgatggtggtggcggtgggggggggttgatttggacgaattttcgctgcccctattcgacttttttatcaacattgagcgggggcaggggggggggggggagagagaggcgccggggggcagaggacccccggtgtgtttagtcaatgctttcgcgccctgctgttcacttttatctgctgcgtttagaagagaaacaagtggtcgaacgggagcacttcccgtcgcaattgagggacagagcgagaggcgtcaagaaaatgatcggaatttgccttttcttcccaattttctctatttttcaccttttttatcccaattttctcaatattttgctatcgtaattttattcaatttgtcgtatttcaattttgaccctttttctcccttttttcacatctgcgtctgctcttacccttttgccccgccgctttgccatttatttttgaattcacctttgtcttcattttggccgacacttcccctccggccttctccgattcttttccgatttttccccatttttctctttgttttgttaattcaaactttggaccattcacatttttccattcacaatgtttacgcattttgctatgccagggagccatcctctccccggcctttgactctccccttttttcttatcgcatcgttcattttcgctcatttgtccaatttgcatttatctgggcctaaccccggggggaaaatatttaccaatcgcccctcccccccccttttttcatcactaatttgtccgtcacatcattcattcgttcacttttcttcctcactcccctctagggagaaaaagttgttctttttgccttaatctctcaccacaccactcaatcacgcattcactgttaatccccatttttgccgtttgtcacatttgcccccccccctctcacgaggtttaattacccaagtttgagcgcttcttcaataaactatttttgtcattttgtgttcggcattttcgggcgggtcagcgatcaacagggagccgtctccctattagcgaatcatttctccggcccctttgcctgggcatttgcggagtgttgcggcaagtcaaaacgggactcctacccctcaggagtgcccattccaatcgatccccgtccccttttctcaacccccccccccggcggtcggacagcgactcggacggcgagtgaaaacgggagcgcaactcccggccgcagcgattgaccaggagtcggcacgccgaaagtgctgacggaagagctcggacttggggagtaagcctgggagcaccggtctctccccaaatttgatcggtggtgccgttaatcgtgtaaacagcccatctcttgtttgccttccatcccttttctccattccacccccttgggacaggaccaaactgcagcggagagagagagagagagaagaccaagttttttgaggagtggagtggagcagagggaagggagaaactccctgccaaaccgggagagagttttcgccacaaagcgaaagcgaaacgccaaaaaaggcgaaaagcgaaacctaggcccatcctgatatacaccccctaaaaatgacttgaaaaaatttttagaaatatgcccctaagaattgaaaaattttcttaaaagctgatcaccaaaaattaatttttttcatgataaagttttatatttaaaaattctccttattcgaaaaaattaaaaatatttaataatcatttaaataaccaaaattaagttttttggttatgttttacttgttttgcttcctaaaaagccttaaaaaatttttaaatgctttttttcttgcctttttcgggattttcgtgcctgttcatgcttttttttcaatttttggtgcctattatagtgcatttttcgcgattttcatgccttttt

SEQ ID NO: 4803 - DNA, 3154 bp, Heterodera glycines
cgcagcgattgacccggagtcggcacgccgaaagtgccctactaagagctcggacttggggagtaagcctggggagcaccgcctctctccccaaatttgatcggtggtgccgttaatcataaacagcccatctcttgtttgccttccatcccttttctccattccacccccttgggacaggaccaaacggccgcggagagagagagagagaggagaccaagtttttgagtagtgaattggagccaagggaagggagaaactccctgccaaatcgggaaggagtttttgccacataataaaattttaataaaaagatcgcccctgaaaaattcttcacttttatcgaaatttttttaaagtaatgaaatttaaaaaaactttcaacagcggtgcctatcgtcactggcaccgccggcaaaattacctaaaatttttaaaaattctacaaaaaatcgtttaaaatgttagagatccaaattttggcagccatttgttgtgcttcttttagcagcatatacatttgtttaaatgaacttatcaattttaaattttgtgtttgccatcttcagctttgccctcgtcggatttgcctataaaaaagctccgttcacagaacagtccaccttcaacaagttaccgaatttgaggtcaaaccagaggccacgaatggaaaacatcgggtcgtatttgaatgcagcaatttctttggggtaactaaaaatgaaaaatttaaaaaaaatttaaaatggaatttgaacccagttttttgaatcaaatagtcgaggcaaagttcgaaggtttggtcttccattgttggcgacacgtactctgaaaaattgacaaaatttttaccatttttggaaatactgcggttttcccctccattcctcgaaaaataaaattcaaattaagaatgcacacccattccgatcaattaattccttgtccaagacctaattcaaattaaaaactaatttttcgatttttgggggagggggattcccgaatagtgggtctttcggcgccagtccaagtttttgggctataccttttttaaatttcaactaaatcagacaatcatggtatcattcgaaagcccttacatactttattagccttaaaaaaaattctcaagcaatggaaaagttattagcagaaagaaaaacaggggcctgttccagaggttcgacatggaattttaaaattaaaaaaggtcttacccgccaatgtatagtccatgtcaaatccaaacaatttgatgtcctgaaggtgcaccgtccggttgacgaaaatcgttccctcgctgtgactcatttttgtcacggaatttgggatttgcacaataattaatttgtatctaattaattaaatgatttgtaaataataattaatttccataaaaatatttcctggctttggtataaatgtaataaaccatctcaaaagtgtgatccaattgttggccatttgagtgcaaattggtttttcaaaatttgtacaaccatcactatttttggtcaaaaaagaaattcaggacattttgaggtctctgaccacaaatatgtcgtctgttttgtcctatttcggcttgaatataacaaaaataaataaatctaacgctctaaaaatatggcgctttatttaaaattggccaattttgaagtttcaaatcccttttttcaaaaataaacataaaccgcaattggtgggatatacaattgtttatctgacatccggaaaacaaatgatgatttttttcaattttacctccttttaagtcgcgggttgacttttcaacacaacttttggttccaaattgagttcagtttcaagagtttttccgaaaaatgatgccatttcctgttcaatgacttcgatactcctgaaaacagcctttttttaacccaacaaattctttcatttttgcagcaaaagattgcgttgttttcgccaccgaaaacaaacactccgtcctcacacagcccgtcaacaaaatctccaagttgtccgaccatattgcaaaaaattggggggggggggggtcttcagcttacaattagattgattttagattttctggaggcgggctggtggtaaggttcgccccaattaaaaaatttcctaatattcttttgatcagtgaccctgaaaacgcgagaaaactaaaaaaatcaaattctaccacttttccagtaacgccatttgttttcacagctgcactacgccttccattaaaaaaaactataaatttatcgaattgagatttttcaaaaagaaaatgttattgtttttcggaggaaaaacaagctgcttcccatactttctcacatcatgttttttctcccctaaatcagcaggtctgaatgggcttccatcaacaaactgttggtcggctttggtcaaacaatttgtttgccggtgcgaccgaagtgcgacgaatgcgcaaatcgcccgctctgtccatggtcatcaccagcaaatggagcagcaccaaatccgaagagcaagaaaaagagatgacacagagaatgaacgatgaaagaacggcatttgtgccaccaaaattcacttacaaattaaaactgatcctcggaggccaaaattttaaatcgacttttttttgccacccgtcatagatttcaatatgtggaattagatttcgacctggatttaggtccagtccattttttttgacaacttggatttttgtccaaaaaaaatgttaatattggttaattaaacaaaggctctcaagagcatcggtaattgattttattgactgacccttcaatttctaaaatttttatcaggaaattttttttattacgtttacacctttaaagagattcaatatgggtcaactccactagtgctgagtcgttataaaagccataaaaagggcgttataaagaaacacatcaaattaaaatttttaacaaaaaaattaccgtaattcttgatatcattcggtagcccggtacttttctgttttgttacccccccccctgaaattttcaaataaaaagtcatttctagggtaatttgtggcgatgatcacgaatatgacgtttatttttcaaaattccgaacccgaattcgaaaaaaatgatctgaattctgaaatcacaggccaaatatatttttagggggtttt

SEQ ID NO: 4804 - DNA, 1324 bp, Heterodera glycines
  unsure (1)..(1324): unsure at all n locations
tgcaggtctcaaaatcaaaaaaattgtgacctttttaaatacgttaagggtactttcctgtttagggattgcaggccaaaaataaaaaaataaacaaaaaaatcaaaaaatgagtgcaaattcacaaagcacatgcagcatttttgtctcttgttcagcagtttatgcgtccatcaatgagtatcctcagtttcttaggccaaaacttttttcttaattggtcattgcctatgttcttgatataaaactaaagttatttgtctattttatgagcacataatttagttatacaaaaactatagactttaagctttcgattgataccaagaatgtagacaatgaccaactaataaaaaagttatggcctaggaaactaaggatggtcattgattagatgcgatgcataaactgaattaggccgcatttttttggtaataaaatctcgtcaatgggtcaacttaagtatatgagttgtgtgcctttttgttgtttttttcaagttttggtgtgcgatcacaaaatagaaaagtactatttggaattttacccataaaaaggcaacattaaaatgtgttttaaatttcaccaaatcgccaggcaacgttttccatgtccacccaattgggcctccgttctccgccccttcgttcagttccaacacgcggacactctccgcctctttgacgagcagtcgccgactgtccaaccattccaacgactccaccgagttcagaaagcgatgagtgagcacatcggccaaagtgacgcgcttctgcggttggtcagcgtccaaaagagctgcaaattatttgagagaattgcatttttaaaaactatgccatgaaaatcagtagtccccaatttgtgagtatatttttggaccacaatcacaaatttgacatacattcagacgaatatgacaaagccaagggcaatttagaataaaaattaaaaattattacaaattcgaataaagtcgcaaaaatcgtgaaagtgtatttttggcttttcgttgacattcaaatgccgaatttgaaatgcgtctgatgaatgagagtcaatttacgagtgccaaaagtaaggaaaagcaaaatgcaaacgcacggggcgtaagcacaagcacggcaagtgcaatgatggaacacattgcgacgatgacgagaagcgctgttgcaatgccacgccaattgcgctcctgcggactggcaacggacaattccttcaattgcggtgattgggaaaatttgtgtttgaggagagtcatttgnggatggaattggaatggaatgtatgnngctctttttttgtttttgttaacagagca

SEQ ID NO: 4805 - DNA, 1275 bp, Heterodera glycines
aaaaaaagcggagaaaagaaaaaggacaaaaaaacacattttatggcgatgaatgccaaattaaaaaaaaaccaaagttgacaccgttcgttcgccccaaaatgttcgatcgatcgatttgccatgcattgccgttcatttgattggttgcgccgtttttgtttgtttgttttttgtgtttgttttgccgtacctcttccccaccggcgtcgccgatgagtccgctgctgctttgcatttccgcgtcctttagtccgcccatttcgctgtttgtggctgctgcagccattcaattgggcgcagagaaaacagtgcacacagaacaaagagatttggattttttggcagaaatttttttattttggcattttattaagcgtggaaaaggtggtccatcgagccgaaagtgacgacggaaattggtgaacacttcggcaccattcggttgcgaaaaggaaaaagaagcaacgggcacacggccaaacggtggccaaacacttcttcccccccccccactcattcaattcattctttcattcaatccacgccttccttctcattgccaaaggccaacagcggcgggtgatgccctcggcgtcgtatcgaccaaaggcggcggcggagtttggcagttaattggccaatgttaacgccgacagagaagaagcgaaaacataaacaaaccacacgtgaaagagggcgaaaagaaagtgagaggagagttagtgagttaacagcggaaaagggggcaaaaggtcgagaggaaaagggaggggggaagagagggagaggaagacgagagagagagaggggggagagagagaaaggaagacgagagataaatggaagagagaaaaagacgagagagagaggggggaggagggggagagagaaggggtgaaagagagtggagaggaagaggagagagacgaaaagggtaagggaacagcagcagcagcaggacaacaggggaaggagcaaaggcaggccatgtttaagaagggtcggacggacgatgccattggcaccgccagaggatggcaaacccccgtgttattttaatctcaaattttcatccggctgaaacagccgaaattgtaggtaaaattacctaattaatgaaaatgggtcggaaagggaaaagcgtcgggggcggggcgcgacggatgttggcgatgttcgtcactccgccaatgtttgtaactctctttttgctaccgatgattccccccttcccccaatttcactgttctgtcgctgttcagttcaccgatc

SEQ ID NO: 4806 - DNA, 1380 bp, Heterodera glycines
acgacagtgcccaccatcgcacaatttcctcgcttgttcgtacacttggatgaccagctcacgggccgacgacaaaatgagggcgtacggacagccccgtttcgacttgaaagcgcattccttcttcagcttcataattctgtcgatgattggcagcaaaaatgccgcacttttcccgctgctcgtctccgcgtgtgccttcacgtcgtagcctaaacaaagttcttcaaaacaacgtaaaaacgccggctaaatgtgtcgcaccgtctcttatcagcggaaaagtgtacgattggatcttccggggcaacacgtacttacaccgattgatgttgtcgactagctttggctccagattgaagtccttccaagtccttaaaacagacgaaattcaacttccattaatcggatgaatcgcttactcatacgatgtgaatttttcattgtgtccaaaaacagccaagtcttcgtcttcgtcacggatgtccacgtagcgttcgctgacgagaaagtcctcttcgtaaaggcactcgatggacctttttttgtaagtgtgtcttggtcggctcagcccttgctctaaatttggttttttagttcgtcataaatgctttagctccattcgttaccatcccgtggaaagcgttcgtctccgccatttgcgaatggtcctcgctgactgtgattcggcggtctttcgccaaattcgggtcgtcctcttacgcctctgccgcgcccgaaacgttctccgccgtctccttcgcttccgcgaccaccgcccctacggtctccgtaactctctcttccgcgtccgttgttttcggcatttggccgggcattgcccaaaccaccattttgacctaaaaatttgggaataaaataaataatgcaaaagaacgacgggggggggggggggaaccttcggagttcatgccacgaccacggccccgtccaccaccacgcaaaatagtgccaatgctcggcggatcattcgaagaattgagttctattagaataaaaatgaccacaattactctcaaatttacgggaatgacagaccaactgtattggcaccatgtccaaaaccgcgacggtctcctggaccgagttctgtgggatgaaattgaaaataatccaaataaccacacttaaataaccgaccaactgcattggcccctcttccaaaaccacaactcgtcgttcctccgcctcctctcgccctgctaccattgaaaacggtcgtcgagtcgaaggtgaccgatttgggtggcgaaatctccgcattcactggtggacgactgatgttgttgttttgtgctggtgctaaccaccaaattatgagtgtttagcactgaaaacgaacctcctcttcccaatccg

SEQ ID NO: 4807 - DNA, 2850 bp, Heterodera glycines
tttatgaaaattgaaacacctacctatgtaatttttttacattacacattcggacacgaacaggaaacaaaacattacgccaatttatcagaataaaatatcaaattaaaattaaaacaaagggagtcaagattttcacataaaattttcttcgacataacatacctacctacctatgtatggatttatcagtttttacttcaactgaattcaatagaaatatgtatatctgtcattttaatatgtcccaaaaaggggaggggttgttgttatgaacgaatgaaggatgattcttagattcgttgaattcatacaaagaaatccaaattttgtgtgtttttatatttcgtgtcaagttaaaagaattccaaagatggatccacctccctcacacccaaaaaatcagcaaacccagtccgccaacgctttctccgcaaatgctgcaccggctccactgctgacgtatgggagaggcatttttgggtttatttttgtgcgtaaaattggatttgcatccaatttcagcacatcgtccgcctctggtgtccaaccgctgcttttgccgtcctcttcaaccggcgccggtgttccttatcaccagtgcgtccgccacggctttgacagttatccttcgtctgcgaacgaaacggtggcaatgtacgggcagccaggggccggtgcagcggtgtattcgtcgtttcagcaacaggtcggagcccacaaaattccgctgtcgaaactccgccggacgaaactgaatcaaagtattcaaaaatttttcaaaaaaattcgttggtggaaaactgaatttttttcaaaagttttctaaggttttttcttggaaataagtgaaaattttttgtctcggtggagtttcgtcggcggagtgcgttttgggggtaccggcaacaggtgtatggagaatggtagaacgatgttgaccccttaccgaaaaatttatctgtttttttgtccacaatgtgttaggcatattgtctaccacatttttttccctaatgtgtcaattttcatcggttggttttcagcacgccgaagttgtcgatcagcagtgctaccaacaacagtccgctgattctgtgggttacggtccgttggtgccggccgccttcgtgtcagtccctcttgaacaacagcagcaggcatcacaaaagggtgccgtcacttcgtcggcggcaaaaccgctgccccaacaacactttgtgcccccgccgccctccttttacacggccggcaaccgttcgtccaacgccgccgccgccgcactgcttggcgttgtgccaccgcctccgatgcttccgccgtcggtcggcggctcggcggtggttggcccaccgccgcccaccgcttacgcgacacagcagcaacagtcgatcaatgccgtcacttcgtcatcggcaaaactgctgccccagcagcccccgcagcctttttacgcggccggcaactattcgtccaaagccgccgccgcttcaatgtttggcgttatgccacgacctccgatgctttgcccgtggggcggcggctcagcggtgattggcccaccgttgcccgctgcttacgcggcacaacagcaacagccgatcgaccccatgccgtcattatcgtcgacattggattatggccaacagcagcactcatcattccaacaccagcaggtaaaaaacttgtgtttgagagaggaggtggtggatgggtagccccaatcaaagaatattaatattttagatggtgggtcccacttcatcaacggcagatttgcaccaaaagctgttcgttccgactgccgaagatctttctgacagcatgatatacccatttgatgtgacgcatttgttctgcagagaaaaaacttcggagattttggacccccaggttagcaaatacctaatcattaagagaggagggggtggatgggtagcaccactcaaggaatattaatatttagatggcgggccccacttcatcaacggcagatttgaacccaacgttgttcgttccgactgccaaagttttggaccccgaattggttagcaaataatcattaatttgaattagggaagttacttagacacaggagggcattagttttgcatattcaaaaatgaagcctcttaatttttgtgagtgaaattatggatgacttataaaactgtatcaaaattaaatggttgtggtactcatttgggtggtgcagaagatgacccatattgatttgttcaacaaaagtaatggtcattttcgatttgcatctctttatatcatggaaatgttttctctaaatttgcttttttccttcccaatctccgctcttttcggttttagaatgtattaccctaaaatgattaggcttccgtctgaacttatttccgaattggcgagtgctcttccccttgacccccgctgggccgtcatccgtgtgtcctcggcctttgattttttcgtttatacaaaacagataatttataggaaaataaatagccaggaatttaaatttgtcttacattattttaattgttcccacttttagttggatgaagggcttaaaaaagcaaagcaacaagtttcgtcagttgccaatgctcagtccagtgacgaacaacgacgaaaactgctcacaggttggaaccatcgatgttattttgtatagcctaatagaggctttaccattttgtgttgttgactttatctggtaaaagtcggcatttgttttagaaatcgcggcgtttttcaatgacaaaacgtcagaggctgaagtgattttaagcaccgcagtgtcaacggatgtgaaatgatttaaatgtgtgtgcacgcattctttacactcttttg

SEQ ID NO: 4808 - DNA, 1646 bp, Heterodera glycines
taccaaaacttttttggaaagttttgggttttccggattgtatactgtcaccttttttgtgagcagtagtttgtgctgcgcacgtgtgtccatctctgttgccgttcgttttgtaatgatttttaggcggtgtggggtgattggtggctgattatgggcgggttggtaaactgactagtggactgacaatttaagggtgaacgccgtggctttaaatagtgagatttttgaggcgttcgccctttaatcgaaaacagatcaaaaaaacagttgctaagtgctaattgttgccttttgatcggcaattacgtgggcggcaattaaatgggggagggggctgttacatgaaattggtgcgatcaatatatttgggtgaaatttgggataacaaaaagtgcaaagcaattaatgatcattaatttcttcccgatcgtcccccctttgatcacttgtcccttgtgatcacttttgttccctttgttgctctcaacaacttttcacttttcctctttgttcgtcagtacttgtggaattgcacaatacttttgtcgacagttccttcacaatttttgcacatttgctgacaattccttcttctcgccgtttgccgacaattccttcgcaactcctcgccgtctgctgacaattccttcgcaattcctcgccgtctgctgcagcccaagtttaactttgatactgaatttgttattccaattagcgaggtaaacaaaatccgactgtaatcaccgtgacttgtactccaaaagtttactccaatcacgaattaaaaatagaataatgttttttctgctaaaacattgtgataatttagggagaaaatttttcggatttaattagacaaatatttggtacttaatgaaagaagcatttggtgaatttggcttaatcgaatgaatgaatgtggggggaattttggcctaggactccaactgatcacgagccccaactgccccgatctatcgtaaataattcctctcgctcccgggagtctttaatttgctaattaattaattgcttttctctttcgtcgacttaatcgtttttctcgaaattcctttggcaacattagctgctttttgtttctttacattcatttgtttcattactaatcatatgtcacttttcctccgttttctgcccaacttccttgtccaattagcccttaacgcaacagctggccaggctgtttgcgttcagccaaagttcggccaacaaccactccatcgctcattcattaattcattaaacatctgattaacaattcgggagggccaaagttaagcccgctcccgtttctctctcgtgatcaagccaatttcgtctttttctatttctgcctattaatttcgttttgtcccccttaatttgattggaattcgccgccgtcgacgaaaatgctgacacctgttggttctctcactttggccagcagacgccgccattctcaattttgcccgcttttgttcgagcggaccggagggaggggggggggggtggtgaacaccattgaaacgggagaagcaaaagaatgagagacagcgagagagtgaacatgttgagcgttacaaaatttgttgatttgactttttgttttgggacggagcaaatttaaataaattttctat

SEQ ID NO: 4809 - DNA, 3877 bp, Heterodera glycines
attaaacgagtccaaagtgtatattatttttaattattgtgatttttttaacacagcaatcgattgactttccaaggccaatttcagaaattagcccaccttattttccaatgatcgccaaatccaaaaggtgttccgcttttttttttttttgaatggtccgaacaggacgaatttgactgtccacggcaaatgagcgttagccacgtgttgcgtttgtccggttgtgtcgaaggcaccgctcagccacctgttataactgtgaaatttagttttggtttctcaaaacaccaaatttatatttttgccgggttttctggcacttttcgttttttcctcttttgttcgtcagtacttgtgggattccgcagtacctttgccaacagttctttctcaatttctcaccttttgctgacaaattccttcacaatttctcgccgtttgttgacaattccttcgcaattcctcgccgtctgctgccgcccaagtttaactttgatacgtgacttgtactacaaaagttgctccaatcacgaattcaaaatagaataatgtttttctgctaaaacattgtgataatttagggagaaaacttttcggatttaattagacaaatatttagcgcttaatgaaagaggaatttggtgtttcggctaatcgaatgaatgaatgaatgaatgtggggaggaattttggcctaggactccaactgatcacgagccccaactgccccgatctgtcgtcaacaaattttcttctcgctcccgggagtctttaatttgctaattaattaattgcttttctcttttgtcgacttaattgtttttctcggaattcctttggcaactttagctgctttgtgtttcttttcattcctttgtttcatcacaaatcatttgtcactttttcctccgttttctgcccaatttccttgtccaattagcccttaacgcaacaactggccaggctgtttgcgttcagccaaagttcggccaacaaccactccatcgctcattcattaattcattaaacatctgattaacaattcgggaaggccaaagttaagcccgctctcgtttctctctcgtgattaagctaatttcgtctttttccattttctgccaattaatttcgttatgtcccccttaatttgattggaattcgccgtcgtcgacgaaaatgctgacacctgttgattctctcactttggccagcagacgccgccattcccaattttgcccgcttttgttcgagcggaccggaggggggggggggtgaaaaccattgaaacgggagaagcaaaagaatgagagacagcgagagagtgaacatttgaacgttacaaaatttgttgaattgactttttgtttggggtggagcaaatttaaatcaactttctataggcggagaaatggccaaacattaaattggcagtttattttctttaaaaaaacagtttttcattcctgacaatttgtaccctttttattctttctttattttatttccaaactttttaggcatttgatccaaaaaaatgtgggagcttaaagtaaactgcccaatttcttgtcccgcttctcatttttgttgggagccagtcgattatacggcgcccaccatttgtcttgccgggggcatcaatcccaattccttcctaaatcatttgtcgctaggcgaaaacaacgtcattctcgcccttcttcttgtcatggcggggggaatagcactcggatggatttgctgtctcttcttgatctgctgcttccccacttgccttcgtccaattcgtcgtcgtccgtcaaagagccgaaaagagtccgcttccgtcaaagatggtcatcgcactcctcctgtcatccgcactccgcttgttgtccatgcttcgcgtgcttacactgccgttccgtttgttgagcgcgaatctgccgtctgaatgtgagttttttttgccctaaaaccgagtcataaaccctttcttcaaactctttttctcattttcccattttgaaatttcttgatttactttccatttattttgcctctgatcacataatttttctcagatcaaatcagtcacatcacttaccgtatttcctcgattataagccccggggcttctattgttcaacccccctccaaagggggcttatattcgagggggggggcttccaatcgagggggggcttttattgttcaacccctttccctatataaattcttaaaattttttgctttctgcataatggtacaatttaaatcttaatctaaatttttgaattgaaaagatttttcattttttggcccttggaaatttaggcgaatgtttgaaaattcataattcacttctaaatgaatcaataaagtgcaaaaaagcattaaaaatagagaaaaatctggagcattttatacttttttagaatattctatcttcaaaatgaagaagttattacataaattttggaaaaattcgttttttgagaaaaaaattaatagcgctgttctgaaaaggttttttgaaaaacacgaaattcttcctctataagcttctgtttattctatatttttataagacttttgaaaaaaagtacaaaaataaactgattttggaattcgggatcatagattgaagcaaatggtttttttgggccatgggttcagatccacttgcctgtaaaaatgttttttagggtttttgggaccactaatcaagaacttggcatccattttgcccaattccaaagccttgatccgaactcgaaaccccaaaaataattttataaatgttgcaggcatgtggatttgaacccatggccaaaaaccccatttttaacaaaacaaaaaatatattgggtataatatttctatatttgcttgaaaattttttagtgattttcatcaaaatcttttccagtgcaatttattaacagaaattttttctaagctattgcttcgctattagacaatttccaaaaaagttatacatgaaaattgcgaaaagtcgaaaattttgaagttttttcgtaataaaattattccaggcttgaaaatcttttcgcttttggtaaggctaatagagcatgttaagagctttcgagtgataccaacaatgttgtatttggatgtcaaagaaaaaagctatcgtggaaaaagagctggcgccgaaacgcaagcgccgaaacgcgtgggtcccgtttgtacatttagtctttctaaaatattttatgaattttaaaaaaatactattttttcagaaaatttttgtgttttaaaagtatttaaaataacaaataaatattataaaattatccataaaaagcgacgaagaaattgatgcagaagtttcctaatattttttttgttaatgttttattaaaacaaattgttcaatagtttttgcacgtttctgacttcaaaagttttgaaaaaaaattttttttgaggggggcttatattcgaagggggcttctactcgaggggggggcttctatttttcaacccccctccaaggggggcttatattcgagggggggcttccattcgagggggggcgtataatcgaggaaatacggtatttgcttttttaaacattgccaagtttatccttttcaacactccgagtgccgtgccatgttgatgaattcgaactgtttttctcataatgttcaattttggatgatttaaagtcgctaagaaaactttaagaacgagaacgaaaatgtccccctgccgtacaaaaacgtctcccttacggaaacaaccataacgaccctgaccgtgcacttccggtttacctcagttgggccccagcatatttttggactatatatatttttttcattagaaactttacgatcttggcatcattagaaagctt

SEQ ID NO: 4810 - DNA, 1067 bp, Heterodera glycines
  unsure (1)..(1067): unsure at all n locations
gggggcgtataatcgaggaaatacggtatttcttattttccaggcctccaaactcctgccaatcaattcgctcattccagcctctgctgtttccgactgaccattccgaccgattttgcctttattcccttcaattcttctccattgatcacttttgccacttttcctttgcatttttttttactccgatttgcttttcattcctttaatccacttttttctttgtttttaactatctctatttttttattactgtaaattaattcactatatttaaatatttcgaaattttatcgttttgaagataatcccgagggcgggacctccatgaaataggcgacgggtccctccccaaaaatcccacggcggcatttgaatatgctctttatttcagtaatgtgcgcacaatacaattatatatgatgagtaaatgatgagtaaatgtgggatggggaagggactcccagttcggtctcgggataattagtgggaggagggagagagattgggggattggctaagccaatccctctcccgaacagaatgaatgctggccagggacgggggacacaaaaaaaggaaaggggcggtacactggtaaatgcctattttgtattttttattttgatcagccataacacgcttcattcccaacaaaaatgaacaaatttggtatctaaaaaaagattttgaaaaggagaatctttttctaagtgaatgctaagcaatttgacatctcagaaaaaagttgtgggagtttcaaattttcattacgttagaactcaagtcctaaactactgttttcaccaaaaatactaaaatttattctttttttatttattctatatgtccaaagtgatcttgtagcctataaaccaaaattgttagaatttgagagtttcatgttttttatgtgttagagacatgaaaatagtacgccaaagcgagagaaaaagaaatgcaaaattttcatcacactataacttaagcaccgagcgtaaaaaattaaaaatcgagcgttaaaagaggttcgtaatttttttctctatcganntatgcaaaatttg

SEQ ID NO: 4811 - DNA, 3553 bp, Heterodera glycines
  unsure (1)..(3553): unsure at all n locations
tttttagcacaaataaatcccaaataaaatncgggcaccctttatttttcctgctgttaaattgggcatcgcgatatataatttgaaatttttgaattttttaaattttgtcttcaattgattctaatgaatacagtaagcgtcgtgtaagcgttgtggacagttcggacgatgactatcgctacggtattttgggcaagtcgctgcgccaattcaacgatggcggggaactgtatttgcatgacaaccatcgacggaatgacacggaaacgagcagcagcagcgctgaaggggcgacgacagtgtcaaatgcaatcggcagaaatggtacggtagcaataaggaacgaatactgtaatttgtttaagtacggtaataacagagaagaaaactgtagtttgttgccaatgtgctgctaaccttttgaaatttataggaaagcatttaaaatttaatgaacaagctacgatggtattgtacaatcagctttttatttttagaaaatcttactgtaatattattttcaaattctaaaattatattttaaaaatcaaaactttagttttattcgtttttttcgaaaaaaaaaattatttttgttgatttggttttggccagatttatttttgttgttaattcgatattttaagaagttttctgaatacatgacccaatggtttacggtaataagtttttctacgtcctactgtatcggtgtattctccgatcgacttccaattttgcctctctatcaaaaatgccatcgttgctcttcacccagtgctggcaacgtcgattgtgccaaaacggaaacggctttcacttcggcccgccggcgactacagcggcggtggtggcatttaccagctgccgcttcaggcgaccacagcggctggcacaaataaagccggcggcggcggatttgacagccgggcacgctcaatccaagtggcagaagagctgcgcagggccgcaattgagggtggcatgcgcagagacgaaggcggcacaatggcggaccatcaggcagcagccgggtgggctttaaaaatttttcgagcggtaccgtactcgtcgtatcgttaggcgacaatggccaacccgtgaaactgtaactttaatagattactgtagcatcaccgtcataatttcttgaaaagtaccaggcccatttggctacgccctcagcgcccttaatcgtttcatattttcttggacaaagtaccaggattctattagatcaatttattaataagtgaaaatctacatgtttctttttctgggagccccaattttttgggagggaaatgtcacactaatttggtctatttaaacatggacagaaaatcgtcgtccgtgaacccatccgctgctgctcgtggcgcttgtgatggcgacacggacggtgacgaggcgcaggacggcgccggggacggcgcagcacgcgcggcggggccaagcggtgggctaagtgccgaggagctcgaagaaatggcaaagctggaagggctcagcaaaggtgcagctggattttggctttggagggataccctcccacgggcggcaataaaaaaaagtttgggcaacgagggataccctcgatttttaataattttcacgaaaaattgataattttgtggattttgagaaaaattaaacacgaattttgtttgggaaattttggtaaggaaggtcttggagggggtagcaactaggaaaatagaaaattttctgcaaaacactaactttcccttaaaaacaacggctgtgagagactaacgtgaatctctaatcataccttaaaatacattctacaaaaatgacgggtacagtatgcaatgtttgctttaggcggtgatcagggcgcactgttgctgcttatgtccaagcaaacgaattgccaaggagtggagcagctggtctcatccggcgcacagttggacatgagcacatccgactcacaggggtgggctgatctggcaattaaagaacattgaaatacgttaaattttaaccttcagaaattttcaaaaataaaaaaaaattctaccaaaagtttaagaaagaaaattttgattttgaaaaaacttagtcattatttataaaaattttaaattgctacaaatatttttcaaactttcttaaaattttattaaaaaaaacttctaagatttttcaaaaaattctaacttttgaagggggaaacgagctgctcccttttgaaacgtaattcagcaagcactcagttttgctgctggttgtttcggcaattctctgatttgacaccaaatttttctgtctttggtttagatttaataatttcagttttttcgtttcatgactccactcgggtccatttggggttaattagggccaatttttgcaaaaatacttctaattgatcaacactgatcataagtgatcggcactgatcagagagactctctgattcttcctaatatgtggtgattgacttcgtcaggtacacgcctcttctgttggcagtccgtgccggccttttggacattgttgatctgatgattgagcggggtgccgacctttacgccaccacaaaggcacttatttataaaatttattttttaaatggcaaataataattcaggatcggttgaccgccgcgcacatttgtgcccgttggggaagcgaagaaatgttgcaaaaattgttggctctaaaagtggacatttcccgaacagccggggtaactttgaacagcattttttttagaaaatttaaaaggacataaaatattttttcaaataatttgaataccgacggaatcgacggttagcattttttagtgggcatattgatcaaattatcagattaaggccataattgatcggtctcaaatatattaattggtgtatgaataattttgttcactcattagtagggcaattaatttaagttaaatttttaaatcattttttatttttatattttttgtattttcacattgagcttattgctaatggatttgttcatattttgaacgttttttcagcccctcgggcgcttgcccattcacatgtgctgtgagcggaccagcgcacgtgctgtccccgtcgcgcaacagttgttgcacacagcgcccggcacgcgcatgcaggcggacaagcgcggcgcgttgccactgcatgttgcactgcgtacagctaacctggccatggtgcagttactgctccaacgggacggcgacaagcaaattcgagtgcaggacgcggacgggaacacggcactgcacttgtgcaaaagtgaaatgggttatttccagcctgggcagggcttccaaattttccaatttccggtttttttagggttggaaattttctgaaactcactgcctcctgatcaccctcttcttcctcttcaaaaacttttctcaatacaaaaatgggtgctatgattagaatttttgagttaaatctgaagttttattaaacctttggttgtgaattctgaaaaagttaggaaagaaaaattccaaaaataaataaaataaatttaaaatataaattctcctttatcc

SEQ ID NO: 4812 - DNA, 1345 bp, Heterodera glycines
ggtcgtactccgttacatgaagtggccaaattgggggacgaaaaaatgctgaaaattatgtggaaaatgaacgccgatgcgaacattcgggacaaagtcggcaaaaaatagaaaataataaaaatgttaaaatatacaatatatttcgaataaattgtaaaaattatattttttatttaattcttcatctaaatttaattaattataaaattttaaataatttaaaaatattaaatgcaaaactaactagaaaaataataattaaatagaaaacagtcacattaaaaatagaataataaatttgatttgtaaatatattttctttttgtttaatttaagaaactgaactgtatttattttcttaaataatgtaattaaaaatgtttaaatattcgaataatcgaaaaaattttaaatttaaaagttaattgaattttaacttaaaaaattgaaacgttaattaaggaagataaaacgcctttgcatgtggcagcggaaagaggtcacacccaagtggtggagactttgatcgacaaatttgggcaaaatttatttaaattttatattaaataaatttaaattattacattttgcattttttattaaagttcctcaattcgcgcccggacaaaggacggcagcactttgttgcaccttgtttcagcggaaggtgcttcacatttttcaattttttgttaatttattttcaaaatgtattcttcaggtcatgctgacacggcactcgcttttctgagtaagtgcaaaatgccataaatttcaaaaaaaatgaaaattccaatattcaagagcgtggcgttccgttgtatatgccgaacaaaagtggcgcggtcagcctgcacaaggcggctgctgccggatacaacgaagtggtcaaggtgggctgatgatatatgcgtttattaaatttaaaaaaactaaaattttggggaagtaaaaaaatatattattttatattaattttttgaatttgctaaagtccccccccccccgcccttcaaaattttgaaaaataaataaaataataggagactcagaattttgaaaattttttataaaaactgatgacaagctaatgtgataaaacaggttaattcttttcctttcagtatccctgcaaagtttggggcgcttctgataagtttctgaaaaaaaagataagcctaaactttttggcctgtttaaaaaggaattaaaaatttttaaaaatttattcatctccctttttgatagaaaaagcatcagagtgcctaaactagcatgtaaataaaatttggtgcgtttcagagcattttctgaaaaaaatatttatgaattaattatgcaa

SEQ ID NO: 4813 - DNA, 4211 bp, Heterodera glycines
actattaaaaaaatgaaattcgataaccaaattgtttcggatttgttaaaatggccaaattcatgaaaataaatttaataaccttgaaatatggcatttcgagcaactctatcaagtctcgaacgtgctttggtttaatattgtagtaccgttatccaatttcataatttacaatttcgctaatttattttattgccccctaattaccactcactaatttttattttttgcccatttcttccaccgtcatcagatactaattaaccgtggcaccaaagtggacatcccaacccgggacaattacacggcactgaccgtcgccgtccgatcgggccaagcttcggttgtcgagacactgctcggctttggcgccgatgtgcacataacaaatggccaaattggcgaggtcttcaggccaaaaattaataaattaaaatcgaataaataaattaaaaacaaaaaaaataaattataataaattttaaataataaatttaaattttatatgagggaaacactcaaaaattaaattcattcaaaaatttaatgggcatttgaaaaattcaattttaaaaattattatattttttaaattcttaattttaattttattctactctactttaattccaatttaatggacgaaataaagaaagaaaatatgaatttttgtttaaatgttgatcttttcactcttatgaattttctttccaaaattttattaattttattaaaatttgcgggtcaattgctaaggactccgtggcgcaatggtagcgcgtctgactccagatcagaaggttgcgtgttcaagtcacgtcggggtcaattaattttttccattttttaaattgccatttttaattgctaaataattttaatttaattttatgtggttttagtattgcttaattaattttgacaaaattaaatagaattaaaatataaattccaaaaaatattttaaaaaacacttttgcacacagactgcactgcatgtcgctgcaggtttgccctgcggggacattgaatgcgctcagatgctgttggtccgtgtaaattccaaaaatgatgttctgcttgcgtttttcagaaaagtggcgcgcagcccaacgtacagcgtgtgcaggacgggcgcacgccgttgcatattgcggtaaataaattatgtttttttttttaattttaaaattttgattttaaaggctgcggttggtcattgcgcaatgtgaggaaggaattttttaattttaatttaattatctccaaaatttttataaataaatttttaacgagaaaaaaattaattaggaaatttattgtgtaataattttaatcatttttaattctttaatatttttaaataattttcccattttattatttatttatattgtttaattactatcatttttttaaattcttaggtgccgtttgttattggctgagggggccgacgctcaactgaaatcgaaggtgaatttgacaattataatacaaatgattataaaaattcgaatatattttaattttattaacgagaaaaaagtcatattattattaatttaattaataaaataaaaatatatttaaacatttaattaatgcctttctctctactcattttttaatcaattaacttggtaattaaataaatttcatcaaaaacaactaataatcattaaaaaagttaattagttttttatatttggaattaaaattaattaatgaaaataaattgcggaataaaatgccgtaattaatttaaaccgttaattacgaaattattttctcgcaaagaatggcgaaacggcgctgcatttggcggccaaacattgtcatttcccagtggttcaactgctattggaccatttgagcagcagcaaagacgcggacagcagcagagtgcgcagctttgtcaatgccataacagaggtaaaaaggaaatttaaaatataaaatttaaattatttaaatttaaaataaggatggccaaacctgtcttcactatgccagccaaattgggccagagcaagtccatttcaaggacgaggatgccaaaattgtgtcactgctcatcgacaacgggggagactccgagctgcaggcactcagtgtaagcaattttaattttttagaaatttttttgacaaatttaaattttgaattttacaattttaatttttggaaattttcttgactctgtttaaatttcagaatcttgaaactgcgatgcacatgtgcgcacggacgggcaacgaaagcatccttttggcaatggtaggagaggattgaaaatgagggaaaatggggggacgaaaaacaaaaaaaaagtgcatttattgaaattttgaggaaaagcctcgacctggattcaatgttgggcctggatttctttgacaaaagtcaggaaaacccaggtccaggaaaaattcaggcatgccatggcatggacttgaatttttgttttaaaaagataacatatatttattcttttctggaccaaaatccaggggccagaagaaggccgagttctattttataccataaatttaaaaaagaaaaattacaattattatacgaaattttatatgaaaattgaataactttttaaggaaatgaccacttccgcatattattattattattattattatttggtttaataatgcgtctttgattattaggtcaacaaaattgggcctggcgctgttcagattgtacagaataagaagtcgaaggtgtttttaatttttaaattatttttatttttgcttggcgttctgttcagaatggctggtccccgctgttggaggcgtgcgcgcgtggccatgtgggcgtttcacgcattttgcttcaacaccacgcacgcattgacgtgttcgacgatgcgggaaggacggtaaaaaatttattgaaatttttaaaattttcaattatttaaaggcccttcacttagcgtcagcaaacggacacatcgaattaaccaaacttttgctaaaatacaaagcatttgtgaacaggtctggccatatgtgaagcacactaaatttaattttaacaattacatttcaaaataaccattgttattgcaaattattaagtttttaactttacaaatatattttttataattaaatattaagtttttaagtataattaattaatttaaataatttatttaaaaataaaattaatttatcgctttttcatttgcttaattagaaactttttttttcaaatagtaaataatttctctttgataattttagtaaataaaaattaaattgaatcaataaaataatcaattattatataacaaatctttaatatgatcaaatttgaataagtaaaaccgaaaaaaaaatcaaaataagtaattttttataaataatttttagtattttttaaattaaaataattaagcaaagccaagccaagaaaaccaccctccccccccaattaataaaaagcatccattttaaaattcttaattttttaagcaaagccaagaatggtgaagcgccgctccatttggcagcccaatacgggcaccctcgggtagtcagtatgctcgtccaagagcacggggccagtctcgaagtgaataaatttcaaattaaattgaaaaataatttcgaaatgccaaccaaggccatcactttggacaaccaaacggcactgcacttttcggccaaatatggccaattggtggtgtcgcagacgctgctggcgctgggcgcaaatccaaacgcgcgggacgacaaaggccaaacgccgcttcatttggcggcagaggtgtgatgacgagagaaataattttgtaaatgatgagtagggatttgacaaatattttttaaaaaccccgatatattgagaaaataaagaaaaatgaaaaaatttgggtgtaaaaataattaattgctctatactaccaaaacatttcttcattaattacattgaatataattaaatttttcaaaataattaaaattacaaaaatcaaaaattttggcaagtaaaaaacaaatattcaaaaaaatatttgtcccgtccataatgatgagtgtttaaccaatcagcgttgactccgccccttgcgcaattaatgctgaccaatcagcattgacccccccacgctcctttcttttgtctatacgagggtagcgcaatgcctctgcagagacgctgcagtgaaggcactctctcgc

SEQ ID NO: 4814 - DNA, 961 bp, Heterodera glycines
agcgtctctgaagagaggccatatagcagcggaagatacaaataaaattctgttttttcgactaatgatttaaagaaccatcaaaatataaacatttaattatacatttactaaaatttttaattattttatatcatttgatagcttaaagtatcactgcaaaattcaaaaaaaaaatgtttactttcaaaaagctatgtatgacgaaaatgctcgaaaacccagcaggtcttttgagttcttttgctcgtaaattttttaaatttaaagaactttttagaaattttgcaagcttttagaaaaaacttagggctattaaatgttatgaagaattaaattttattattttcaagaaaagttatgaataattttttgttaaaaagaaattcggctaaaattgtcaaaaaaaatttttgaaggatttcaaacaaaaaaaggcggcaattttgaaaaatcttcaaaaaataattatttttcacagaacgatttcccggacgtggtgaagctgttcctaaagatgaagcagaacaaccacgcggtgctgaccgcggttgaccacagcggcttcacctgtgcccacattgcggcgatgaagggcagtctggcggtggtcaaagtgcgccaatttgggcactaattagggcaatttatattttaagaaaatgggaaaattttttgaatgatgacataattagctttgttttttataaatttgtgattttgtattctgaaggaattgatgatgatcgacaaagcaatggtcatccaagccaaaacgaaggtgaatttgtaaaatataaaatgcaactaatttaataattcaaattaaatcaaattacgctttaattttaatagtgcctcgaggcgacaacgctgcatatggccgccggcggtggtcacgcaaaaattgttaaaattcttctggaaaatggtgccaacccggaggatgagaatgcagttg

SEQ ID NO: 4815 - DNA, 9856 bp, Heterodera glycines
aaaatgcgttggtccgcgcttcgtttcgcgaatgtcttctctatcgccgccgttgtcgtcgtcactgtggccgcctccgatttgctggtggttgacgctgtttcgtccgccgaaacgcaactctttgttcgcgcacggtccaccgacggttggccattggcatggcactcatcggaggggaaaatgagggagccaattctataaaccaaaaatggtttttttaaatcatgagagaatgttgggatgattatgaaaatgatgaatttatatttagcttggctttcactcgccttctctcttcctgctgatggtcattatttctcgtcattgcggattctgtaaaaatgcattaaaaactgtggaattccaatataagttagagaatgatatagttagcaaacacaaaaatccaaaacaagcaaagcttctttaattttgttttttgttaatttgtgctaaggacaacggacataaaaagcaataaaagtaagcaaacagtgccaaaaccaaccaaccccttcgtccgatcgatgcggaagcttttgaggatgtattggttgggatctgttccaatttgtcctgatcatgttgttctaattgtacaacattcgactgttcagtgtttgacggtacaattgacatgcggcatgacgacgatgatcgccgctccgtcgttgtgccgttgttgtttgttttggcattattttcctgcgcggcattctgtgcctgcgtttgttcctgtagcggcgttttgcttgtccgtcggaaaaatgacttaaaatatgaagacattgaagtgacagaggaggaagcagaagtggtcggttgatcggcgagcagtggtgtcgtcttttttggcacagcttccaatggttgtgccgccaaagggccctgttgttgctgctgctcacacttggccacagactttctccggtcactccctccgcccgtgccgagcattatcatatcccgaaaaattgatgagcggcgtcgcgctgttcgttcgtcaccaccggcgacagcagtaggcgacaacgggctgatcggtggactgtgcgcgtcaatgaagcggatgatgctgtcatgacgattaactgccgatgccccgccgcaatccgttgagcagaccagttcaaccaggtcagcaccagctgcagaagaagctgaaggcctctcagaaaaaggtgctgcagttccgccgaacaatggaacggcttcggaattatgtgccgtctctgaagcggcgccgcatgttgttgatgagtcaatggatgcgtcaagggaggagggacgacggcgcctgggcacggcacgggcagaacccaacacggaggagcatttgcgactgcacctaccgttagcgttgtcgcaatggtcgctttccctgctcgccgtccgcgactcggtcgacccttccttcattcggtgcagtgcgtccttaacttgtgccgccgcttcagcttcatctttcgccgcttttcctttcggcgtgtcgtcagtactgttcacctcctcctgcttctcttgcatcaactgtcttccgtcaatggacgacatcagtgacgaggaggacgtctcgcgtgccatcctttcccgtgccaacaatgtgttgcgtcgccatttggtggtgaagcgagcggatcgcacgatgacatgcgttgcggtcatcagtgtcatcgcctggggtaccgcttcagcggccgccgccgccattgtcgacggaggcacagtcagaatggtggcacggcatgtgggcacgtcgtgctccaactgctcgagtttgtgatgcaaataaagctgttgttgctcgtccattacaccatgtccaagtcgttgctgttgttgttttccatcgccatgttcgtcgtcgtcgtgttccgttgcgcaactgttgttcatcaccaattgctgctgtttctgcttgtcctccgcctgtcgtcgttgttgttgtttctgttgcccaatttctgtctccatgccttggatttcgtcaatgctgcacttccataacagttggctacggccatagtccaactcgcgcagcacaatgttcgcctgcagagtgcggtgtgcaaattcggtcgaatggtcagcaaaatctttgttgtgagtgctttctaagtgtgtgcaaagcgatgaaaatgtcagcagaggacaaagacaaaaaaaattgctatttgattgtgctgcggttaattagcggttaattaagcattgtggggttgacgacttagagatttttgtgggaaaagaaaaatggatggactaaaaaattcttagttttttccgatttttctgtacctaaaaaccgctaatagaattgttatggtaaaagcgaaataggacaaaagctaagcaacgatcaaaagacgaacgaacaccaacaccataacaacaacacatgacattctctcactcactcactttgccggtgctgctggtgatccttaaaatgttttaatcggataaattatttgtatcttttataaaatgcctaatcatttgaattccccacccttcctatttacaattgttgttgatgtcgttgctgcaattgttgtccgtctcgccgacgttggcaccgtaccaacggcgggcgcctgttgctgcttttgctgctgttggctcattgcactgatggtgccgttgttgttgatgtttgtgctgctgctgttgttgttgtttctgtccaatgcctctgccgatggcaccgcagcagctgtcgtccccgtcgcgttgccgaacggcgccgacggcgacacattctgcggcaacattcgcccagtgggcgtgacaaaggcaatttcaacctgcgcaatgcggaaacccagtttaaaagaaaatataggtccatttggtctaactaatagtcaccaattaatttatgcattataaatgtcctgatcacttttcgtttacacaccgactcaaaaaaacgagagatgaaccaataaatagagagtgcagagaaaaatgcatctctcattttggcgtactatttatttatccattttaatagagaaagactgaatttacttcgtgacgtttaaattttttttctacacgttgaattcgcttcaaattttgcatatgatagagaaaaaaaatctgagggtttttaagaccaaaaaaaggattagctgaaaagcgcctatatattttttataatgcatccaatcgcttatcagatgcttagaaaaagcttctccttcttgagagctttcatttgataccaaaccgttcaatttggctggccttcaaaatatttaaaaatattaatgtcttgtggtgggcttaaagctcatcagccattcccttttctatctttgaaaaactactgaaaatgagtcacacatgcgaatcttttttggtacaggctctcattttccggatgtgttaaatgatcagaattagttgaaaattcataaaaaattcgggtgcactgatcgggatcagttcacgaccacctgcgcgtcccgccagcgaatgtaatgctccagcccgtccagcacatatccctgtgggtgcggttgagggggcggcatcgaatggctaagcggaggtgggggaagcgacgggacggaggcgccgcgttttgccattttgggcgatggagggactaaaaaacaaaaaatcattcagttaaaatgaaaacaatttttgcccacttttcatcctgttcagttgaggcggagcctttcgcgcggtcggtcggcccaattggcacatcagccgacaaaagagggcattcgtttgcctcagatcaatctgaaaatgagggaattgctcattaataaatatattccgatccacccaaaatctcaccgccgaaaccaaaaataaaaaattcaaacagattttttttcaagatgaattactaattttttcaaaatttttccaaaaaatcgcatgaaaaatttttcaattggaaattttctaagttttttgcttaatttgagattttatcccgtcccaaatcctcccttttcttacattgttctgcaaaatttcttccgcgttccgttggccttcgcgcacataaaaaagggacaccgtttccgtcagtcgcactgggagctgatcaaccgtaacggacagcgaatcgtagaaaatttcactgcaatttttaagagtttagatttagtattagttaaatcaatttttgtgcttgctcacaatgatgaattgtcgagcggtgtgaattcgcggccgaacgcgcgtctgttcaaaagtcccatgtcgtagaggaaaacgcggagggaattgcaaatggcgacagggctgaaaatacgcttatttaaaaacaaaaagtgttaaaatgccaatcacaatgaatgggcaattaaaatttgtttaattactcaaataattgatcaaaacacctttccggcgttggcactttggtcaaaatagcgcccagtgacgcgttcagccacacattgcgcgtgtcgcggtcgcccaccggcgcgttgccctgcgcgagacgcgcgcggatttgtgcaagttgcgactgcacttccgccacggggccggggacgggctcaagtcgagggaattgtgcgtcgctgaaccattggaaattgaattggcaattttacgaaacgtccataatgcactttttatgaaacgacctagcacctattctcccaacccgaccatcagaattctcactttttagttaaataaacttcgaaattccggtcattttcaattaaaattatggccaaaaactaaggtttaaagggcaagcaacccaatgcgtacagtttgcactggggctgcagcacttcccgtgggatttcgaactgcttcaccggcgccatcctcgtgccatttgcgccgttttgctccgttgccgcgggcgtttgggcgctgagtgaagcggttcccggactcggtactgaagcggcggcggcagacagttcggaggaagaaggcgagcagaagccacctcaaattaaatataacttaaaactgaatgctatttgcttgctccaccagtttgttgctgtctctgttggtccgtcgtcacagtgccgtcgcttttgtccccgcattttttcggcctgcacatcgcccggggcaacagctgaagcagcgtcgcccacggctcgtaaaagggcgtccggaaaatggcgacaaccgccggaagtccttgggaagaaaacaattccgtttccaattagatagttatcgttttaccgtccgacaagtgaacgatgggctgtgcctcgtacagtgacagaatggtggactcgccgatgtaaaagtgccgaaattgggccaaatccatgccaaacttttgcactaatgcgaattcgtcgaccgcagtctcttttttgtgcgtctgataatttatgaaagaattgtttattccttttcaactttttcatttacttcagtaaaaagggaatgcaaaagcatttcggccgcgtcgcgcaccctttgactcgccggtttgtattggtcgggagccttgagaatttttaaaaatacaaatatccttttccaaaatttcaaaaatcccacagtcctgacaatggattccataagtttaaaatgctgacttccatttttcacaattaccaaatgtccttcccccgcttttcccaccatttctttgcccccagtgacgcccaattcgatgctttgcgccactgtgctaagacaactttcgatctccgccaacgcaggcgcggcattcagccacacattcatgcaggaataggcggcaacaacctcaaaggatggcattcacaatagtattattttattaattagcatcattttggcactaatagcccgaggctctttctaaaacaatttaaaaatgattggcacagctttttttaattttgatgctaaaaatagcagatgaaccgcaccgtggaatgcatgtcgcgtgaatggtgcggaggcgacttttggagttgctgatcaatgaagcgacagagcgaagtgataatcagagagccgatggacaattcacctgaaaaacaataaacttttaaaaattttccaatgttatattttagtaagtaccctgatgaaacagtatttggtgggacaacgagctcaagcagttcaggcagtcgaacgcggccaaacagcacagcgtgtcgctggcccagcccggcttgcacaaattgtcgcacaacgcactgacaattgcacgcaccagcgaaatggagaagggcggagccactgaaaggggacaaaacgtcgacagaatggacaaagtgtcacaggggaaagacaaaatgaccactcagtgctcaccgtcttctctcgcactctgttcgtctgtcacgccggtgtcatcacagtctttctgctccgccgcagttgttgttattgtctgactctgtgccgtgtcatcgccagcagtcgtgccgaatgtaactgccaaatcgtatcgcgcactttcgcacgcgaaaagcgtgcacagcgcaagtgccaactgcacattggcgggcacagtttcgttgcgcagtgagtgcaccagcacgcgttgcatgcgaacccttagggggaaagtggggttttaaaatttaaattaattttcaacattaatatttttgaatttgcccaattagtatcagtttttcattggcaccacctcaagtcggtgtaatgctgctccgtctccagcaaattggcagatgagccctgacgcaaaattcgatttctcgagggggacagcgaacgacctttgaaaaggaagggacgaagataattaattaattaattaaattggggattaactgactgagaattaaattgctgccaaacactgagggccatgccaacacggaagctaatgcgcgaagacaggcggcacgcatttccgcctgactgaccgaagggtgcaatctgagcggaaaattaacacaaaatgacgaaaaatttttgaaacaatgggggaacaaccgcagtttcatcgactcggtgtgcacaatgtcaatggccatcacataattgggcagcagaatttgcacaccgttcagcgccaacttgaacaattcatccgaagtgtggtaaagcagggcacagagcatgagacggtcacgctgagacaattaagcgaaattgtcaataaacaaaacaattagacatgtactataaaacgggaaccgcccactttggcgcgggtattttggcgcgaggttttttggcgcgagcttttttggcgcgggccattttggcgcggccatgccctatttaaaatggcttttatggcgccagagctgaaaaatctccaaaaattttcagaaaatttttagtttgtctttctttatggataattataagccattttctttaaaagaaccatgttaatacaattgctagcaatggtgcagaattgtggtgcctaatttaacttttatactttggtccaaaattactattcggtgggttttcgagggtaccatagatttgactaattacgaaccccggactcaaattagaatatgtatactggatttggactcgaaaattcgtaacacaacccaatattcgattgtacacaacacttcaaataaaaattttattttttaagcaaaattacatcgataatgtagcgcacagcaggaaaaaattgattttgacagggttagttctaaattttgaaaatttttaaaaaattcttttacggcgccaaaaaagccattttatatagggcgccaaaacggccgcgccaaaatggccgcgccaaaatggcccgcgccaaaaaagctcgcgccaaaaaaaatttcgctccaataaaaatcggtttacctcggttgggtcccggcatgtttttggactaggaacttttttctttgtcaataaaaatccaacattgtttgtattattcgatagccctaagcgtactctattaacctgcaaaatcccaaaaaatttcgtcaattttgaacaaagttatgaccaaaagtaccaaaagaaccaggttttcagacattgttggccagcttttttgaaactcaacgaaattttttgtaatttttcagcctaatagagattttgaagagctagcgaatgatactaacaatgttgcatttggttgacaaagaacggggcaggcccgtatccagggggtgaggaaggggtggcacgtgcccccgcaccgaaattaaaaattttcagagaaaaatgggcaaaatttttaaaaaatttgaatattttcttaccatataccattaaaattttctgcggcgctattggcaccgccggacctctttgaaccaaaattttttgaaaatgtgaccccaaaaatggcaaaaatagtgatttttgacgcaaaaatactacaaaatcctgctttttcgccccagcgtttaacattttgaaaaatacaaatgctcttcgggtgccctccccgaaatttttttctggataaactgagcgagtccgataaaaatgcaatatgtatttgtgtttttaatttttacacatagacaatgtatacaaatgattttacagacaattcaaaagcataatacataatttttttataaaaaaccaagctagttttgcaccaccgaacctaaaatatgaagaatggaatttcaacatcaatgaaaacgcctaaaaattggttttgattttaaaaatggacaattaaaagtgattggttttcttttcttgggtcgtcgctttttgcctcaacttcgtccgtattgtgcttcgtactgtgccctggccgccatggcatcttccgagtcgccctgttggctggcacaccacagcgcaacatcgacggcaccgctctgctccagcatggcggcacggcggagaaatggcttttcctagcaaaattcaaagaatttcgagggcgctgattatgaatccgatcttccatttcgaccaattaagagtcccgggctcaaattcgaacatttggtcgaaaagtcaaaaattatcaaaaaacttttttaccaaataatgtatgatcaacaatttttcatggttttgaatcagtgaattgagaatttttgacttttcgaccaatgttcgaatttgagtctgggactctgaagctattttgggctatgtcacgaggaaaattagtgacagaaatttatgaattgctaaatcaacccaaaaataaataaattaaaaaacagcaacgccttgttgaaattcatttgttccttggataagcggatcaaaaaataagtttaaaatgttgaaacaaaacacaaataacaactgttgcaacgaaaataattgtatataagaaatataaatggctagcccttcttgtccgttgtggtctagtggttaggatttgagactctcactctcaaggccggggttcgattccccgcaacggaacaaccttttttcattttgtgaatttgcaatattttttattttttgttaatgacaatgtaaaaccgattttttctaaaacttacaagcaattccctgtacttcggcctcttgttcatgtccttctgcaaacagtcggcaatgaactgacagaactcggcactgaattgccgaccatcctaaaattatgggggggggggggggaaatttgttagttttttctccaataaattcatcccacttggttaggctcaagacgcggcgggtcattgttgtggatggtgatcatcaactccattgcgttgttgacacattcgtaggggaatcggccggtggccaattggaacagtgtaatgccaagggacctgcatttcacaaattttggcactaattgttatactaattaatgaagttggaaaaaatttcccgagggcgcttatcggcaccgccggcccccaaattcccaatttttcttaaaaaaagggctcaaaatcgcaaaaatgggtcattttttagtaaa

SEQ ID NO: 4816 - DNA, 4960 bp, Heterodera glycines
atgcatcagtcgggaatcccgagggaaagggggtgcgttagggtgggaaaacacatcggacggtgtgccctcatcatcatgaaaatattcgcctttgtccgctgttttcgtttctgttgttcgatggttcggtcattgtctgtgagcattggtgctgctgaatttgtgccgccgtttgggtggacgacgacgtcaaaaggggcggcaaataaatgtgcgaagagagagacgaaaagtgagcggaagaagtgaccgtcggcggaggggggacggggacggctgaacattgggccccaaattcgatgccggtgtttgttttttgttggtaattggtttggcactggacactttgggcacggaggaattcgtttggaaaactctgctgctgaaaatgagttttgcctgttaagaaaaaatgtctcaagagtaatcccatacattttcttgcatttgatgatggaattgtcggggtggcatttcgaaaacggcgggagacagcgtggcatttgagtcgtaatttgcgtaaaagctggcggaggacgacccaaggccaaattgtgcgtcaatttgcgaggcaaccgaacggtacttttgtgactgttgtcgccctccccccgcgcgttggcattcgtccgtttgcgttgcgactgttcgccgtccgccgatgggaaatctaatggtttaaatcaccagccaaaacaatgctaatattgtctttctcaatacacaaattcccaccggggcaaaatgtgacggaagcgcacactttggcccaaactaatcggaacaagaaacacttttggcgggcaacaaatgccattcgtcggcccttttggcagtggcgaaaggcgcgaattcgaaattgggactggtttctcagcgcatttcgcacttcgacaaagctgtgccaagaaaaggtgttttacttcgttattatttcggcttttcctccgacttttttctgatggtagcgcaaatccctcgccaaagcaaagcgtgccgaacactctgagcagcggtgtctcttttccgtgtgctaatgggatgaaaatggccaattagcaacatagcaattagtatattataatggaaatgaatgaatgtgtggcgactcaaatcatttccattcctaccgccgaccgttcgttcgttttgcccaccgttttctgaaagtgctgaaccaacaatttcgcggatgcgaagtgcgtcccccgcgtgccctcccccctccggcgacatccatccaccggacaatgaaagcgaaccgccgctgcccctaaacacaaaaagtgcaaaggtaattaattaatcggatctcgtaaaacgaagttcaaaattgacagaaaaatgtgccagcatttaagcagaattaactagtcgataacttgaaatttggacgcgaattgacatggtttaataaaaatcacaataacccaattattacaaaacatttgtttttgggaatttctctattggggttattatataattttggtccttctgtactacaatatttaatgctacaaaatatgtttttaggaatgaatactgtattactgacggattttcagggagccagccgactaggacgacattcaactcatttttggccaactcgttttttgggtcgaaacccgaaaatcgagaccaaatcgcttaaatttcaaaatattttgacctaatttaattcgggaatattttttatgtcattttaagtgatttttaatagcttaagaccaaaagttaggaaatttgaaaatccgaatttaaaataggtccaaaaatcttagaaattctttgatttgataattattttcagatttttccatcaaaaaaccgagatgtttttaccgccgactaaaaccctctcacaatcagccggcctaaaaatggaccgttagcagtcgttgtaatcccaaaaatcgcatccaaagtgccaatattctcttcatcagcaccgccaaagtccgtcccgtgccgttttttcatgtgaaaatacatggaaccccgatttctgaatgctttacagcaaaaagcgcatattggcggcgcacctttcgacggcgaagcgcccaccgccaataacaattgggactcagttggacggatgtcaattggcaaatccatcggaaaataaaaataaatttattatttgtttatggaaaagataaaaaaattcactgattaatagggaaggcaatttaagtgacgaactatttatacttgggtttctgttgtttttggaatataaaatttaaatgaaataagaattgaataaaaaaagaggcttttcaaacttcttaacaggctcattgtcaggcattaaaattgccatccctactgattaaacaaatctgttggttaattaatgaatttaacgaaatttatcgaacgagatatgttttgacgtataataaaaatgcaaaggcaaaataaaaaatcgtcataaaaacatatcacagtgtaaaggaggataatgcggaaagcatctgggtaatgattaagatctggaaaaaataaacggaaaataaatgttaattgtaaaacttacaatgaggacccagactcgaaattactcaaaactataaatttagcagtaaaaaatgaaatatatggaagaatttcctttattgcgctttttgagtctgggcctcacattaatatttaccaagtaatgaaaaatgccttaagataactgtacccggaaaaaaattgaacacaaaaaggaaggggaaaatgaatgtaagaaatcaccgggccaaaaaaaagtattaagtctctccgtcgtcgattttgtcgtagcaaacacaataagtggccaagaagtagtttttgtcgattatgcagtgcggtgtgtctccgtatttgttcacgtgactgatggccgtcatgtcgacggtgatgcgtcgctgtccatcgaagaacagcgtggcctatgattttgattgtattggttagccaattcggattgctcatgttttttgttttgagtaacctcgtatttggcattcccgggctgcgtctggaaaccgatctgatatgtggcgaacgtcgtcttcacattccccttcaaatccggcacaaatccgtctgcgtccttcacccccgagtatttcatcaaatccgaatttggcacgagcctggataaaagaagcattgatttgttataataaaacaattcgcccaccttttggcactgtccaatttagacaacgacagcagggcacacagcttcctctccgattgggtgtattcgttgatcacttttatcaccgacttagccaaaatggcaatttcgtgggtcgaattcggcaccgattcccagcccaagcaagtgcaccaatgcggttcaatgccggcctatacattcagttttaatagagcggatttagcaaaatcaaaaatattaacaaagaaggtttaaacatttcagttgtccattgtcacctgatcacacgtccgattagaaggaatttcgcgaaagaacgaaagcgaacgaccggcgggaggcacagactttgccttggaggacgaaagggcgacgtcagaagaagggggcagggacaaataatccaacggaaaaggccatctgattatgtgttttggggaaatatcagtttttcctccctcttttaaggttagccgacatttgcggaggaccgccttttgcggaccgacatttgtgactaaatataaaaaaaagagaaaatcagatcactacttaaggatgatatgaagtgatcaaatttttagcaccaagaggaattgaaaaaagaactttttggaaaaactttataaatttttcatattttcattcgcattaacttgcttaactccgaaaaatcacatataaaattcaatattcaaatgatcatccaatttaagaaaaaaatttgtttttgaaaattaaatccagaaattacgacccgcaaatgtcggtccgcaaaagtcggtccgcaaaagtcggtccgcaaatgtcgcactacgtcttttaaaccctcccacacgcacttcgcattgaaccccatattatataagttttattagtttaatcacctcattgcgtccattagcgtcgcatggacatcaaacggcgaagtgagtcgcttttgtgcgttcgttttcagatttgacagaattctttcaacaatttgaggcgaaattccgtcgattgaaggaggaaaacggagggagaaaaatggcaatcgctcctcaagttgtcctgagaatgtgataaaattataccttcaataactagctgtttttttcatttaagatttgtttttgtgtttttgcatatccacaaaagcgatcaaaaaaatgtattaaaaatgcagtaaaaaaggtgcgggcaattaggtcgtaccataaaaaatatacaaaaagtgttttcaactgtcccatcttttgaatgccttttccggtttgtttgcccttcccattccctgccccccccttcaccttggtgcgtttggcgaaggtcagaaaagcgtgcgccgtggtcggccattacaattgccacagcgttctcaaaagcgcccactgtgagcatcttcctcagatggttctccaaatcgtcgtccacttgctgcactcggttgatgtcgtcgtgtgacaaataagagtgatgcataagcgaaaaacggggaatgcccaatttggaatattcgcgccagaacgattcgatgtaccggaaccaaacctgaaatttggtggaatatttgaatctaaatttaaatttatttaatattttaaaaacagatataagtggtttgtaaggtgtaaaattttaaagtaaaataatggaaggagaagtagattgaactggttgtatacccaataataataatgttttgctcaattcaaaaaagagtttaacaaacaaagccccctccccccccccccacttgcattgtgctgtttttcattgccaatgcacacgtgagcgcgttcgaccgtc

SEQ ID NO: 4817 - DNA, 7406 bp, Heterodera glycines
atcaaagctgtgtttgtgacagtcgctgaagaagcgcacattccaattgggcccgctccgaggagcgttgttccaacatcggacacccgtgacctcgtggaattctgcaaatgaatattttgtgatagtaaatgcggaaaaacggaaactccgaaagacttaatgttggtttattacctgcagcgtcgcgccgacaatttgctgttggggctgcagctttacgagttgctgtaattggtgaccgacaattgccgtctcttcaatgggttggccagagtttggcatgagcacattggcgtagtgatgttgctgcgggtggtggtggggatgggcagagtccaatggggtggcggaatttccgggcaacgaattactaaggccggaagcattttgggtggagtaagcatcctctatgaattcctctccggacaagtcgctgctctcctgcttccgctttacctgcctttatataaaagcgtttgatttccaatttatgcttgcagggaaacgcacgctgcgcgttcgtccaaatatcggtcgatccaaaccaattcccggtacaactcccaattgggctcctcattctccgtaccattggtcatgcgcagtttccttttttcgcgcacatatcgatcccttattttcttccactgtttgtaaagggcactcacatcgcctgaagaaaggggcggataattaactgaaagagacaaacgaatgctcaccaggaaatgccaggttttttgcaatctcagcccatgcctgatttctgaaagaaacacgtattgtattatatgaaaaagaggggggggggggggatcaacaacagatttttataaaagatcaaaacacaaaacatgacgacacttttttgctgctcttcgtttaatgttagttttttcagagctgttttcaaaaaagcttattgtggacgggcaaggcgtggcgatagataatctcatcagagccacacttttagatatttgaaaggaaagtgccatagtaccaaaaagacatatgggacaaatccagtgaatggatgggaatgcgattgccaataattatcattttaataataaactcgagaaagacctgtactccgtgtgacgatacttcgtgtccttgatatcgtataagcaaggctgcgtccgaacttggttgatcaggtgaagagcaaagtttgggtcggtaatgacaatttggcgttgttcctaaaaacaaaggttctgcaaagaaaagataaaatgcgttacagttttgccttctttgttgcgctcaaaacgttgttgtgtcctgtccaccatgtgcggatcgagaaattcgagatgctaaataaaaaaacactttacctttttgcaaaatgttttgaacaccttaaaatattgccattgcgagtgctgctccccgctgtatttcagtttctttttctgcaaattggcaaaaaattaaacaatatatcgactttgaagttgcattgacctcttttccgtatttgtctctcaattgcttccaccggttgtacaatgtccgcgcgtcaccttggaacccgagaacgtgtacaagccgattccaaacctttattttgtagtccgcgcttctgtattgtctacacaaatagaaaatggtcatttaaatgtactgcctttttaatttttcacttgtccgaagcgtcgtagagacaatggctttgcctgaccgcgtcaattaaacgcaaattgaaggtcggctcctccacgaccgcctgcatagcggcggacagctgcctttgcatggaagaggaggcgccattgtcactgccctgaatgccgggatcggtgtccaattcgtgttcatccgagttgatcatcacagcagtttcattggaaccaattgctctggaggctgaggtttcatctagcatttctggatgcttttaattggtgtacccaaatcatttacttctaaaaaacaagtgaaattaaaatgacgaaacttagaaacatatgtttgttatgctctgttttgaaatgtaaataaatttatccaagtcctttgacgaaattaaacgtgtcccgacattggccggtccagacatttgcggccccgacttttgcggcccgacatttgcgcctttgtccaaaatctggttcaaaactaagttttttcaatcactaatcgcataattagctttaaataagcgattaaaagtgattgtgcatgatcatttgatcacaaaaaaatgttgaaaaaataataaaattttcaaacaaaaaattattgatcataatgaaccataaaaccgtgttttcttaattttaatgcttattaggctatcaggggttgaaaaaattcaactttgagtccgattttggacataggcgcaaatgtcggggctcctttgaaactaaccatttccttctccctggtccggaacagtccactttgacaaagtcgcccttctccaccaaatcgccaaatttgaacgcctcccgcggtgtccatttcaattccgtgtcacttatcctctcataaaagctccacaaacatttgattttgtccacgccgatgctaaggaatagcaaattatttggcaataaattatgcaaattttaatttaaatacttttgcgccttttctgtcgccattatccgccggtcctcatcaatgaaaacccaaggctccttgtcttttctgtcgttgcagaccaacggaggctgttttttgtaaaatttcatcacatcggagccgtttacttcgagttttgcgattttgcaagcctacacagaagtggatttaatttacagcaaaattaataaattatccaattgaaaatcacatcgtcagtttttcgcttaccccaacgttcgttctgaacgccgcactctttgatcgatggtcagcgccgctttcttcagagggatttccgcccaatttcacaatttgcatttcctaaacaattattaaaaactcagaatagtcatataacctgacactcattcatattaaatcacgtaaacaccagaaaataaaatagggttgcgcccccgatcttttttccgattttttatgaaaattttgccccgacattttttaaatttctccagccaaccccgacaaatttagtcggggaattttccaaccccgacgtcggggtcgcaaccctaaaataaaatatagaaattataggaaaggtgccaaattaggaaaataataaaaacctgcagctctttgtcagcatcatcagacagaggaaaagtgtgtgtcggcattttcactttgacaggcaccgaattgtaaggccaacgaaagaaattgaaggaaaaaaataggaaaaaaaagaaagaaaggccgaacagagccaaaagtcggacgaacaccttttgatttttgcgtttcatcaccgaatttgagacggaatggctcagaaaccgatgggcgtcaattgtgccaagaaaagaaaattattaaaaaaacaagaaaggaaaaaagataaaatggaaataaataaaaccgaaaacaaatttaaaaaagccattaaattaatgtgatttaaccgaataaatataaattatatattacaaaatgttatactacaaaacacataatttaatcctccaattcttcgtcattcaatcgggcaaaaatctccgagaaaattggccttgcaaaccgatccttttcggtgcacgaaataccaacagaaagtaatttgttgaaaataagcagacttctttctgaatttaagtagacgggaattgttctatttttgtgttcaaatagaaagaccaatcaaacaaaacaaaccgtcgtccgttttgggcgttcgtttgtccgctaattcaaaataacatttgtttttgaagttagtatcatctttatgttttgcttcggtgcacattttaaggacaaattcgacaattccttgtgggttgcgactggcagaaaaagcgcgttgtcctaaaaataaaatgaaaaatcataacttttgtagaaatttgcttcaccggtggacacttcaagaaggacaacaccaaagctaaacacgtcgagtttggtggtcaaaatacgactgaattaaacagctaaataatattaccaaacacgaggaacctggtcaagaattcgggagccaaataagcgagagttcccttcacatgagaagcgatcatcggccgcttgtcgcccgtgtcgagttcaacctgacaatgagactttccatcgttgggatttggccattttcgtggaccaactgtccttttagatcacctgtccatatctgctgagcccaaaatcgccaagttttggctcaaaatgcttgtccagcagaatgttagcggatttaacgtcgccgtgaatgattggcatttggttgatggtgtgcagaaagtgcaggccgcgacaaacgcccccgcaaatggacagctttttggcccaaccgagtggctccgtcccattcgaaaaaggaaagattgaaatgctgacaatgagcagcagtcaattcgattttttaaacgcaaaaattacaaatggtttccgttgtaagttacccggcatagcaaacggtcctcaagcgtaccattggacatgaattggtacacaaggcaaggctcgggcccgtccagcgaataaccatacagtgagagaacgttgtcatgtcgaaactttgccaaagtcttcaattcttgtaaactctgacgaattcgctccctttgctgctgcaataaatgggatttccaatgtaacagtttaattgggttttccacagctttttttattttggaagattcgctatttttctctaaaaccctaactgctgcatttctgctcaacataccctttcgtcacttccgcatttcccctgaattcgtttgatggccacctgaaaaaaacgtgtccaacagtgcgaaagaatgtgtcttcaccggcgtgtgtttccacactccgcgatagaccacgccgtagccgcccctgccgacgattttgttgggactgaatccgtcagtcgcgacagttaaatcctcgtaagtcacagccggagtgttctgcagcccgttgagcagagagtccgttgctttttccgccagatttgatgaatgtggggaatttgttgcgggcattgccgcgccaaagtcggacggctccccattaagcggaaaccctccagcagtaccaccactcgacacagacggttcagcacagacggaattggaccataaaaagggaaaaatcaaaaaaaatcttaaaattaaaaacacacctttcttattagagtaaatcactgatgcattcgtatttgatttgtgaattgatgacgactttcgtctaataaaataagataaaattagcgtcataaatttcttccacagactgtaagatgaattggcgctgattctgggattgaatggactcatcggagcaaagtttgacaaagtgatgaaactttttgtcaactaaaaggtgaaagaattatccagcagaattggtgcgtgtaaaatgaccaaatggcagcaaaatttgcatgcaccgaagaagccttgtgcggtagaaaattttgtacaagtccaaaaccgtgtaccctttcgagccccaaatgcgcaaaagagtttcagtcggacggtctccaagatgtgtcaatctacgacaggcatcaatgtcaatgtcgcgaatccctggcatagaaaatgctaaacgatggacattagataaaacataattagtgtaatattacctcattaaattatatattacacaaacccattggctcccaacaatttcctgtgtccaatgcattcgatatttcacatacaattcttgcgggaagttgaaatatgtaaaacacatctttctgaacattattttcagatcccatgttagagatagctattttagattctaaaaaggtaagcaatgatagtctgcgtttttttgatagcaagtgaatttgacagtaattgattccatcaaatatccgtccgaggcaaaaaagacgggaacgggattcccgggttttcgagcgggaatcccattcctacccggtctctaacctatgcgtcgtcgcacacccacgccgatgtgttgtgcatataaacactaacacttctatttttttttaaattccgaaatgaaatttaaataatttttttatagttaactaaaatagtgagtaaaaatccaaaaatagtgaagaaatagtgacaaaaagtccgaaatagtgacgaataaatgaggtaacatttcctttataaaattctcttagcaaatatttaactttttaaatcaaaaattttgtcaaaaaattttgggggaagaatttttgagaaaattttttcatttcataggagtgtatttttaaaaaattttcggtcgattcataggggtgtatttttctgaattttttgtagtcgattcttaggggtgtatttttcgtttttattacatttttcttaaggatattttacaaaaaatgtcaaaatagtgaaaaaatagtgacaaaactccaaaatagtgatttttaactattttagtgacgaagatgccaaaatagtgatttctagtgaccgatagttacatcagaatcgaaaaattttaatacagaaatgcgttttttgagctcctttcttcaaaacaattgagcaaaaaaaaagtttttcactaaaagttgcttccctaataataataagcagtttagtcgtcgtctttggattggtgggacgccgctactgccgcccacggttggcggagtggggcgagagcagtagacaatcagggcttagccaccatcagcagcagaggggagtagcgaacgacctgcgcgcgcaagaagtttatgcgcagtagaatgacaatcgaaacacatcgaaaacgaaaacggatcaggacagcggaaattccgctgctttttggtggccaaggaatgagacgccgtcggcaatagcagaaccaagcaaaggtgaggcgatccatcgtttatcatctcagcaacaaaagcaagcgcatatggacgttggcggcaacgcttatttgttagtcgattttggtcaaataatggctattttactttgaacaattgaaacaaaagcaaacggaagatcccataaatccctcacagaaaggtctgcaattgaaacaaaaagcgtgcagaaactgcacagagtgtgccacgacaaaaagcagcgaaagagtggacagactttccaaggttttgcacataggtgtaagagaaagtaattcaatagaggtacaccacaaaaatctaatatggatccttttggacattttagatattatggaatttatgcccccaaaatagctggttttcttctcacctctgcaaagctgagcgtacctgctttaaattttttagataatcagattggcgtaaaaaaactttgtccatgcgaaaattattgctctatatttttgatatt

SEQ ID NO: 4818 - DNA, 8833 bp, Heterodera glycines
ttcgtttgttgcgaatttttgtgcggggcgcacccacacccgactatccgcgctccaaggtcaaaatagtttttatcttcataatctgtcaatcaaacctcttgggcgagaaaatttaaagcgctgcggagatgcaaaaatatttgcggccactttaccgcagtttttatacacgggaactgtcaatcatataaagaagggaacgccgaagcgacttcatttcatttccatttcggttgaggcggggggtcggtgccattctttgcctctcggggcgcttgcccacaaatattcaaattttttccatcgatcatcttgatctgtcaatgcggcacggcagcacggcataacagggggaggagtcagcagcggcaccattcataagttcacttctcatcatttgccactttggtccgttttcaatttgtcaacagcggagacgcatccaaaattcacttttccccagttgccattttcatccactttcctcatgtcttttgttgcccccggcactttcgcgttcctttcaaaagactatggggaattttcgactgggcattttaacccaaacagagcatacgacccaaattcacttgcagaactttcgtaatggcatttattttgcttccattatctttcattttttctttgtagtcaatggagaaaagagtttctggacggccgatacggatccaaacaactaacccctccttccaccccgcgtgccccatcgccaagattcccaatcccggtcattgttggtaattttaatttgtttattggattttgcaaatattccgtttacaggaaatcgtccacaggatgaaaattgtttggttttccacaaatatcttgtctgattttttccattttagggcggcagatgttccctgatgacgatgggtacgaatcggaagatgatgaaattctcctgccacctccgccgatccccccgcaacttggccaccctccaccaaatgtgccggtaatttcggtctcgcttttcgttgcttttctcaaatttccgagtggttttttcaggcagttcgtgttcagccaatgcatgttgggcagcagcggctgccgctgagagacttgccacaattcgaggaccatccgcaaaatgtgccggtaattttgggttgattttcgctgcgttttctcaaatttctgcgtgcttttttcaggctgttcgggtccaaccgatgcaacaaccattgccgctgagagacctgccgcaaattttccaccctccaccaaatgtgccggtaattttgggtctttctttcgattgctttttctcaattcccgagtgcatttttcaggcaattcgtgttcaaccaatgcagcaacccgtaccaatgagagccgtgccacaattcctccaccctccgccaaatgcgccggtaatcttgagtctcgttttcggttgctttttcaaaatcccgagtgcattgtttttcaggaaattggtgtgggaccaattcatgatgggcaacaaccactaccactaagagcgttgccacaattcgcccaacctccaccaaatgtgccggtaattttggctcgcttttgttactttttttcaagatcccgaatgtttttttcaggccgttcgtgtccaaccagttcaacaaccgataccactgagagacgttccgctatttgtcaacccgccaccaaatgtgccggtaattttggctcgcttttgttacttttttttcaagatcccgaatgcatttttttaggtaattcgtgtccaaccaatgcctcaaccgctgccgctgagagacatgccgcaaattcaccatccaccgcgaaatgtgacttcaatttggatcaaattgtggttgctttttctcagtctctgggtgtttcttcagggaattcatgttcgacaaattcaacgggaatacgcagtaccgcaatttgcccatccgccgccaaacttgccgtatcatccaccagaaaacgttccggtagttgggtcttgtttttcgtgcgtttctcatattttcggatgcgtattcaggcaatccaaccacggcaacgaccgcgccagctgagagacgtgccactattcgaccacccactgccaaacggacaggtaatttcagaccctgtcttttacctaacaccgaaacatcttttcttaagcaaatgtatgccaaccccccgagagtgctggaagtgatccgacggctggacgagtggagaggaagaccaagggacccaagacgtccgcctcaatgaatgaatagaatttggattttgataaaatttgttgttttaatttttgaattgataagggttaaatcccgttacctaaattgtttgaaaattattaaaattttaagaaattagatgctaaacctaacctttgacaaagattatgaaaaaatgaaaagaaatgacgaaatttttggaatgttccttctttttattatctatagattttttttcatgtgcattattttggtgctagtaagatattgtcgaatgaattaattggttttttctcttcattttaaaacatttcacgtccccatgccctgtccacttcccgcggaattgatcaaggaaataattgacgctctcccccctccaaaaacacatcggcttttgtgcgtaaattttgttttggcatactttgttaaatgtcggttttattccatgatgagaagattgtttcgcccagagcatatatcaataccaatggcccgaagaactggaatgtatttctttttcgatgtccatactccccctatttattttccactttaccaataataccatttaaataaatttataaatttttattttttaatttgataatttttaatcgatatttctgataattaaacaaaattgtatttttcccaaaagaattttctcgcagtagcaactcatcggcttttttactcccttcataaaatgtctcgcttttgccccctcgcccaaatcaaggaatcgggtcggcttaacaccccaaaggggaaattgagtgagttccaaatcctgtaaatcccacacaaatttgaaatctattacttgagtttaggccttttttatgccctcgaattcgctcgcaactaccaactgatcgagcatggaatttctaggaaggctttccgttatttaatggaaactgagaaaaaacaaagagcattagtctttgatcttatggaaaaggcagggataagcacagatgacaaaacttttggtacccaacaccttgaggcggtacaaaaatactgggacagggaatttccgggcatgttccgagccgttgttttcgataaggttaataaataaaaacacaaaaaaatcttttctattttttttagaaatttggacttaagccaattttcaagggccaaggcgttcgtaagaatgaagtgtgtgtgataagagagggagaccattgggatgggatcaaatccgcttcctggttttttggtgttcgctacttttgtgtgggttgcgaggttacgtacgatcgccctgaaagacaccggatggaatgcaaagagcgctgcaaaaaatgttgccggatgggattcgggttcccatgtgcggatgtgtgtgttaagattcactgcgaggaatgcaaccgcaacttctataacaacgaatgttttgaagcgcacaagaaggtggcttgtaatgagtacaagaaatgtgaaaaatgcgcagaagtctaccaaacacgttcgaaacacgtttgcggggaaaagttttgcaaactttgcaaagtttgccacccagggaggcaatgtttcatcaaaaaaattcaagtgcgaccgcagaaagcctacagaattgtggcctacgatctggagacgacagtagatgggggagaacaccggcctaatcttgtttgtgctgcacgtacttgtaacatttgtgcgggagaagagcgggaatgtgagatttgtgaaggccccagtaaaatcacatggtctgtagcggatggttttgacccaatgagcgagtttgtcgtttggataatgagttttcaacgatttgaaacgattgctttcgcgcattatgctgggagattcgattcccactttgtcttgtctgaactaacgaagaaggaaatcgcgacggaactgatgatggcagatttgaaaatttatcagataaaggcgggacgagtgatttttcgtgacttttggatgctcagtcagaataaattggcggaccttccaaaaacgttgggattaaacattacggaaaaattgtattttccccacaaatacaataagaatgagaactttgggaggagattgcccaacctgccacctttggaagactattgcccggacaatatgaaagaggaagaagccgtaaaattggaaaaatggtataacgagaattatcaaacggaatttgaactaggtagacagaaaaaatatgggtttttaaattatattggatttaggggaacagctgaagatatattgcgaaaacgacgtggaaattctgttgcaatcagttttgaagtttcgacaattgtttttggaaataacaggggattttgatgtgatgaaggacagcgtgacaatcgcaggagttgtgatgaagatcttcagggcaaaatttttgaaggagaggcacattccgatcatgcctgagggagggtatgagagagctgaaaatcagagcaaaatcgcagtgaaatattttgagtggcttgcccaaagaaaaggagtaaaagtgcggcatgcgtgtaacggaggagaagtggaatttggggggctgaaagtggactgtgtgataggggcagagaaaaaaataattgagtttcaggtaaaaggaaaaatattttctttttaaacaatacttaaggggtgtgcatttcacgggtgtccgagatgttttttgccttggactatagcaccaaacggacggactatggaagagaatcaaagtagaaccgaaattcgcatggaaattttgagggaaaagtgcaaaaatttttcaatcggagaagtttgggtagaataaaacatttagaaatatttattaattgttagttttaggagtgtgacgtgaaagaggaattgaagaaaaataaggagatgaaaaagttctttgaaagtgtgccggacaagggaccgatcaatccgagggatgcttatgcagggggaagaacgatgccattttgtttgtacgcaaaggctaccgaagaaattgagatatcaatgtttgacatcattagtttgtacccctttgttaattatggtaaaaatctgcttaatttttgttaaagtttcctttcgcttaagacaccccataccccgttggagtcccgaaaattgtaatgagcaggaattttaatgtgaattggacaacacccgacgacgtaccctatgatggacttttgaaagtaaaagtgatcccaccgaaaaatcttttgtaccccctcctccccgtgcacatcgatgatatgctcctcttccccaattgttgggcttgtgcaaaaagggccaagaatgagtttgtgatgacaaaagatgtaaagaaatgtaaccaccgtccagcgcagagagcatttttgggaacgttcacttcgattgaactacggaaggctttagagctgggatatcgggtcataggcttctatcgggcctatcattttgagcagtttgacagtcaactgttcaaaggatatgtgcggatgtttttgaagataaaggttgaggcgtcggggtggcccgcggaggtgaagagtgaggaggaaaagagagcattcatcgcaatgtataaggcaaagtataacatcagtttggattacgataaaattggactcaatcccgggttaagaatgattgcgaaattggtgagaaattattttaaaaaatcgaaaaattgtttaatttaagggattaaacagtttgtggggcaaattttcaatgcgcaataccctttcaaatacggaaattgtgggcagcatggaacgctggatggaattgggaagagataatacaattgaatttgggcgcccagtaaaaataagcgaagaaatatcacgggtggtgtaccggaaaaaggaggagttcatcaaggagcataaagtttcaaatattgttttgtcattgtggaccactagcgcagcaaggataaaactgtacgagtacatggagcaggtctacagggaggaagggtctaagctgctgtattgtgatacaggtggacaggaataaaaagaaaataaaaaccaaaaatttagattctctagcgtttgctcatcggaaggggcggtgtccgttaaaggaggggaaatttttggggtaaaacataaattttgaaacgcatttaaattgtggttttaagggaaatgactcgagagtatgcggacagcgaaattttggagtttgtgtccgcgggcccgaaacagtacgccttaaaactcagaagaaagaaggatggtgtgatttggcacaaaaccaaaatcagagggatgacactggataaacgaaacgaatttaaatatgaattgttcaaagagatggtgctagactacaaggaaggggtcaagaaagtttttcactacccggagaagattgggccgacaaacgacttccgggttctctcaaaagatgtacaaaaagaatatacgccggtgcagaaaaaaggaattattgacgatcattttaatattttaccatttggatattattaatttttgtttttggataattttgtctcatgtttataacatttaatattttaaattaatcaaacttgtttcctatttttagaatgtcaaagaaaaatttccaagaaacttcaaaagaaattcgccgctcgaaaaatacaaaaaattatttcaagaacagttctaatttgggaaaatgttttgaagaagtggaaagtcacacaaacgaaaataaaaaatttgggataaaagaacatgtgactactttctattttaagtgcccagaaaacgaagaccccgaacaaacgtttaaaaaaatcctgaaaaaattaatgacggatgcgatgaaccgtgaagctgagccggactggaaaattgagaaaatttcagtcgatctgtattgcagtgccctgtcggacccagtgatcatccctgcccgccccttccaacattcgaacccagacattgttttcaatgagttcatgcacagacagcaatcatttggggaagtgaatttgttagaccagagaatttcgataattattgccacttattcctttcctgttaaataatttttaaattttttaaatttctttattttttgttgattacaatcgttatctattcgagttttttctttattaatttttcagttaaaatgtactcgtttcaaaaatattttgaggaggctctcgaaaaagaagagtttttctggcagaaaaacagagcagaagtggaggcattgttaattgaggcatcaaattataaaattgtagtacacagggactacgaaagccgctattctgattatattgccacctatcgccgcacctctgtcttctgtttctgcatgattgagagaaatttaagatttttttacgactcgggaaccgggacgcctataggaagggttacaaccgtgctacatgttaccgttgaggcgagctatacaggagagggattcatttcgcctatgttttccttttggttttattgggagggcaggagtcaaacaacaaacgaatctttcacgagccgtctttatttgtacactgtttcgatgctaagagcaatgggcaaagcctggggcagagaactacttttgaacccggttgaagttttaattgatatcttctaccagcgtatagataggttggaacatggaaaaaaccaattaaaaaaaatttgtttagagatttggtcggatcgtggtcattgctctataggctcccaccctcactttttgacacttcacgccgggcggtcgcggagaataaactggaagaatttttaaaattaccatcattttttcgcatgcttttttataataaatattaaatgtaaagttctttttaaaattcggtttctgaccaaattatcgattcaatcctaatttgctattttttcgtagaaattcagaaaaaatgcaaacaatcgttgaaattaaaaatattgagttagttggcggcgggagagtcattgctgtgagagctaagattgaaaatgtagtgcatgcggagtacagggtttgtattaaaaatgaaaaaaaatatcagtttttttaaggcttgcgttttatgccgtaagggggtgtgttcgtgtggcgttgagaaggtactgacgccttatttgaaggtgtccgtaacggatgatacaggagttttggaaaatgtggcgtttttcggtgtgcgggggaaaaaaaatggaatggtaatattttaagggaaaaaaccgtacaaatttaaatttaggaggagttgaaaggtttgtctggggccgtgtgtacagtgaaaatcggggcgagggtgaaagaattcggaggaaagaaggggatatgttactctttgatcgatattgtcagtctttaaatctataaatacgcttgttaatttttattaataaaaatgatgatcttaaaattatttttgctctttattatagtaaacgtggcagaaagttgctgctgcattacaaaagaagaaaaacaacaattaggtagtacacggcgaacaattgaggccgtatttggagatataattaggttaacgaaagaggccaaagatttttctttctcggcacataataccatggttgaagctcaaaacataaaagacaaaaatcctaatgctcatggggtaaaattttggcatgaaaagcttttaaatg

SEQ ID NO: 4819 - DNA, 954 bp, Heterodera glycines
  unsure (1)..(954): unsure at all n locations
gccgccgaaacgtcgccgggacctttcgttgtcgcaaaaaataaataattttttttcaaaatttcaaaaaatctaaaaatgttttagcttttttgaaaagctaagtgttaataaaaactaaatttgctgaatttaacccaaaaacttgaaaacattttttatttccttgaatttcttattaattttttttttctacaatttgtttcgaattaggctaggtaactataatttttgataattttttcatgattcttttttctaaaatttaaaaaacttttgtcccgacgacgttttgtcctgctctctctctctgtacgccctccccccgtctgctcaccctccgtgtcgctgccgcccattatttcgtcggcgctttgcgtcggccgtccgtccggcggcgcgtcgtcgtcgcccgcctcgctggcggatgagaattcgttttcccagcacagctcgtcctccgcgttcgggcagtggagcagtgcggagattggcgttgatgaagcggcggcggacgcggcggaggcgcggcgtccgtcgcggtcgccgtcatcgtcaggcggcagttggagcggcggcacgcgctccacggcattcgggttgggcggaatgcgcgaagcggacgtcaaattgctaatgtcactgcagggaaagggcggggtaattagcgatcattaatagagtggggagaggggtaattgtcatataatttgcgagccttgggtaaactttattaaatcgtaacgaccaaaaattggcggacgggaaaggaaaatttttaaacaattaagctattttgatttttttcccgttccggcgacgttttaatgacgagtttttgtcctttcccgagtcagtgaaaaaaattttaaattttctacaaaaaaatttacgaaaaatcggtgccgtgccgagacaggcgccaggactgangaaattttgaatttcagatga

SEQ ID NO: 4820 - DNA, 7693 bp, Heterodera glycines
tgcggcaaaaacactcgtccaatttgcgcaacaattcattttcaccgcccagacggaccgcgtaaaaaccctaacgaattaaaaaaatattttttaagtttttaggtgaattttttattctaaagaacatttaacgaaaaactttttttttgaaaaattacaaaattaaaaaagtccttccttcaaaattaaaataaacaaatgaaaccaaaaaatgcatttttttaatttcaaaaaaaaattgatttaaaaaagaatctttgaatgaatgggttattatattccacaaatgaaaaattacaattttttttctggaaaatgaggaaatgaaaaaaaagttaaataaaattaaacgaaaaaaagtatttttagaaattttctattttagtttaaaaaatgaattttgaattttcaccgtaaaatgacctgcgccccaatttttcctgtttttttctttatttgctttacatcggtcagttgcactgtcctgctcggacttgacgatggggacgggtcatcaccaggagcagcatcagctgaactaccaccactggtggtggacgaggcaacaagtgacgagcgttgctcgatcagctggtcaatggagctccacaagcagttcgatttggccagccggcacaacaatttgtaggccatgatggagccgatgccaacaacaaaagcggtgccactggtccgagctgtacacggcacagaaatggatgatgaattaatgatgtacaactaatcattagtttattttgaagagcgaatggttcccaacgaaaaatttaaaagaaaattttcaaactaaaaaatttaatcttaggtttattcataagtattcaaaaaaattgaaacaattttcagcacttttttcaaaaatttatgatgaaaagttattaagttttttcaaaaaattatacaaaaatttcaaaaaattttcgtgaggaaaacgataggggggacgaagtgcaccctttatttttatcccggcggcactttgccaaacatgtttcccaaaaaaaagtgtgttttgcctttttgcgtcaatcttggcattctaaattaaaataaaaaatcctcccgtgatcacaggaaaaagatgttaagtccaattggcataactattgtcatgaccgtgccacggcatgccttggtagtaaaattccgagggcgaggaggggggggggggggtaatttgtatatattttattgtttttgcctattttggcacctctaaatttgattttcagcgtgccatagccaatgcgaatgtgagaactgttgctgctgcaaaaagtgccggaaattcgttgcaatgtgcgggtgccccactgaagcaaagactgccaaacattgaaaagggtggtcatttttaggggtttagtgcagcaaataatttgaatttgccaattttggcaatgcgtcgtgcattaactctttaaaattcatatgagacagaaaaaaagcaaggaacatattctatggatttccagggaatgagaaaaaaattgaaatggaaattgcccaatcctaaaaatgcggagaacataagaaattcctaagtttttgcagcaaatattcggagtttgtcttagtctcgaagatagatttctcaagacatttggtccacgagcacatgtatacttcatcaaagatgcaagctgatactcgaaaaatcggtatcaggacttgaattagataaaaaaaattttggggttcggcatttcgccgccccaaaaatgatgggattggatccttgggatcggctcgaatcttagttccaccattacggaaatcctttttcagaagtaaacaaatggatcatttattatttgaatttgccttccgccggagcgctgcgccgaatgattttttcgcaaatttttcgcttgctttaaatagggggggggggggagacagcagctgtttgttgccactgctgctgctgctgataaagcaatcagtcatcattcaatgtgaattcattcatctcgtcaatttccattattattaatcatcggtcggtgtcagttgaaaatgacaaaaaatggcaaaaatattataatggggcggcggcgggcgaattgttttgttttgttaaaaagcatcaaaatacgcgctcaaagggcacagaatagcgcacaaaaccaattttaaacaattttttcagtcacaacgccaataaacccctcaaagttcccagccaacaattttttgtcgcccccccccccgcccactaattgcgtttgggatcgaattacgtttcgtggccatttgttgtggggcaagcgtcttaaatatcttgccaaaaagagtttctgtgttcggtcattctcgtggttaagaggacaaaatgaatgtgtgtaaagtgaacaaaaagaatcaatggactggagtgatcagtgaacaattaattaataaactaattgagttgatctgatgaattatgactggtcagtttagacaacaaaaaattaattaaatgattaaaaaataaatgctgtaattgaagcgatcaatggtcaattagatggataacaaaataaccagttgaaattagtcactcggttccaaagaacaatagttgatcagacagagaggaattgaagtgattgaaatgattgatcatttcaaggaaatggaacattcaaacggtgttttcaaatcattttaaacaattttttcgtgtagagcatagttgtctgctattgtaaattttaggcttttttggcatgacccacaaactgatcagaaataaataaaatacaggctcgattttttgttttttttaaattttctttttgtgggcaggccaaaaaagccaaaaatttatcatagcaaatcgactatcctctaatctctaaagtataaaaatgatttaaaagtaatttgaacacctatagttaaaaagtattcttgtgaggaaaattgatcagactaacgatcaaacgaaattaaggaactccaagcaaaataaattttaaaaaagtaacgaaaaaaagaaagatgtaagaatgaatgaaaaatatacttagggtggaacataatttttgatacccaaattttttccaatttttaaaaattcataactccgttatttctgcgcctatttaaatgaaatttggaacccaataaaaaatattcaaatctcataaataggtgtgcaattaaagaaaaaagtgtgtactttaaataatttgggaaggatgagaagcaaatgaatgacagtttcaatcagaaaaattatgacactgatcacagttggatgaagacaacaactgtttaaaacttaaaaagtcaaacaaattgcccccagcaaacctaagctaaacatttcaaagtttgaggctttgaggtcagaagaaatttgatcaggaaatgaaataacaaaaaactacccaactaacaatttactgctgttgctctcattgctggagagccttgatcagatcagagatccgttccatggcagatctatgaaccggcccggtgaaaagcagtgcaccggatgttcgactaaattccacgagtctctccagactcggaatttgccagattattgaatccccgcaaaatgccgttgccctagttagacaagagatttttttggttttgcaccgccaaaaaaattcatcgcacactcacaaaagcaaaaaactattttacaatgatttattgactggccacaagctcacaatgtcgataattttgtctgtgtgtatttattgaaacgatggtggccaattgtcgccgccattgagaattgagcgccccaaattatttgggatggccgcggaaattgggcaccgatgggcccacaaagattggccattaaatatccgctattaatccgccggatgggcaaaagattggccaaccccgataaataaaggcgaagaaagtgtgtccaaatgtcacaaagccttggccaattcaacaaatgatgttacaacacaaaagagtggaactattttaccattcattgggaatgggtcagcagaaaaattagtaaactatctgatcagtgtcagaagagtgatcgggaggggtaaagtgaatggaaaatgagaaaaaaaaaacaaattattttaaaaacaagttcaatatttttttatttaattattcaatttatgctaattattataaaacaaacttaatttaatttggggattattcattgccttttttaattgtttggggttttattttcgcaaaaaaacgcatcattttcatcagcaatagcaaatgacgaaacaaaaaaaaaagttgaagaggaagtaaaatctttagaaatttgatggaattgtcctcaaaaagatgattgagtttttccactaagtctagcctatgtttcaaattgaaaaaaattgccgtaacaataaagaaaaatgaaaattagattaaaaaaatgcgttttaaatttaaaaaatatatattaatacaaaaaatcaaagaaatttcatgaaataaaataaaattaaaatgcatcgttttgacgttgaatgaatgaatgaatatcatcatttacctacatattatttgtcttgttggcgctacgacaattatttattaagggcaaaaaagagagaaaaattaattattatttttctcttgaaaaaatgccctcaattacctacattgaaaacgtttttgttcattgtcaccatcatttttgtgctgattgcgattttcatagagaaaaatatgacaaaaaagtgattaatgatgggcaacaaattaccaaatggagcgcttcaaaaatatgccttaaaatttggatttttccgtcaaaattgcaccatttcggacaattttatccaaaaattaatagcaatttttgaatcatttcacgactgacaatgacaaccgatatttgcgcttaatgttccttcctattatggtgatcgcggcatcatttattgactgattgagcattggcccattttatgccgaatcgggcaattttataatgtgagagcaaattgaaccaacttttcttagcaacaacaaaataagcattcttggtgtctgtcgataccttgcaaaatcgaccgaatcatacaaaaaaaagcttcattttgttgttgctttgaaaaattttcgtagcatcaacgatggagggttgggtcaaaacattctctgtccattaataaatatgccagctaatggggggggggggtatcccatgttggctaattagccagaaataagcgtaacaaaagagaataattttgtaattagaagaggcttaagggaggataagaacagatttgtgcttttgtgcttaatcaaatgggattatttaattatatggcgaaacgacggattttcgagtttggctgggggggggggaatccccggccgacagttcgttcgctgtcgttgctcaaacactcaaatgtacccttgtacaaattgactttataaaaatatttcacaaatttcagtgttaaaaatggaaaaagttaagcaattatttagaattataaaactcaaatatataaaaaaaaaaatttaaatttctatgacatcacagcagcaacaacaacatggtttgaggggaatagaaaacaacaacaaaaaactttactaaatccacaggctttgagccttaaattcagagcattagggctcggttgggttgggaaatccaaaaaaaaaattcccatttcttttgaaaccttaaagatttaggttctacaaaatcattcagttgtgttgcattttgcaatattttctaaatttagcagcattcacataaatcagtttttgcattgtaaacgaacttcccatttaaaaccatttaaaagtgccaaagatttttggcattatgggtccaccatacaatacgtgcagatattttcgggtttgagttgtaaaaaagggatggatattccctgatttttacggtttttgaaaaaaaaattcatggccaagtcgaaacagttggcccaccggcaaatccaaagaccgaaaaattccatgacccaaattttaaattatattaaatttttttcaaatttttaatttggccctacccaaaatggccatgtccacattctgtgccgcttggacggacagtcccaactgcgtgaccaattggttgccgagcgcattccctccactgatccgcgcttccaacgccaacggaggcaaaaggccggcgatgagttgggcctggaaaattggcaatcttcaatttataaagtactttagagcctaaatgacaattaaaagtttcaaaatggttgaaaaagaattttttgaccaaaaaataggaaaaaattatttttattcggcagattttttaacacaaaaatgccaccatacattttaggtacttaccattgtttccacattatcagcatgtgaacgacgatgggacatgatgatattgatattgatgttgagcaataacagccaccaaaaatgaaaaaaattgctaaattaaaaaaaactggcacaaattgtaaaaaatttattatgtttagggcttatattttaggctctaaaaattgccaaaataattaggttttaggctctaaaataaaaaataggcacttaaaaaaaagaaaataggctttaaaaattctcaaatttaggggattagaaaatgacaaaattttatttaaaaagcgaacaaaattaagcttgcgatacataaaaaattttgtcaaaataaaaataaattttcgagaattggaaaaattttcatttcttaaggggtgtattttttctggaaattttagggccgattcttaggagatgttttttttcgttttattgcatttttgttaataaattttgaacaaaacgccaaaaaagatcaaaataggttattaaaatttttttgacgtttttaagactaaaaataaaaacctagaaaataggccctaataattcgaaaagtaacttaacaaccacccaaagtatgtttttcgtgctttcaggccactccggaatcgaaccaaaaagcaaaaaattttcgtaatttagtaaggtgtttttcaagttgaaccccaagggcttaaaactttaaaatatcacacaattaccgattttgtagtcccaaaaactgtctccgtctactgaaggcttcaccaaaaaaaagtgtggcttattgctaattatatgtatattctgtgccgctctctgctgttcgttcacaaagtgccacactcaacgagacaaacggtcgaccctcaacagaacaaaacaataggcaatttttttgttcggcctttttgttgtcaaaaccaacaaccactacacaaacacactaatctatgcagaacaacaacaaaatattatcattattattgttttacaatcgttgtcgagagtctcgagagaaagggcaaaaaacggacgaattggggggggggggggggagacgagaagagggatgcatttacagaagaagagcaatcgatcgatttattcattttggttggttgttgtgttggcttacgccgctaattaatgggcaaatattgagagagcggtcggtgggggtggtgggaacatggaacaacaagaaatttgaaaatagaagaagcactggcttcttgatagacggaacccatgggtttaaatgtgaggttgggtacaaaattttaaaatcgattagagggtgagagattggaggaaaattttaaaaaaatggttttgaggggggggggggggg

SEQ ID NO: 4821 - DNA, 485 bp, Heterodera glycines
atagaaatatttcagtataaccataagccggaaaaatggtaaaaaatattttaaaatagattttcgcagggcaccattgggtaaaagtgacgcgaaattattggataattgaggagagacagtcgagaatatcgagcggtagtgagaccccctgttgtcgagatggggggggggggggggggggagaaaatgaagcacttaattgagaggcaattagattaattaatatttgcggagaagcagagctcgccgcagcttttgcttttaggcttttggctaattcaagaggcaattaaaaaattagacaaaacgcaaatatttttaatattttaaatattttaaacggatttttcattatgttaggcaagcaaagaaagtctcttctttttttctatttgacctctaattttgaaaaatggcttttcttagcttgatgtacaggtggggaatattgaggagaaggcttgtgtgagagagaacacata

SEQ ID NO: 4822 - DNA, 2911 bp, Heterodera glycines
  unsure (1)..(2911): unsure at all n locations
aaatcagaatacggaaaaaattgttttataaaaaaataatcttgcaggaaatcgtctcaaaaattattcaaaaaaccccaaattacgatcaaaattacggaaaaatcccaaaaaatccgtaatccgtaatccgtaattacgcccaaccctggctgggagccctgattaaataattgggaaaatagacccctaaaaaatgacttgaaaattttcagaaaataaaactcctaagaattgaaaaattttctcaaaaattgatcaccaaaaattttttcttaataaaaatttctatttaaaaattttccttatcaaaaacttataaaatatttaataatcatttaaatgaccaaaatttagttatttggtgaagttttaagggtttttcctaaaaatcctaaaaaaatttgaacgccttttttcatgctttttcgggattttcgtgccttttcgtgccttttcattccttttttcaattttttggtgcctattattagagaacggaccggacctgatccggtaccggatttttctggatcaggaatccggtccggcgattttttggaaaaatagggattgaccggattacatagattgaccggattatgagagaccggatcccgaatccggttgtttttgaaaatgccaatccggtccggcgaatttttgaccggatccggttcggctcggtctcaatctcaaccaaaaatccttcacttttgttcattttcatttgaaaaatatctctttggcataatgtttctaactttaaatgttcaaaatttcgaattttttccctcggcggggcctgtcggcaccgcttggccttcaaaacttattttttcttaaaaaattggctcaaaatcgcgaaaaattggtaatttttagtgaaaaatccattaacaaattgcctaaaattttcaaaatttttcccggcggcgccttctggcaccgccgtcctctttcctaaaaattattattttttttgaaaaagggcgccgcaaaaaaagattactaatgaaataggttttcaaaaataaaaactttaaaattctttaaagtttttcttgaaaaattgaaacattatttttttcggtgcattgtcttttcgaccgcacatttctggtgtaccgaatttatacatataattgatgacattttgcggggttttttcccaaattaacatgtgaaaatttaaatttttaccaatccggaatccggttccggatctggtaatttgaaaaatagggattgaccggattacatagattgaccggattatgagagaccgaatcccgaatccggtcatttttgaaaataccagtccggtccggtccggcagatttggaaaatccggtctctacctattatagtgcccttttcgtgatttttgtgccttttaaaaaaagaaattcatagagatatttcatttttccataattaattattccaacttttgttagtctttttcatttttttgtgcctttgttgccatccggtaccgtttatcggtaccgtcgctcataattttttttaattccttaaaaaatccacaaaattaactattttagaaatttattanaaacatttattacttcattgttttatagaaaatttttatcatttttaaattattttaatcccataaaataatatttttgctattgattatattaaaaacaacaatattaggttggttcgaattttcaggttcacatataatgccttattggtatgttggctttatgcttattttcgacattgttggtgcctaacccaagatttcaggaattccttcataaaatgcacttcccctaagaatcgaactgaaaatttaaaaaaaaaaggtcgagttacacgggtctgggtacctgaccagtcccagaccccgggtacatggctttttcaaaacatggaactgtctttttaaaaaacccagttcgggtctaacctgctcaaaaaatacactggtgtgaatggggatctggatcaaatttttaagcaaagttcgagggaagaaattttttaaaaaattaattaatatttatttaatatgaaattgattattgctccgctgcttacaaatgagttgttaatctttttgactatgttccttctttctcaggttcaagttttcctcattctgatttctttcaaacattttcttaaagattttgttgaaaactttttttgaaaatttgagtgcactttgtttcgaaaattgtttatattcaaaaatgtacccataaaattttgtattttcgttttggaggacgaattcgaggaaaattttaaaaaaatttcatctcagggggaaacttggaattttctgtccaaaattctttatttttttaaataaattaacaacttaaattttttgcttttaaatcgcttatttttggacggtttttacaaaaaatttggggacattggggcggggacggggtccggcgccggaaaaattttgaaattttgagtgcgatttgttaacagaatttgtcgaaaaatgaccaaatattagggttatttgtggttttaggctgcttacaaaaaaaaaaaaattttaagcagaaatattttttattacttaaatttaattgaaatgatgtaaagaaaacataaaaaattgtatgaaccgtcggggatttgaaccaaagagattaataataaaagtcaaaaagtttagccactattaacaatgcttgctgtaaaagaaattaaaaaattttttttttctcaaaaaatctcattcctcatcaattccctctcttttctcaccagacccccattattaccagtgcttaatttagtcccatcgggatcgggactggcaaaaccgggaccgggatttcaatttttccaaaaaccgggaccgggacctgaaaaaaccgggatttcccgtcccggtcccggt

SEQ ID NO: 4823 - DNA, 5622 bp, Heterodera glycines
ttttgactatgtcccttctttctcaggttcaagttttcctcattctgattttttcaaacattttcttaaagattttgttgaaaactttttttgaaaatttgagtgcactttgtttcgaaaattgtttatattcaaaaatgtacccataaaattttgtattttcgttttggaggacgaattcgaggaaaattttaaaaaaatttcatctcagggggaaacttggaattttctgtccaaaattctttatttttttaaataaattaacaacttaaattttttgcttttaaatcgcttatttttggacggtttttacaaaaaatttggggacattggggcggggacggggtccggcgccggaaaaattttgaaattttgagtgcgatttgttaacagaatttgtcgaaaaatgaccaaatattagggttatttgtggttttaggctgcttacaaaaaaaaaaaattttaagcagaaatattttttattacttaaatttaattgaaatgatgtaaagaaaacataaaaaattgtatgaaccgtcggggatttgaaccaaagagattaataataaaagtcaaaaagtttagccactattaacaaattcctcatcaattccctctcttttctcaccagacccccattattaccagtgcttaatttagtcccatcgggatcgggactggcaaaaccgggaccgggatttcaatttttccaaaaaccgggaccgggacctgaaaaaaccgggatttcccgtcccggtttaaaaacaattaattgaaagaagtttataatgattttgatgccgagctgaaaaccgaccgaaattttaaagatcataattatgacaaatagtaaaatgattatttataaaatatatatttttcgtgaatatatttctgtattcttaaaaatcgataaactttcgattcaaactctattgacgaattaaggatacggggagatttaaaaaaatgcaaaaaggatctaatgtaaagggccgcaacttttagtgacgaaaaatctcgaaatagtttaggcttaatcttcagcttagtcctaggcttaggtttcaacttaggcttcagcttaggcctagacttaggcttaggcttcagcttaggcttaagcctaatcaagctgaggcttattcggggttcgaatttggtcaaaattggtgtcataaccgttttcagcgacctcgaaaatctctaaaaatatttttccttttaattatgatttcgaatttttgttcgaattggggttcgaggttcgggattttgcaaaataaaggtcatattcgggttcagcgctacaaattaccctaataaaactatttaaaatgccttttagcgttttttattaataaaaagcgaaaattgaaaccaaaataaaaagcgaaaaggcgaaagcgaaatgtcacaaaaaagcgaaattttttttccaaaaattatatgaatttgaaagactcaaaaaattcaccttttaatgcttaactgttctgatgattgactgcttttttcataaattctttatgcaattcctctggtgattgtgagacaatgtaagggtcgacgaggttggggttttaatttttttttcttatgcacatagtcaaaaaagctttctttgtggcaaaaaaggtactttcgagaaattgccttccaaaaaataaattatataaataaaaatagtgaattttattcaaaaaaatcaaaaatttctgattaccttttttcccgttataattttttctaatatttcgtgaataaaaattattgcaaaaattatttcagacattccggaaagttctttttgacagcttataaccgtgaaaaccgcaaagtttcaaatcgtttttgaattgaaggcatttttctggaaaactgaaaatgcggcaaattttcacatcatttttcattgatttcagtaatctttgcaaaattttcacaccattttcagtgatccgaatgtggtgaacgaccagcaacaacagcagaaacacattttaccgcttcctccacaacagaacgaacaaaacgaagtcaaatcgacgactggtctgacacctgctgaagctgttcggcgttcgcagatctctgcattggtggaaccgaaacaaccacaacaacagcaacaagaaatcaacaacggcgccggcgacgaacatggcggagtgcttcgcaggcaaaaaaaaaaaaaattcagtaccaatttgtgactcaccattttccccttttcaggtcaatttcggtgctcagtgataattggtacgattgggttgaaggcaatcagacggacaaagctgggtaaactccatgttttaagcaattttgatcgattctttccccacgcacagtttaagcaatcaacaacaaaatgtcatcgtccatcagtcagtcaacagcaccatcaacgcggatgagcatggcatatctgatgaagccagcccggtcgcctcactatccacaatcgaccttggccgtgtgtacaccactgttggcactgtgatggaatcgctgctggttaactttgcgcacctgtggcaatatcgggtgagcaaccagagcggcaaatataccaattaacacggggacggacgatgaattaatttgtctcccccgcttccgtttttcagcttttccgttttgccttcgtccttctgtccatctacttctgtctgggcttcttggaacagtgtgctgtcgcgatgaccgccgcatgcgtccgctgggcttggccaccggtgcacttcatgctcggttcgtcacggggaacgctgttctatttgactgactggttcgacttcttgtcaagttgggtgtgcgacatggccaattctatgcataacacttcattttttctttaaacctgactgtacaccccccccccccctcatttactcaacgctttcatcctcctttttgatctcgattttgaaccttcaaaatttattcctaattcaatttccaaattcagttttcatttttatggatctaaatcattcaaggaagattacgatgatgatttctttgaatcaacatgtattgaagtgattgcgccgccagagcacgaaatcatttatggaccatctgcttttgttgctatttttgtagccatttatgccttggcgacgggacgtaaagttcaaaaggcaacagcattaacgggggaactgctgcgcaacaaatcggttgtaaaaattggtggactgcgtcagaaagtgaaggcggcagcgaagtcgggaaaaaacggatcattttatcggtggaaaatgaactgcagttcaacaagctggagaaagaaaaatcccgaaaatacatgaagggagaatttgtgatcgattgttatggtcttctggtgttggagcaggaattggatgaggaataggaataggaagttatattttaaaaagaaggccggatttatacacattggaaaaatgtatttcattaaaatttaaaaaataatgtgtttttaggaaaaaccctaaaatttctgcgcatttaaaacagcgggataagcactttaaaaaaaaaaccatttttagtttgctttaaagttactactacggtcactttttgagaaaatttcttaacagaaaataaacctcccgaaaaatgaaatgataatttttcgaataaactcctcaaaatggggaattaaaaaaaatatgactaagtttatgtatttacttttgatcaaaatctaattctcaaaatttttctcattttccattaaattttacggtagatctttttggcatactattcagttgtgtgtaaacccggctctattaattcatttctatcatttctaatgaaggttattcattaatagggttaaacgatctatggactgttcaatgttgtatatagatgtcgatgatatatgtatattttgtattgttgttgttgttatataaaaataggatgacaattgttataacgtaatattttggaaaaaaaactattttctcttctctttcacctgctctttcccttcctcggtctcttttcttctttttttctctttcacctactctttctcttctctttcacctcctctttcccttcctcggtctctttttttcttttttctctttcacctgctctttcccttcctcggtctcttttcttctttttttctctttcacctactctttctcttctctttcacctactctttctcttctctttcacctcatctttcccttcctcggtctctttttttcttttttctctttcacctgctctttcccttcctcggtcccttttcttctttttttctctttcacctactctttctcttctctttcacctgctctttcccttcctcggtctcttttcttcttttttttctctttcacctactctttctcttctttctttctcttcctctttcacctcctccttcccttcctcggtctcttttcttctttttttctcttcttcgttctcttctttcttttctcttcctcgttctgttttttcttcccctttctctcctttttacctcctctttttcttcctcgatctctttctcttctctttccttcctctttcacctcctcgttctcctctttctcttcctcgttctcttctttctttctcttcctctttcacctgctctttcccttcctcggtctattttcttctttttttctctttcacctactctttctcttctttctttctcttccctttcacatcctctttcccttcctcggtctcttttcttctttttttctctttcacctactctttctcttctttctttctcttctctttcacatcctctttcccttcctcggtctcttttcttctttttttctctttcacctactctttctcttctttctttctcttctctttcacctcctttttccttcctcggtctctttttttcttttttctctttcacctactctttttcttctttctttctcttcctctttcacctcctccttcccttcctaggtctcttttcttctttttttctctttcacctactctttctcttctttctttctcttctttcacctcctctttcccttcctcggtctctaaataactgatttgaagcaattttgcaaaatgtccttattttggacccaaaaatcttattttttggccttgatgttcttattttgaaaaattttcgatccgagccctggattaaacaaaaaagcatgtataaaataattaaaaaagcgtaaaattctccatcaaattgggctttttatgcttgtatgctatacggcaacaatttcagtacacaaaataaaatattatttaaatttcatttcgatgccaaaatttatccgacagcgaagcgatggcggtacttgaattgtaataacttatctaaaatacggtgtgtgtccctttttgtccttttgaacataaaaaccatcaccacttgactccctatgttctgctgttgttgttgtcccccccccccaatgtcgcgtcggccttcactttttatgcaaatcgttttgccattgaattgggggagggggtggacgaggacgaggggggcggggggggggggactctgctgttgttcgtttggtttgtctggggttgaggaggagagcctgcacaaatggacaataacttctc

SEQ ID NO: 4824 - DNA, 4706 bp, Heterodera glycines
  unsure (1)..(4706): unsure at all n locations
tcactaatttttcactcagaccccattcttaccagtgcttgtttttcccggttcccggttgccctaccgggaccgggacctgagcttttcaaacccgggaccgggaaccgggaccgggaccccggatgaccgggaattcccggcccggtcccgtggcactctagtgttaaggacttccccataaaattttaaattaataaggaaaagttttcatctctatgcacctcagtataaatctttttggttggcttgttccataacgctctatttcattgcgtacatgcgtcctcctcataagcagctgtaaactgacccgaaattgccatgcccaagcacgccttgaatcgtccagttgacgcctattaccatccccggttcaatgtttaagttagccattagacagctaaattgagaacagtcacatttggagcgacccaagcacataattcatttagaaaaaataacagtatttacggctatctgtaccgattttaaaaaagtaaaatttttgggattaacttgttttaggggttttcatggccggggaaacgaatttcgaaaatttttaaattctttataatttcaaaaatcacgaaaacatgttccgaggggcttttgggtctcagatcacgaatccggcatctacttcgaccaattacgaatcccggaccccaattcgaacaaaaagtgaaaattcaaaattttcaattttagtttaaacaggggtgcgatctgtcgtgatttatcagtttgtcctggtttggagggtccaaatctgataaagtgaaaatgtcctgaattgtcatttaaaatggttatataaatcataaaatttagagaattttaacaaccctgtgcttaaaaaattatattttcttgaaaattaaaaaatttatgtatagaaacctggtaatcttattatttggtcaattcttatagctgtttaaacgtagagttaaacgtgtattagttattgtttgaacttacacctgaatacccagatttgttgggtctagcaaagtaagcatgcttaattgagcaaatattcgttcaaaaactttcgattcctagcttgattaaaatttactctgcttttaaattatatatttgcaatttaaagaatcaattaaaacttttttatttttaaatccttaatttggtgcccaaacttcccggtgcccaaatttctggtgcccaaacttcccccccccccttattctaccgtagtgaaaccactcattccaagacaaatttaggattacgccatttaaacattatgccataacaattttagattaatttatttatttaacagtacggggtcaaagaattcaagaagttcacgtttttatcccgaattcggctcggtaaatttcttcgggattgccctcaattaccccctcaccttttctcttttttcgattttttgaaaattttagttaattcttcctaaattgttgttgcatctaagttctgttttataataatagtaatgtcgctgctgcccatcagtcgctgctcctcccttttccatgccgcccgttctttggcgtgccgtcgtcctcctcccctggcgtcgtgtcattgtttgctctcagtgccatccacggcaccgttttcgtcccatttgtcgtcgtcgtcgccagtcgtcctccacagcctcacaactccgggtttgtcaaaaataaacatttgcccgcattcatttattttcatggctttgcatttttttagagtgtcaaccttctaaaaacccaaaaaaaaaatttatattctgtttttttttattaacttttaattttccctcaaaaagtggagcgagcaaagcctcaaaattgcagtgctaaagcgttaaaaattggggtgcgctttactaattcatttaacaattcggatgcctttttagaataaaatttagaaaaatagttagtgaggcgtcatcggagcgatttaccatttttattccaattaaagcgatttttcatgccccctctctttaagtgacctccactcactggtgccatcgtcctgcatttgcctctcaatcgacgccatccgcaccggtgccaaattcgacaaacaatactccggctgctgctggcggtggtggcattgggttgtatcagcgctacgagcaatggttgcagaactatccggccctgtacaaattgcatcgactcactgttgacggttcgaattcaaaaaataccactgaataatgaatgaatgagtcgacgattatttcgcttttttcgccctaattcagaaaaatttaaaaacagaaattttttaaagaaaaatcatagaatttttataagaaaaaaacgatttaaaaattcttttatttttaatttttctgatttatttaaattcaaatatttcttttgtgtaggctccaaatggtgttactccgatctcaaaacgttcttttggttggcctacggactgcgcaaagggcgcatcacactgaacgatctcaacgcgcgcgaactgttcatctacatccaggctggtggagttgtgcccggggggaggaggggcagttcgtccccccccgaaaagttcaaaaaattttcaaaaggttttaaacaaacttattgttagcaatttcacataaaattttcgaaaaatcggtagaaaattttgtcgaaaggagagaacgaaatgcacccgtcaaagttccgactcaactttcctcacaactgacaatgagccaccaaacaattaaacggccggacacataaagagagaaaactcccccttcaattagcttgtgtgattttttctctgtttcattcccaaatttgtcataattttttgggtcgtcccactttttttcacttttgccctttcccatcggtctcatttgtcagtgcgcccctgaagtggtccacattacgaccatcttcattttgctcgcaattcctgtcagcggcgagctcgtcactttgttggcgtaagcaaaaaatgaaattaaaaaaaaactaaaataaaatttaattgtcgctgtccaaaaaactcgggaattccgaatattggcatggcatacatacgccaacacggacggagcaagtcgcgtcattccaaatttagtttttttatttaacaactcaatggtttctccatccaatcaaatatcttccttcatttcccatttttaggacaattttatttttttatattctttttaagaaattcttgcctcgtccattcactgtatcaactatttaatttaaaacttttttggttttaaaattaggggggggggttaggtacctgccgctatggcgaattttttttttttaattgcattttttgttaaaatattaaccgcttctcccatgggatttgatttttaaattttttccccccccaaaaaccaaaaaaaaaaaaaatcctataaaaattttttttttttttctccccgcggcggggccccccaattgttgggaaaaaaattgagttttttctcccccccccggggggggggttggtgcgcggggccccgggcgaatttctttctcccttaaaaaaaaattttttttttggtgaagaaaaaaaaaaaaaataaataaaatttttctttaaaaaaaaaaaaaaaaattttttttttttttttttttttcccccccccccccccccccccccccccccccccccctcccttttttttttttttttttttttttttttttttttggggggggggagagaggggggggggggggagccgcccccgccccccccccccccccccccctttttttttttttgtttgggggggggggggggggtttttttttttttttttgtgtccccccccccccccccccccccccccccaccaaaaaaaaaaaaaagaaaaaagaaaaatattttttttttgtttttttgttgctctcttcttcttgtgtgggggggggggggggggggggttttcttttttattaaaaaaaaaaaaaaaaaaagagggggggggggggggggggggggggccggccgccccccccccccccccgagaaaaaatattaatttttttttttttctccccccccccaccccaaacaaacatatattatattatttttgttggggtgcgggcgcccgcgcgccaaaaaaaatataatatttttataaaacaaacaaaaccctcttggggggggggggggtggtgctcgcccctctttaaaaaaaaaaaaaaaacacccccccccaaataatatctccccgcgggggggggcgctttttttgtgggggcgccgcctctctcactaaataaccccacaaatataataagagggcgacaatattttttgggaatattattttgagaaaaagcggggggggaataacccccccccccgcccaccaaatttttttttttttctctcccaaaatttgtcgaattcacacacttgcacgccctttcctaatcctccccatctcttttcacagaancacacaggggncgggancattcaannngctcatccggcaacaaanccaaaacggggaccgtcgctgacgggggcacaaatgcaagtgttgtgtgtgatgacgagactcnaanttctccgagagtgnagacgtcaaaaaacacgcgtgtgcgcatatacgtctaattttttttgaaaaatttccggattttacgtaggtcgccacaggagattttcgggaaaaaacctggactcgaaaataccgggaa

SEQ ID NO: 4825 - DNA, 2232 bp, Heterodera glycines
cattcccaaaattggtcataatttttttggtcgtccactttttttccttttgccctttcccatcggtctcatttgtcagtgcgcccctgaagtggtccacattacgaccatcttcattttgctcgcaattcctgtcagcggcgagctcgtcactttgttggcgtaagcaaaaaatgaaattaaaaaaaaactaaaataaaatttaattgtcgctgtccaaaaaactcgggaattccgaatattggcatggcatacatacgccaacacggacggagcaagtcgcgtcattccaaatttagtttttttatttaacaactcaatggtttctccatccaatcaaatatcttccttcatttcccatttttaggacaattttatttttttatattctttttaagaaattcttgcctcgtccattcactgtatcaactatttaatttaaaacttttttggttttaaaattagggggtgtgttaggtacctgccgctatggcgaattttttttttttaattgcattttcttgaaaatattaaccgcttctcccatgggatttgaattttccagtccaaatccaaaaataacatccataaatttgtttcttccaggccgggtcccaattggtcaaactgagtttgctcgccgcgttggctgtgctgcctgccggatttccgctgataatcatttcgatgtaaaaaattgaaattttctaaaaaaaactttaccaatttctcaccccctctcccacttccatttttaggcttgtgtcgcccaaattggtactgacccggcacttttggaccgattggcaaagccaacagttccaaatggacgacctgcggcgcaacgagcgcaaactgttcccccgcattgtggacgcgttgcggcagcacaacccatcgtcagcggtgagtgatgacacaaccctggcaggagacagaaagagcggttgctaatttgtgtgcattatgttggctccgccgaaacgtcgccgcaaaaaaatataaaaatttttcaaaaaaaattctgaaaattaattgttttaaattttttggaaacctaagtaactatacaaaatttgcttattttccagaaaattcaatttttttcgtattagactatgtaactaaaaattatttatatgtcaattgacgaaaatcgaaattaattttaaatttttcaaaattttttctaactaaaaaattaaattctaattaattaattattaggccgcattggcagcgcttgagcagcaattgccactgactgttgaccaattggttacgctgcaaaagtcggcgaacattgtgcccgcctcgttggacgcgtacacgcagcagcaccgggtagctgcatcattctctcctcccccatatcactccccccaatttctttttcctctccgaaatttttttttaatttcatttacaaattagaaatttctttactacataagaaaaattcaagcaaaaaaccaaaatgtttgttgttggcccttctcctcccctccaattttttggtcggaatgtacttttggctctgcgtatataatccaatcaaattacattttccattttttcccaaatttggccatacaaattttgtcccatttttccccagttcttcctgaaaagggtgcacaatttgccgttttggaccaccgacggcgcactgctgcggcacatcaaactgatgcgtctgctcgacgcacggatggcggctgaccacgcggaggacaaagtcgtggacaaactcagcgtgcgcgaactgcagacggtgcgtgccgtgccgggaagggtcaatcattggccacaaaacataaaatatcattaaaagttttgtcaaatattgtgggctatatgataacgagggatgccaattaggtgtatgaatttcatattattttttcctgaagtgtgggaggtctctgaaaagcacaaaaatatttttgaatttaaacatttgtaaaaaaatgtctatttttgtcaaaaataagcaaaattttcattttttcggtattttcgcaaaaactatttttactttaataatttagtgaacttgaaaaaattttgaaaatatctacccctcaatttgaaatttgtatccatatttttgccattttactgccaattttgcaattttatgcacatataattggcattccccaatgatgaccccgctgtaaatacggtataagttgttgatgaatactgtgtgtttgttttacttttttg

SEQ ID NO: 4826 - DNA, 1763 bp, Heterodera glycines
acaaaactggcgctttaaaattttggggtgtggccgcataatggaaaagtaccgattagggtgcacattcaccacgtaaaccttcaagattctaaaatatcaaatgtgaacagatccgtcctcgttcgatccgctgctgtacgcacatgcgccggtgttgacccaagcgaactcggccgacttggaccggtggaggaagaagaaagggccgtcgtcgtcaggcaccgcaacggcggatggcaccagcagcacaacatcatcaccgctccaccgcagcagcaacagcaacttcttgcagtcgttggacaatttggaggagtggaaacggatgggccagcggtcggccgagttggccaagcgctcagcggacgcggtgaagccgatgctgcgcaagggcactgcgatggctgccgagcggtttaagcaggcgggcagtgcggtgaaaaaggcgataaactaacgaatgagcaacagctgatcagagtggtgattgatcaatattttagtccattttttgtgtttttattttgctgttgttttattaatggtggaaatatacaaattggatgagaatggaatttctggtctctgctctcggcaatttattaaatattatttatttcctggggcgagaggcttaaaaaactaaaaacagtttcacttgttttgaaacttctggaatagggttcttatccatatttcgcaatttatgtccgtattttggccgtggctaatgatttcgtcagtgaactatttttatttatttcactgttgtccatttttttcgtcagtgatcgaattcgacagtgaatattttcgtcagtggatactttgttttaaaatgtataatagcttattatctatggtaattcgttctcgaatgcatatatgtcgaccctaatccaacatctgagctacaggattattttaaattttggggataaatttcgtcttttaacaaattttggaaagcaacatttcactattgttcttttctggggacgggacgaaatctcgccgccgaaatctcgccgagacaaaatctcgccgcagaaatttcaaaaaaaaaattcaaacttagaaatttttaaggaaaaaattttagaaaatttttttttataagaaaattccaaaaaaaaactatttgctaagttttttttgaaaatttttcaaaaaaaacagtaaattttcataaaatttcaaaaaaaaattgctgaagaatttttcaacaatttttttatttaaattttcttataaaaaaatttttctaagaattttttccttgaaaaatttctaagtttgaaattttttttttgaactttctgcggcgagattttggggtgtttttcgcttagagttgtgtaatggcatggattcacgcacagcatgttaattaaaaaggaagaggtaactggcgacggcgtgattcgtgatcggattgatgcgataattggcacagcatgatgaactttttcaatacaatagtggaacatgacagaccgtgtggaaatatgttaggcaagactacaatttaaatcctcttttccaggacattggaaattgtgatacacttgaatatcttcagacctgtgcttactgtttacacttttaaattgtcttaagtatttttatgaactaggagatgtgttgaggtttttatggagagcacttctaccagaataaagatcgtctgcgacattactaggcagagaggtattagacactggaacatgtggaatggatataatagagaaagcagaaac

SEQ ID NO: 4827 - DNA, 1087 bp, Heterodera glycines
tacaaaatctttcagcaaattatactcaatttttcctaacggtcccgaacaaaactcaattttttactatatcaatcattgtatttaccgtcatttattctttcaaaattaaccattgtgccatttttagcttacattgagacggcacagctggacggggagacaaatttgaagatccgacaggttctctctttctaaacaaccagtattctcgttagttcatctccgttcctttaggccgtccctctcaccgcccaactcactgacattgcccaactgtccgcgttgcgtgcgcacatcgaatgcgaaccgcccaaccgacgggtgcacgaattcagcggcaccatgtgtgccggagacgacgaaaaagtgccactttgtgagtgcgatttcccattccccgtacattaattagttgtacaacgaaactcagtttcccaattaatatattttcccgcagcgattgaccaatttttgctgcgcggtgccaaactgaagaattgccgctgggtgtttggcgtcgtcgtctacacagggcacgactcgcgacttctgatgaactcgaccagcgccccgctgaaaacgtcgcgcattgacgtgatgaccaaccaacgcagtgtcatcctttttctcatgctggtgctggtcaccatcgtcaggtgagcggacgtttaaaatgagagtgccgaatgggactatccgattgtgccaacaaatgtctacggaaaaaacgcaccttctgattggaagtaattaaaacgcagaatttcggcttgtgtctggcattaaaaactagtttcgaataagcatttaaaacagaaattatggcccattgtttggatcatacgtggacaagggggcgggggggggtgggtcaatttcgtaaatcgtacgagggtccgaggcaatttcgtaaattttcggccaaaatcgaaaaagcactgggtaaagatgggaaaattgtacgaaatcaaacctgttaccaaggggggggccccgggcccccccccccccccccctcccccgaaagggggcccggcccccccccccatcgtccgccgtaaggggggggggggggggggggggg

SEQ ID NO: 4828 - DNA, 1737 bp, Heterodera glycines
acgtcattggttgaacgcgagtttgacaaatcattggaccggatggaattgtattaaaatctttaactaaagtggaagagagagaggaaataagagtcagacccattagcactggaaaaaattttggctgaaccattttactggtttcccaattacttattttggagggtgctttgagagtatcattcatcattgatgaatgagttttgtctgtactagattcagatactttttgaatggtgtttatattttgagaggccgcctcagcggattggtcatttctaaaagttaaactattaactttagttgatagatcgtttatcagtctgttttgttcatcaattgctctgatgaaattcaaattcttagatggttgggtaaattcgtcacgacgtttaaagcatttaaacgcgaggtggccaaccttcccacagtagttgcaaactggtcgagcattccagcgtcggtcattttgaggggcttggttattccaacgtctatcatttctggaaaagcgattgttccatcttctgtcattttgaggacgattatttgatgtattaaaagagcctcttgaggcttgggcgttgttatcccagttgttccggttcctctgtctgggatctataggctctctgttagagcctgtgggagcccatgttctaaagttgccttccgggtggttcggcggctcggtgttgttgaatctcggattttgttgttccgaaattgggaaaagaggtgctggaatagatttaggaatctctctatgcatcatttctgcttcccgtgcattcattctcaatatttggaaatcccttctgacgggcccactcaggggtcgagtgagaaattgagatttggattcatttttccaaaaatgctcgacagagtacctcctcactctagcattagttgtaaggtctgccgtggtggcctcaattagaggaatcagtcgtgcactaaactcatctacagattcccccccccccccttgtccatgtatggtttggatttttgaaaatagtaaagttgaaaaaaacatgtctatggacaatggggtttacttaaatcttccatacatggcaaattgatcaaccatagttataataattcatgcaaatccttgtaaatcccgtttttaaattttgataacatttcccaaagttatttttggtcatttgcattttttatgagacggcctattagtagtatgatcttaaaaggggctgtatatatgtactttgtgtgtgtttgtgcctccaatcagtctttttcagtgccatcggtgccgaagtgtacaacaaatggtttttggacggccattggtacatcggcgccattgtccattggtccttctggtggaacatgctcaccttcttcattctctacaccaatctcatcccaatttcgttgcaagtgacgctggaaattgtgcgcttcttccaggcgtcgtacattaaccaggcatttttcattaaaaatccacaaaattacaaataaaaatgggaattttcaacatttttgatacaaaagagtatggagaattttaagatgtcgcccatcggccacatttcgactcttcaattttatatatttttctaatatttcttaaaacccttccatcctttaaattgacatttttgagcatcttcaattatttttttttaaaatccccaataattaagtccaacctttttaggacattttaatgtatgacgaggcaagcgacgtatg

SEQ ID NO: 4829 - DNA, 2241 bp, Heterodera glycines
gcttccgaagaagttgctttgtgggcaggcattacattatcagatacgtcttggttcaccatcaaggcatgccttgaggcgtgccaccttttcagaatcatcccactttctgccattgcagtcaagaagatccatgaactttcttgcccatcgatcgaattctaatggagaatttccagagaagatcgtgaaagagggactgctttcagcgaaaagcatgttaacatgatggaatcccgaaggatttaattcaaattcctcatcctcttcctcactatgtatggcttcaatcaccgaagtattagcattgccaaagctattgttcggattcctgagtggagagggagttgcccaatttaagaccggagggttgttgactaatggagactgattttggttttgcaacacttgaactgtaccataactatttgcgagagtatttacttgagttatcagggtttgagtatcatccttgagttcagtcaagtccctattggtttgatttatcttcctgttaaggtgacgtgtcatgcgattgacaccatcctcagtccgaactaagtccgtatggagcttgtccacatcagacaaacgtgctggtgtgcttaaaatctttccagcaaacattaatttatcaactactgataactcaggcaaatcattggatagcccctcagggtctgtcagtgcattgtttgacgccgcagcgcttcgattaggtggatccccaccagagaaaggaaacataatgagagggaatgggaatgtgaaatgagaattagcagtggaattgtgcaagagtatctaaaatagaggatagtaaaacgaaagaatggaagaatgaatgaatgaatgtgaaatgcttagattaaaggcccttgataatgggcgtggctggcgttccagtgttacaataattttgttatcggaactagtgtaaaaaaaatcgctttgagaagaaaaaaaatggcggaaatctattaaaaccgtaatgcggtgggaaagtgtccccactgattatatcacagcgtaaacggtgcgaacaccggaagcaagggaggggtgaaatgaaaaagcttgtgagtgcagaaaaatgaaaggaaataaagtgcttaagtgataggggccaaaaatgaaaattacctaactaattaaaagttcaaaaattatgaactacttagacatatagacataccgcagtgattggtgaaaggaagagcagtgagacccgcagggcttcatgtgagttcagcgtctgccacccttctgtcgtttcgggtttccaccgtagtgcatccactgattgtccgggccacgtcttccttgacctcttccatactgtggcgccaaagtaggcgcacctctttgttcaccaccgttgccagatggaccggcacggtctgaagaccctgtcgtctgtagtgcaggaaattggcgattttggaattggaatgagggagctctcggctgctgcgattgttgtgcaaaggcattcgttcggtccaggcgcaaaccatgcttcagcgcccagctttcaagaaagctttcatcctccacagattctcttttggccgaatcaaataggcatgtcggagacctcatgagtgttcgtcctaaaagtgccaaaacgtattcggctcgaactacgcttgttcttgttatcgccatttcgatgaaacgtttccacacttgtcctgcacttattgagaccaagtctccaatgatgaagacagcgtggcgagctcttgaaagagcaacagtagcccgttgatcgtcttcaaagaagtgcatgttgtccgtctttccggatcccacctcggagtattttgatcttgttgtcactattatgatgacatcgcactcctgtgcctgataggcatcaactgtgagtgcacgaacaccgcagtgcttcagctttcgttcaatttccgaagtttggtacgtgtacatacacagaacaataattctggacgaaaaagcgttgccaaaatgttccaaaagtgcttgtaccaagaacgatgccacttctgtttgatggtcatctgtgagcgaatcgctttttgggtccacacgaaatgatgagaaagcattaattagtcccacaggacattcttgaaccggcagaagaaaatctgagcccgtgatgagtgagcgttcttcagcgcttcttgctggaatgagttgctcattgtgcaattcgaaggaggcatagctgatgagctttgccaaaaatggatggct

SEQ ID NO: 4830 - DNA, 1451 bp, Heterodera glycines
tggtgaaaatactcgaaaaattgacaattaattattttaacaatcataaagaaaattcttttgatggtactcaacaagggaccaccacgttctgcaaaattacatcaatagaataattttattttagtgattgtattttcctaaatttattaaattatatttttataaaattattattttaacaatcttaaaaaaaaaaatttttttttcatggtactcttaaaggatcacatggttctggaaattactttaagagaataattttattttaattattctctttttcctaaatttatttattttttaattaaatttatcatttttcggtttgtttttataattaatattttaataaaaaaaattcaagacaaatagccgtcgtcagttgatcaatgttctgcgttgatcttttggaagaatcactgtcatttgattgactagctgttgtctaattaataaaatttaatttaaaaaattaaattttcaaaaatttttgttaattttttttaccactttttgtttattctttgtcgctttgttcgaagatttcactaattttgtgagttcgtcgttatccatggcaatgacaaaacaaagattgacaaataaaaaagtaaataaaaaatttatttttaaataaatcatttttatgtctctgaaattacaattattgcaacgaaattatctaaaaaattaaaattatataaagtaaaatgatttattaaatttttttattgtaaaaaaaataatttcgaatgaaatgaaaaattttaatataacaaataaaaataattgaatcattgtgatttaaagtagcattatttttattcattgtattaatttaatgacaaaattaatgccaacaaaatttgattgatttttttttgtttttgcaaattcaatattcatttccttatttcaatattttatttttacacaattttatttaattttatacaaaatttaaattatttactttttttaaattctttttcgaattcatatttgaataatgagcgctatgttaattaaaatcgtagatttcgaattttttaaaaaaccctaaggggggagggactctgttgatgtgcaaaatttatttaggttcggaagtcggtattggttaaaactgatgtgagattcgtgatcagggatcccaaaacccctcaagaacaaattttctttagtagaaataattttacaaaaaaaaaaaaaaaaaattcaaaccaaagcccccctaccccttttgtttttaataacattcaaatcagacgacttttcaacgagcgacgaataatgaagcaatttattattttaaatgattagataattttggtttcatcatatttgtttatttgttttcgaatgcaaattttatagatatatttttaaaataaaaatattattattttccatatttcttttcgaaccccaaaatcccattttttttt

SEQ ID NO: 4831 - DNA, 2697 bp, Heterodera glycines
  unsure (1)..(2697): unsure at all n locations
agaagagattttcgctctggctcaaaaaattaatttgaaaaattctcaaaaaatctcttttttaatattntaaggcctttcaaacatgaacaaaatttagcgataaatttttgcggattttttgatatttttttttacaaaaattttcattgaaacttttgatcaaggcttttcaaacacaagcaaaatgttgcgaaaaaggtttttgcgttcttttgaaatttttccaaaaatttttcattaagaaatttttgagtttgggacaaaatctcatctcaaagaaccggcagaaatgccattcgatattttaaaaattgcttattcagaagaaaatgtcattcatcaaactcaaaattttggtcgtcatcgttttctttttgctgatcaaattcaccgaacctgtcaacggtatttgccttttttcaaaaaaaatatattcaattttaatattaaaaattccaatttttttttcaaggcatcgaatgcatgaaaggatttatcagccatcatcctggtgtgccaccacgtgaacttttggcgatcaactgctcggatgaaaagggggaaaatgtgtgctacggggccaaatgcgttgaaggttaaaaattgttttaataaaaattgatattaaatataaaatttaatatgaaaatattttaataatgaattatttgatttaattgtttgaatatttagtaaaaatttatattagtattaaattcgatgctgaaaataatttaaaaattgatgtcgatattaaatgatatggagaaattttattatttattatatagtgatattttaattaaaaaatatattcattattattttaaagacaagaatggacaggagaacaatgccaccatttacgtatacgattgtgaggctgatcgtaatccgtgccatctgcccaacggaattgaaccgtaaattatcgtcaaaaatttttgaatttgaatttaaaaattttaatgaaatttaaaaggtgggaaatttttaactccattcaataaaaaaaattttttaatttttttttcaaatattcatttttaacgaataaataaaaaataatttacatacgcattaatatttttatacttttaaaatcccattaattattttaggtggattagcagcgaaacggggctgaaatggcactgtcagtgcatgatttgcaagggcacggacaaatgcaatgaaaatttcttcccaaatgaaacaatcaaagatttgctgccgccatgccatggacaggaaaacagaaccaaccgaacgaatttttcttcatggctgagtgatgaaccggcaaaagatgagaatggcattgtgagttggcaactgttgcgcaaatgaaaagggtattattggcactatgtattgataggtgggacaaaacggcacaaccaatgacggtacaaccgatgaaggcacaaccgatgacggcacaaatgtgacggatgggacagaaactagcacaacttctacaccggaaagcatcaccattccgactgttgagcaaaaacctagccaccctcttagcacggtaggcaataaaaatttggcgttttttttcgtcagtaattcaaaaacccaccatttaagactgaacaaagcaacaacacgtcccagaagtctgagcaaaaacggaaaagtaaatttgtttgaacaaaaacacggaatatttgggaatgtccaagaacgcgctgcggatgagccgaacggaactggcactgatcagggaaaggagcaacagcatggcgctgaacatggacatgaatcattggaaagcagcattgatcagggagctgcgcagaaggaaaacggaatcgatcaggcaaaagaatccttaattaaaaataaatgatcagagtgtacagcaggcaactggagctaagccggatgccattgaccagggcaatgatcaaggctctgaacagaagctgagaggcgctgaacatggacctgaaaagatgcaaaacaacgttgatcagggagctgtgcccaagcaaaacggcactgatcaggcaaaagaatcataataattaaaagtaaatgatcggagtttaacagggaactgaagctaagcgtggtgccattgatcatggcaatgatcaagcctctgctggaccgaagataagaggcaccgaacatggacatgaaaagatgcaaaacaacgttgatcagggagctgtgcccaagcaaaacggcactgatcaggcaaaagatcataataattcaagtaaatgatcggaatgttcaacagggaactgaagctaagcggggtgccattgatcatggcactgatcaagcctctgctggaccgaagatgagaggcaccgaacatggacatgaaaagatgcaaaacaacgttgatcagggagctgtgcccaagcaaaacggcactgatcaggcaaaagatcataataattcaagtaaatgatcggaatgttcaacagggaactgaagctaagcggggtgccattgatcatggcactgatcaagcctctgctggaccgaagatgagaggcaccgaacatggacatgaaaagatgcaaaacaactctggtggaggtcgtgtggctaagaaaaatggcactgatgagggatcggaaccgaagccgaccggcatttctgatcaggtaagtctcatgacgaacaattcaggtacacgaattttaactgcttcacacagcgtgc

SEQ ID NO: 4832 - DNA, 1882 bp, Heterodera glycines
  unsure (1)..(1882): unsure at all n locations
aaacatatatgaaaaattaanaattcaaaaagccttattatataaatgtttgcttttgtcttgatttgttaaaattacatattttgtttgaaatctgtgcctgaataaaaatcattttaattaaaatttgagacagaaaaatggtcttatcttgcagctgagcttgtttcttccatggtccattcccgcactcgtttaaaaatcatttatgcactcaaatccttggctaatgactgtctgcccctatccgtaccgttagcattctcaatttttggcacttcttttggccttttttgagttttgagcacatattttgtggggttttttggcacatattacctatatatttatttggcatttttagcacatataaaatagaacccttttagtagtgatcaaatatttttcaaaacaaaatcaattgctttcaaaaatgcgaaaaattcaatttcattatcgttcttttgcttattaaacctaattaaattaattacactacaattcagaaaaataataattatatttgtgaaagaaaaagattgatattaatggcttgaaacattacataaattattatttattattaattattgatgtgcttccgcctatctcgaaataaacaaaaacgttgcataaataatatgtctattataatattattttatattttttacaaatatttgtgcgaagaaatagaatcattttaattgattatacacttccgctaacaaacgtcaaattattaaatttatagaaaatgaataaatagtctatatattattttattgattatctatttccgcctatctaaaatataaatacacaaaataacagctatgttaaatatatttccaattacctatatgtctaaaaacagtatttaatatttgttgttttccctgaaaatttcagttttttcttcacttgtttatttcaatgcgttattcaacatctttttttgcttttatttttattatttttatccaacatattcaatgttagtggagaaagttaaaaaattaaatgcttattttaaaattattttaaatgttcttactaatggtaattaagaaaaccaattaaaaaaattatctcatttgtgtgctaactttgttattaaggttttcctccgacaaatgaccgaagtccctcagcttctccttggcgcttaataaaatttctttcgcgagcattcagtcacgaaaaacatggaagtaagtgttaaaaaataattcattttaagccaataaataacctggatttagtcaattacatattttttaggatttaaaatatttaagttgacttaaaaaatatatttagatatttatttaggttcatcatcaacaccgacttcaaatgctgcaaatccagctcgggcttctagtgctccagttcaagccccaactccaagtcctgcagttgcagctcaagcttcaactgctgcagttccagcttcaagtgctgctgttccagcttcaactgctgcagttccagcttcaagtgctgctgttccagcttcaactgctgcagttccagcttcaagtgctgctgttccagcttctacttcaagtggtacaacagttcagcaaaattctgcgtcaatcaaaggaaaagaaattgatgaagcacagagttcgccggaatgctcaatttgtcttgagaaacttaatgaaggcaatcagtctgaagcattgccttgtgccgtgagtatctttttaatagacaatttagtatcttgaataattttttttaaattttagcacgtgtttcatcagcactgtttgtctaaatggtatttagcgtttagctttatgagtttgtcaatggcatgaaacccatttggncaaatgggttgtaagcccttcacatggtccatttg

SEQ ID NO: 4833 - DNA, 1318 bp, Heterodera glycines
ctaaaaaattctactacgtttcatctaaaacttaaagtctattttaaatatttgaaaaaaaatttaagaatttttttatgttttctatagaaaaaaccattctgatttttttgagaaaagcacttatgttttaattgtaaatttaaaaaatatatatatatattacgaaactccatttacgaattactatgacagagaaaaaaatattgtttacttttcatatttttacactttttttttgcaaaggttatccacgaaagattcatgtccaatctgtcgtgctgtcattgggcagaaaaataaaactgatcaaccaaacaatccctcatcaagccacactcacaatgaatataatggaagtcagtaccaatcatttgaaggcatttcatcttgggatgaacacaatggatattttggaagatcatttgaagagctcgtctttgagcgcatttgaccttgagtgattcctaaacaaagataaaaacattcattgttttatccatcttatgttgaatatatatttaaaataattttgtagaatttgatttattactttgtcgaattttgtaactttctttacatttttgagccttttatgaattttcaattttttatcttctttttttttgcttttgatattttatctttttttcatgtcttttcaaaaaattgctttcaaaaattcgaaaaatccaaactcaaacacttttataaattgcttaattacataaacaattttctgggaaatatttaagcgctaaaaacttattgctggccaatttttaattaaatattttcgagaatagattaatattttttgatgatttatttatgctaatctatgggtataaacaaaataaatgcataaataattcgtctattacaatgattatttgctatttgttactaaaatatttgtgcgaataaatacaatcatttttaaacgatttatacttccgctaatctaggtatataaataatatttgatcgaatatgcagtgtattcaagaagttttattgattatctattttatccttaattttaaaaagcatgtttgtttgaattttttaatgaatttatttaattttagcatttttatagaataatctaaaaaattctcataaataaatcaaatttaagaaagaaaattaaaaatttttaatatttactttaattttgcccaatttttaaattttgtgaagtcataattatttcaactgaagatgtttccattgtagtgcttgctttctattgatgttaatgattccatattttaaaggttttttccttttaaatattaattttaattaaattatt

SEQ ID NO: 4834 - DNA, 2155 bp, Heterodera glycines
  unsure (1)..(2155): unsure at all n locations
agaaaaatagtggtaaaaatggtcaactgctgcattggcggatcagagaggggtcacaaagagttcgcacagcatcgaatatttccttcattttaggcgtcattcttccccactgcacttctttcttcggtttaattacccaagtttgaggtacttggcgtgtcctgcccataatatctgtggcatggaataaattttggaactgcgctgcctaacggcggtgcttaaagtgcgctaaaaatgatcaaatgattatcaatttttatttttcttaattccaaaatgaattcgaaacgcaaaaatttaatcataattcatgtggtaaaaatgcatttaaaaataaaaaaattattgaatttgcttctgaattttttaattttaaatagaaaattactttttcgaaaattttacacaaataagaggcgaagaaattcaacgaaatttttattaggatcccccccccccccttgataaattagagctccccctgaaataaaatccccccgtttcaggggatgaaaaataaagccctcggcggctatcttttagcgattactgtaatcaaataaaatttaattaataaatattaaaaatttacggctttaccttttgctactttttcaccttcatcatgctgcttttcattgctaacattttgttcatcatcgctggactgttgttttggaaatgatgcatcaacaattatgaaaatttgatttttggtcaaatattcaattaaatattcattctcaaactgacaagcttcaacgagtaccaaaatttttttttgggccataacatgactcaacaataaaagtatattcacgattttttatttcaaaaaattttgaaaacaaaagggtcccctcccccctttggttttttgataaaattcaaaatctttcactttttttgttgttttttttgtcattcgtaccatctgttaaaaaaacaaattctgtatcaaaacaaacaaaacaaaaaaaaatgttgaccaaaaaaaagtgaaattttcaaaagaatactctttttaagtagcgcccaatttgttaacagagttccgccagaaaatgaccaatttttgagattttgagccaatttttaagaaaacaaatgttttggggacccgcggagccgaaaagcgccgccggaggaaaaatagaaattttgactgttttttacagattttctctgaaattttgggtattttcactcaataaaacgaaataaatttgaattttttcaaaatcgaattagtaattcaaatattcgcttcaataaaaaacgataattcaaaacattcattaaaattttgcatttttttattttcaaatcccaaaataagcacgtaatgctgaaataagcacaaatcttagaaataagcacacttgggagccctgcggattacggaagccataattgagaaattcgccgtaattacggatttccataattgaaaatccagttacggccagccagccctgcttcccaagcacttgtccatctatctgatcgatttgcacacagggttcggatcgaaaaattttcaaaatcagaacatcgggtccaaaaaatcagattttggggtcgaaaatcagaacattttgcaaaattgcttcagatcgttatttttacaatttattcgatcaaaaatgtattaaatattatatttttcacctcccatgatcatctttaaaaattttggtgaggaaattaacaaatcgtaaatttcagtgttcagtgcactcgggatcaaaaaatcagatttttaagaatttttacggcgcatttttccaaaaaacttttgagaaatgggcgctgggggagggtccggcggtgccgataggcgccaccggaaaattttttgtaatttcgttctgatttgttaacagattttcaccaaaaaatgccaagtcgccagaagaaagattagttttgcataccgacaaactgatcaacgaactgatcgccaaaatcgacctgaaaaatgaaaacgtaatataaaaaaacagctctcactcaagaaaactaactcaattcacaacaacttcacactttaattcaagtaaaacagaacattacagcagacaaacacaccanaagaaggagaccaaccaancaacactcatgaatgagganagggcataagtcagtt

SEQ ID NO: 4835 - DNA, 926 bp, Heterodera glycines
ttttcccaccccctagaaattttttttgaaatttacccctcgttcccagccaaaatgggctgatcagatcaccatgaaggagtgatctgatcaacttggtgttgctaccttttttgatcagcatccaaagttatgcttacctgaatttttttagatttttttaatgttgatgaaaaaaaatatgggtagtgttcttaaacatatgaccaccccaaaaagggagtgcagttggtaaaatggtttgtaactaataataacattttgacaggggatagtgaatggtatcattataaagcccacaaaaaatgctacaagaaatataaaacatatatacacaatatagtcatattgagattttataatcaatttaaattaaatttggtagaaaattttgagtgttcctaaacatatgaccatgactgtatcatctttttcaattctaaggtcgtttttgtcgcattttgtgctgattggtgtccttttagtagaaaattgaagccagtttttgaaggtgggatttgttgatttgataaatcaaattaattttaaaatttttagaagcagcaatcaaatggcacgataataacccaaacacgtaatgtctcgcttatcatttggattcgttttttagtatgataatttatattttagcagtgtcgtttgggctttcgttgattcagtgaaacaagcggatgttgcggataaatattttgtgaataaatacccaacaatgaaggcatgttaagcattaccagaattggtgcattagtccaatgtttaggtttttattaacggtgagttgatcaaaaatgaatacaggtattcaacatgaaattaatgattcaaaaaatacttaaattcgttaggagtacgagatcagtggaggcgttgacagattttgtcaagaaacagctcgaggtcagcat

SEQ ID NO: 4836 - DNA, 5358 bp, Heterodera glycines
attccaacagtaaaaggggaaggaaataaatccccaacatctgtaaattatttagcatgtttttgttcgaaaatatgagtgatttgcatgagcctggaaaattgcggcaggttaactcttttttctgtttttatttttgaaattttccgtttattttcagtttgtgatggatatgcattctggagaattgcacaaaaaattccatgaaactttggacgagaaaattgcagagctgcagaaaaaagcgttggagcagctcgatgcggaatttggagaagcaccggccggtagcaacagtggcgaagggcgggcgcctgcggcgatgccgaaagtggacacaacgccagtgccatccattttcaaggaactcaaaccatcggttggttgttcattaatccaatcattgtgattggaaaagaccaatttccttttgtttcaaggagaagcgttatactattctgcaaaagacggaattgtgacacttttggcactgtgataatggactaatcaattggacactaattgctcgctttcctccttttttcgcagcttgggtattcaactcgatttaattcgttcaaattttctagtttttattttttacttttttattgttaaaaagttcggttccggttcattgtcagtggcacttattatttatatttattgttcaatgtgattgtgaggcataatgttgttaaattaaaatgtgaaatgatgaagcaaaaaaaattatttatttgttttattttttcattattttttaacttgtggtcaaagttttagaaagtatgccctctcggcatgctcctaaagcgaaacaagttggccttgctgacaatgaggatcatcagccactgaatcggcagcaatcactgtcgccgaaggatgaacaattacaacaaactcaacagttaatggaccgaatttcggacaaggtaatgttaaggtgcgcaattcacaaattcaggttgtatttaatatgttttaagctcgagcgtgtccagccaaagcatcaaaaggtcgccgagtccattcgtgcaattcgttctcagggcgttcgtctgatgggccctggttccaaaatgagtcaaaacgtcaaggcaaaaatggtcgcattgtatcaaacagctcaaaaacagtgcgagtcggaacattcgtatttggaacaagttttggctgatatccaagtaagttgctcatggtatttttaataaattaacatggcgtgacatttgactaggttttcaaaaaatcaggggattgaatatatttgttatatagattctcttttattttccctggatatatgaaattttttaaatctcaaattttataagtaaaaaaaaatcaaaccctatctaaagccgtaatttaaaaaataaagaagtaagcagcaaatgggggaatttgttgaaaatgctttaatcaaatggctaacatttaaaaaatgcttttaaatttctttttggcagcgtgtgcggcagcttcatttgagacagcgaatggccgacaaactttcgcgtggttctctaatggttcttctggcccaacatgctgccggactccccctttacatcggatccatcgacggtcatccaccgccactcgtaatttattttcttattcatttactttcctgtttatcttctttgactcatttttaattgaaaaccaaagtttttggacctaattgtaacattggttttcccttttggcttttcaggttggcgccattccacaaaatccaggcgattgcatttcggaaggtgagtttgtcgctgcttttgttgaagaaatctggattctggctgaagttagggtacaatttcagttttcgcctttatctaaagcatatttaatttggtctcagaagcaaatctccgccagcaaatacgaggtgaaggacgtggatgatgatgacgatgatggtgagaagctgcaagttgtgcctccaactcgtctgattccgctgccccattttcgtgccgatccgaggcgccatgcccacgctcttttccccgtcggtgccattgtccttgccctttacccccagacgacctgtttctacaaaggcattgtggagagttctccgacgggtccaaacgatgattatatgtgagtccacaaattgtcattttgagaaatatcattttaacactttgttttaggattgcatttgaagataacacttttccgtccgggtattcgccaactttgccagttccgcaactttatgtgttaacgcattgtgaagtgacgccgcagcaccgaaagcgcaaaaaatccccattatccgatttgactgatgaagcatcgtcagactgatgacacccatattttgattcgttctcaacttcccacttttatcttccattgccaaattgtcccttttacaatatggaactataatttaattaaagcatacaaaacactaaatggatttgctatttatcaagcctttccttactagcaaaattttcttaaagacgttgagaatagagtaactctgaaacgcccacgagttattgtcccataatggcctcccttcctttcaatgaaatgtatgttaattttgggttagcattcgaagacgaacaaccaacaattatttcgactttaataatgaaagtgtgcatttgcgtcgcgcatcaaatcatttgccattaaaaagtcagacgacatgggcagcagaatttgttttcggagagtttttctcacaattttcattgtttcgtacacattcgcattaacggagggggaggaggaagaagttgcggactacggtagggagggaactcaaagtggtggtactgtagcaggagtagaaatggttttaaatagttgcgaccgatgtgaaacattcccattttgagatggtcaatcctccgattttccgtcctcaccaatcggccgtttccgtcgcttcgacaacgcaattcgatacatcggactgggcaaaaggaacggcgcactgcggagaatgtcacgagactcaatggcacatttattacagaacggacggcacctttcgttgattggcctcggccgaaagtgaagcgaaacgcaaaggacggacaaaagagagaaatggggagagaaatcacgcaacggaagaacacaaaaacattgcatctgaacattttcaaaccaaaaatcattagggtgcataaatgtttgatttggaactcacttcagccgattcttaatgggctgaaattttgaatttgcactattgcctgggcgttgcaaaattatagcgcaccctctacaaccaagtcccatgggggtgttaaaattttgatcactcagatcaccctgaaggagtgatctgatcacctcgaaactaaaaaccattctgaaaagactgaagggaaattcgtctaaaatttcttcaaatttatgtaaatataaatgtgcagcctaattatcattcattatcaacagcagagatggcaaaatgattgagtgaaaagaaaaggcacttccgctgggttttgacttcgtctttccttcctttcattggtaatttgatctgttccccctcattcgtagtcttcctcctcctcctctccgtcctccgcttcgtccgcgttcactttttccaaactccgtctcaattccttcagtctgatcaaaacactgagttggccgagccgcgggttgtcctcttgcaagtgattcagccaagaagaagcgaagtcgttggaattcaccccaaaaatggccatcgcgagaatggtttggtcggactgttggtgcaaattcgtgcggtaatcggaatggccttcccacagccttttgtgaagctcatcctcggtgaagattttgtgagaagaaacacactaaaaaagaaaataaaagttaaacgtccgaattccgcgaataaataataataattcgctttgaccaattcggttatttcctcgtcccgctcaaccgatgcagcactgctcaaaacgacgtaattcaactgacaatgagaaaaaattattgatggaaaaaatattgaaaaaaatgtataaaataagagagaaaatgaaaaatgagacttaattcaaaaatgcagagtgaggctgtttaatgcgaccaacatactaacagttgctaaaacagaaaccgagattttcaaatcatccgggccgggttgacatattcaaaagcagctggtttccgggtccggcctgctggtcaaacccaatttccaaattgccgtgaccggaaccagtttcagggttgataaaaatttaaattctcataatattttcaaccggaataattttttaaaaagtgtaaggtgttttcaacagataataaaaagataaaaaaattatgtaaatggactcgacgacccgataagaaaaaaacaaaactgacctagatttaaatttttcgattctgatgtcactatctgtcactagaaaccactattttggctacttcgtcactaaaatagttaaaaatcactattttggagttttgtcactatttcgacattttttgggaaattccttaacaaaaatgcaataaaaccaaaaaatacacacctaagaatcgacaaaaaaattcaaaaagcactcctaagaaatgaaaaaaattttctcaaagaggtattttcgtggcaagaattttaattttaaaaattatttttttatgtacctattttgtttttttgcccttaaaaatcccagccctactcatttggaatgcaatcagtgaataaaaattatttttgctcaatttttggctgaaaattatgtcactattcgtcactattttggactttttgccactattttggcatttttattcactattttagttaattatttcgagatttttcgtcattaaaagtcccagccctatatatcaccacaacttgccatgtgatcctggacccaaactcggctcggcccatccacgtggcaagtgctttggtccggcaaattggcaattatcctcttctgcagcggactttgcccgctcacaatccaattgtgatgttcgggccctttttcagcgaaatatgcctggagtaaattactagtcagtattaatctgacatttgtacgactcactttgaaacttgatatttgtgttcccgaatctcggcacatcattttcagcgctatctgtgccaattccacgccctccaactttttgtgttccacgacccttcggtccaaatacctttaaaaccaaagaaaagataaaataaaatgttttaatttccatcccacttgtttgtgtgtttgagttttggcatccaatagagttgacgcttcgattttctggtggcgtaattccatggtccgaaaatgcttgataccaaatcatgaatctccttgtccggttgaa

SEQ ID NO: 4837 - DNA, 1693 bp, Heterodera glycines
cagttcgattgtgcaaccttgctgttggggatagtgccagaagattttctaaagagactaattttccattgtttttttaaattttatttcacctgaattatattcgtcggtagcaaatcgccttttgggaaaatattgagcaacgccttgtaaatgtcaaggtccttgtgaagattatattctttgatgtttttcagtgctgcctcaataaactcgacgtgtccaacgcctctctttccgcgcgatttttgaaatatttctaaaattcctttgtaaaattataaagacatgattcagtgaaagaaccgaccgatttgcttcaaaaaggcttctttggtcttctcatttcttggcattttgcggaagttttctttccatattatcggctgtcttggattataagtattcctaaaaccatcagcactgcttgacgaggaagcgaaggaacgaaccaaaggaaaaacactttctgacagactttgtgcacgaataaacatactatagctataatatgagaaaactaggaaaattatagtaataacctaaaaaaaaaagaattttattaccagggcttctttttttatgtaaatacatcttttttcctggattctctatagcctaattagtaggaaaaacactttattttttgtgtttgcgaacaaaaaccaggacttttatttacatattttgcgatttttctacatatttttatacatattttggactttttcgcatttttcgtacatattttgcaatttttaaggaattttttattaaatgcccaaaaaaaaatctaaaagtacacaatttttttcaaaaattttgagaatttatagaaatttcttgcgaaaatttaaaattttttcttgaaaatgttcccaaaaaaatatttttcaaaattctgataccaaaaattaatttttaaaataataaatgttgatttctaagcctatttattaggtcatttttatggcattttatgcgtatttactctttacgaagaattttttttcaaaaaaataacctttaaaagattttatttacatattacatatttggggatttttgtacatatttaatacatattttagcatttcttatacatattttatttacatatttcgcgatttttcttacataaaaaagaagccatgtttattactaacttttgaggataattttttttttttttttgtataaattttgtttgattgcagctgcgcagacagctttatgtacaagcaaagaaaggcaataaaaattgcaaacctaaatgctatgtacaaattttcttccaaatttatattatataaatttaatttaagttatattatatatctatatataggtattttatatggttaacaacgagaaaatctgtcacgagtttcgtgacaaatgcagggttgactcagtcgtacggtgttcggggagatgtgacatcgaattgggagaggtgaccaagcacaatgtcatggtgatttttcattttcaaatatgaatttttttttttgttaaacagtcttaatctatcaaatttagcaattaaagcgtcttaatttgtccgtcttcccggtattccatttttgtctaatatttccttctttcccattaccccagtacttattttaaaattcataggtgttttacaatgacaagttttacaaagaagtagtcaatactggtgagctcg

SEQ ID NO: 4838 - DNA, 1849 bp, Heterodera glycines
agtccaactttcggcccaacgaagtgcaccggtgctgccggggttgaattctgttcaccgaccaatgcgcggccggaaagtgttccaacacgaccgttcagttgtgctgcattcagcggttcctccaggcacagttttagcaaaaatacacacagaaaaatcagtcaaattggccaccaaaacaaacggaaaacttccgatttttgccatccgccgaattggccaaactttgccacccctcaggcaaaaatgacttgctgttcggacgagcgtcaggcggacgcggacgttggcgaccacttctcgcgctgctgtttcgaacattttgtggacggggaagtgagttggccatacggtagtgggcaaatgtgtcggtgtacagtattttgataacaaaggatccctgctgccccagggcatatgccgctgagcaatggcgttccgttcacgagctgtgcctgcccaacgtggagatggacttgaccggggtcaaagtgccgtcgccgctcgttggcaccactttaattgtcggttttttcggggaaaacttggcattttgcctgccaattagggttaaactctcggcttggccctctttttcagactgagttcgacttcagcaaaacggacagatggcgcttcgagtgccgttacggttcccacgtgcaacagtacagtttcttcgaagcatccgccagtgcagagaacagtgaccaacagcagcaacggaacgaagcggaggacgaataaatgaaaaatggcattttgaaaagggcaaatgcctttttgattgactcaattggatgaaaagtgaacggaaaccatgccaaaaattggcggacggttcaatttgtacaattttatttccaaaatgacaaaggaattatggcaatttattgctttattatgtatggtttctacagttcgtagtcaaaagtattgcagcaaacatttggggcatcaataagtcatcacgtcgaattcgttctgcaggccaacgattgtcgcagtcgccgcttcgaccctcgcgcgttcggccgccttctgaaaacggagcgggtgagaataaagagccaaaaacagagacaattaattaagcacaaaacagcggcacaattaaatcccgtcccaagaaaaatgttcctttttcccatttttgaccatcgctttcacccgtttcgttgcctcttccaaaagtgaacacagttcgttgatctcctcggctgccttcatgaaaagcttttcatctgttttttgggaaaagttttaccattttaattttacaaagcccccttttctcaccggcatttgccttgtggaaaagcgctgctgccataaattttgcgcttttttccgaagtttcgcggagaattctgtcggacgagaaaatccgttcgttcaattgcttcacctcgccaatggcttaagcattttggatttcgtagtttttcaagcagtgaattgtgttgctcaccagatgccttcgtttccttgcagtattccaacgctttgtgatgaaccgaaaaatctttgcaaacactcaaagtgctaaaatgggaataccaacttaaaacggacggcacaaattcatagtattcatagtacttgagcagagtctctccaaagtttgtcttcggctcggctcgcgctccgttcggcacattcggtgtccccggcgcgactcccttttggccattgacgtaaaccatttggctatttaaaaaaatttatttacctaagcgcaaaagcgtgaagccgacaataaaatgggaaaaacaaattaataaaatggtaaatgttttgagaactttaaaaattctgtaaattagcatttatgtatttgcgtttg

SEQ ID NO: 4839 - DNA, 4442 bp, Heterodera glycines
  unsure (1)..(4442): unsure at all n locations
ttttttcaaaaaatacacccntaagaatcgaccggaaaattttcaaaaatgcacccctancaaatttaanaatttctcanaattcgtttccaaattnnatattgacaagaatttttgattttaaaaattatttatctcaatactgatttggtttaattttgttactttttggataaaattttgtcattttacacccctaaattcggaagtttttagcaactatttacccatttttagcaactattttggggttttttagaaactaaaaattaattattttggcagtttttagcaactataaatgttatccctatttataattcgctttaatttaaaacgaatcggtgaacagattttaaatgtttttcattttcgtgtttttgatacttttctatttcttttcgtacttacttacttaattaactaattgttttttgctttcgtattttattttggtttcgtttcgttcgtttttttcgcatttcgtatttcgtattttcttttcacttcgcaactgttctaatggaagtgttttcgcgaaaagtgtttatcggtgggtgtctttcgttcgtctcttcttgtcctcctttattttcatttactaattttcaggtggtcttccgattgacatcactgagacggagttgaagcaggcttttcataagtgcgtttctcgtcggtcggctttcattcattgattcatttgcttttttctctgctttaggttcggttcgttgctagtcgattggcccaaccgatcatccgattcacactttgttaaaaaagaacattgtaagcgctgtcatttggcggactgttacggcgaaacagcaaaattcagtgcatgaaaagggcacaatttctgtatgttttcagatagtggcgctgccagcagagtcaccggctacgcatttctcatctttttggaggaggcgtcggtgcagcgtctgatcgctaagtgctactcggagggcgaccgtttctacatgctgatgtccagtcagactgttcgcgagaagcccgttcaggtgcggccgtggcgcctcgccgacatggactacatgccgcgcccgtcggcccacttggacccgcgccgcaccgtaagagaccaccgattgacaccgctaggaccaaaaccgtcccattccaagattttcatcggcggtgtgccacgaccaaccaaagcgagtaatgagtgattggcacgcaatttgcgataaatacaccagtttaggcgagttggcatttgtgctcgaagccgccttcggtccggtttgctacgcgggcattgacgtcgacccggaaatgaaatatccgaagggtaatttgtcatttagaaacattggtttttcatttcccgcttatagcaaataacgatgtttttctctcaggggctgctcgcgtaactttcagcactttcaaatcgtacgccgctgccatggccggtcgcttcgtccaaattccgcactcggacaataccaaacgcgtaagttggctctcctcaagtgaagaaatttgttttggatcattgtttcgacttttaattcgaaaattgccgggctttgaacttttaagtgatcaaaccatttgttcattggatctattgtctctgtccttcttcaggtggagatcaagccgtacttggtcaacgatcagatgtgcgacaattgccatggcaaactctgtcaggaccgttacgcgccgtacttttgtggcgacgtcgcgtgtcttcagtattactgtgaaatctgctgggaccgcctgtaattaattaattgcgcattccttgcccaaaaagccttaatttcccctctttcagtcattacgggtcgggcaatcgttcgcgcgaaatgcataagccatttgtgcgaatgggcgaacagatcaaagtgagtgcgttcattcagaggaaaacaaataaaaaatgccgttatttttctttttggctggtacaatttttcagtattaatttcccacttttcgtcttaattcccaattgtttaatttgctcccttttttgatttttcagatcaaaattccgcagagggaattctaatgtgataataaaaataagtaataatgtcaagtaataatttgcatttgttgtacaatatgatatttaagagcaaatatggccaacttttaagaatcttaataatttatgtaaaattaattgtaattttcatgttgtcttctttgaataaatgttgtaattgtttcatttataccggttttattgggttttctcatttcaaattgaatatccatgcttttattgattgattagaacagttcaattcgaagttataacttttgtgtcgttttgcctctgtctctcttcttttcgccgtttctcagcaaatgctcgatgtaccgtaggctgcctgttggccatagccaccgtaacccgatgagccgtaactgttcaaaatggccaaatgtttgacggatggctttgatccttccccaccctccgtacgatgatggcagactgtactgttgctgaccgtagcccgagctgccatatccaccgtagcccgagcttccataaccactgaaacggtgcaacgatggctaattagttcattagccctttaagcatggttaattaaccaatcgactcatactggacaaataatttattggctgacagtgtctgccttttctttgtccaattacctgcttccgtaggggctgtactgttgttgaccgtagccgccgtacccagaagtaccgtagccgccagaaccgtagctgagaatgtgtgggaattgatagctaactttatttgcatttactcacctgctgctgtacgggctgtactgctgctgaccgtaacccgttgagccgtacccgctaccgtagcccgacatgctgccgtatcctccggcaccaccgtatccaccgtaacttgccgccccatatctattttaaagtgatttctgagacggagtcaaatgtgaagaaaataaccctccgtatgatgatgggctgtattgctgctgctgcccgtaaccgccaccataaccaccgtatcctgctgaaccgtaccctccaccgtaagggtcacagccaatttgggcgttgacatggccaggaaaatggccaaaaatgaccagcaaaaagaggctaaaggcaaaagtgaagaatagcgagataggaattaaggcagattatactacggtagtttaattgtacaccatttacggttggaaatttactacggtaggtcatttccacgagagaaatttgtggagaaatggatacaaaaaccgaccaattggagacgaagcggaagaaagtggccgtgtgtgaactgttggcgaacattttgtgattttttgttcttcgcttttgcttcggtcgctgccttgtgctgccaatgctttctccgcggcgttttatgcgtccggcgcgaatgaaaaaaaacgaggaaaatttgccgattgcccccggggaattgggcggcggatcagcctaatccgcgcgcaaaaataactccgtttggccctccgttcgctgcgcttccttccgcccacccttccgttgcgtctctccgtccgtccgactgtttgccatttgttctgtttttccctttttctgtttgttttccctcgcgcttaatccgcttaatcttttgcacatcgaacaaattattttatttatttatttattatttatttgtttatcatttgctcttttttattttcagacgatttcgtcaaacaatgggcgaattgaagaactaaaaaacgaattgcttaagcaatcgtcggaggatggaaagtcactttggttcaccaatcaaacaaccaaaagcaaacccaagaaattcactaggcatttttctataaaaatttcccttttttgtgccggtctcggaactcaaaatttgaaagcctcgttggcggcgggggcgattaaaagagttgtggggaagcagcagcttttttactgttcgaagcagcagcttttttactgttcatctctaagtttctatttaaaattgcaatttttattcggtttttagatttttcccaagaagcagcagatttgatttaataaattccatcacgtcaattacattttcattttatttatttcttcttggccctgtcaatgatcactgttttgagactaactaaaaaccaacctcaatattaatgataagcgcataataaaatttatgagtgagttataaaaccaaagcttatgcattcaaatatgtaaaatccttaaaacataccatgctcatcatatgaaatgtaaaggataacaaccccgtaaatcctctaaaagtgattgaaaaaagactatttaattactgttgtacttggcatagtaagagatcaaacctaacacagtgatcagcaaccgatcggacttctcaactgcccctccctttcgatattctgtctgttctgctcctcctcctccccttc

SEQ ID NO: 4840 - DNA, 1594 bp, Heterodera glycines
gttataaaaccgaagcttagccattcaaaaatgtgaaagttttagaacataaaatgctcatcagatgagagggaaaggagaagaagcccgtaaagcaacaaaaagtgaatggaaaaagacaaattaattaatgggggaattgggaagggaagtgatcagtccgaagagagtgatcagcagccgttcggccttctcagctgcccctccctttcgatattctgtctgttctgctcctcctcctccccttcgcagtccgtcggcgccaatggcacttcggcggcaattagcgtcagaggcggcggcggaaccctcacaaattcttcgtagggaggcggggctaaaagagtttgagtttggcattttgccacttttgaaaagtgccatttatccgcccatttgcccaccttccgtcggaatggcgcagttcgtctgctgctgctgtttccgctgctgctctgctaccgtggcggcttcacgatgccgttgacagtacggcacttggtgcacgcgttggttccgctgcgtttggtgcgcggcgttcacgggaaatggtcgcgggatgagccgattgttctgctgttgggtgtgctgctggtggtggagcaattgagagtgaaagtgcgaatggcgaatggcaccgactgaagcgaaaaaagtgtcaaaaatgaaagtaatggcaaaattagccccaccccgggagcattaatttattaaatggtcaaaggatcaaatgagcgtccctaattaatttaatagtaggggctaatagaagtacagacaaaacggacgacaaacgaaaaatttggcacttgtttccgaattcttatataaaagcataggtaattaaatcagagattggattcataaacagcgaactcaattacctctaacatttttggattaaataatttgttggattttttcagacgaccaatttgagggacggtgttgacctcccaaacattcaatcgttcaactaagtcaattagtgctagtgtgcccattggtttgttttctgtttacggaattcggccgagtccaaagagccgccgagggacgagcgaccggcgcccgactttcgccggtggagcatcggacagaagcgagtgcgacggcacagaaaggagccgaggaggacgagaaagacgagcagtgcgagtgaggccaacaccaactcggcgaggtgactaaacgcaccgaaaaccaattaaaaaaagtcatcccttttttgtttattccaatttttagatcatttcctaaactttttcgcgcctttaggtagtgtacattcattcaagatgtaactattaagtgtaatggtggcacaacatggtcacagaaatttcaattctctgaagggattttccctttttgaggggaaatttaatgtcagaaagtgctgttggagcgcctttcttttatggcctcggtcatgtcttgacgaaaaaagacaacaggggaaaatttgagtcattttttgttggaaaagtacataaaacagttaacgtgccaaacaagtcggccagagaaaagaaaaagagaggggaaaaataaaataaaatttgcaaaataaatgtacgaaatgaaaaattca

SEQ ID NO: 4841 - DNA, 1227 bp, Heterodera glycines
  unsure (1)..(1227): unsure at all n locations
aaagggcaacaagctgagaaagggcacagaaaatgcaaaaaaagggacaaatcacccggagggggggggattaggggacaattagcgaacaaatgaattaagcagtccttcccaatccaaatgagtccccaaaagtctgtccgaatccccccacaattccctccttctcaccgctctgttcgggcccgtctttgaagtccggacagcttttggtcggtttgctcaacggtttgttgccgtcgtttgctccgattgaactgcccgagggaggacaaatgtcggcggatgccaaaagtgaatttgtggcgacaaatgccagcgcagcagcggaggaacacagaaaattgggaggaaaaggcatttgtgggacaaattgggacaaaaagccttaaaaatgaaaggaaatggaggaacaaatgatgggaaaaatgtacaaaaacaccaaagcaacataagagtttgagcaaaagcgaataaatttggacggaaaaggaaattttaatcaaaaagaaagttttttgtgtcgtcggaccgatcactttacaattgccatttgaaaaatgcttttgtattgttatgactttgagctgaaacatttggcggatctcaacggcgtcacattttttgttgagccgtgggaaagcgaaggaaaagcgaatgaaaatgaaaagtgcgcaatttccgtcgattaaatggcgaaaaaaaaattaaaaaatgaacggacaaaacgaggaaaattgaacaaagatacatacataagaacgaagggggggggggggaaaatgaggagcgctttttgggaccaaaagcttttctgcctcccgcttcacctttctctctctctctctttgccttctctccgatcattcggtggcttttcagcaacaaaatggtcgctaatgatcgctttgaatacttatttatttattcctttttttctatgaaaaatttaagaatggagagaatgggaatattgggaggggaggaccgggggatgggcggcacaaattaaaccgacagaaaagggaaagggcagcgggggacagcacaattcaatccatcggcggggattgaattcttaatgagcagccgcggggggggagaagcgaagggatggccaaaagcaacgccaaatttccatttttccgtctttgccaagtgaaatttcggcgggaagaagaatttcgtgaagttttcttcttccgctgntcgtcgcccacactttga

SEQ ID NO: 4842 - DNA, 4298 bp, Heterodera glycines
tcgatgaccgtgccaacaactaccccgtcttctacgacctgggcccgtattttgacaccatgcccaccgtcgatttcttgtgccaggcttcgtcattgagccgtatcaatggcactgttggattagagccgattcttcattggattagtcaacagcaaggattcatcaaatacttcaccatgtatccttccgctggagggactcaaatctcagaagtggatttcagccactttctgctggtaatcaacattaaatgtgtcatgttcaagagcgtagtctgaccactaacttcggcggcgcgggggggggggggggctaaattcacacccctcaattttttatctcatgcctcaattaaatttaccgcgctcttatccacaaaattttttttttaaagtattagtccggcagtgccgatagcaccccggtgaaaaaatttgaaatttgtcgctcggtggtgccaatgggcgccaccgagataaaattttttgagaattgaattgaaatttgtttagaaaaacatatttttttcaaaattttcggcttaacagggctataattacctctgaccgccatcccttggctatttgttgtttgatctttttccgtagaaatccaaaattttcgacaatttttcaaaatttacttcttttttgctttaattttcatttttccttaaagcattttacactttgtacatctttatcagagattcttcaattctcgcggtgccccacctgcaagttacaacgccatgttcaaacacggtgttgttgctgacgatgtcaacgaattttccatcgaaaaatgcgagcattccctgaagttgaaggcctgcgtgactgcagatggtaccacggattgggctctgaagagcttatctgcctacgatgaagctttatcgaatgtgctcgtaatcgtccaagcgtgccccgtcaaaagaaaaataattttggaggaaagcgaaaacctttgattttgttgatatgtcctgcaaggacggatgatgatgcgtatttaaatgtttttaaaaatttgattttcacattcacattatgttttttttgatttctctattcaattttgttgtcactttaattaggcgaaggaatgcgtaaaaataagagacctttgccgtttttcttggtgtaattaataggactgcttggcacatttttttgtcatttcattacttttgttttctcgaaattgttttttaagtaaacttttcggattaggcttgctaacgaattggcaatggtcaagaatttcgattacgaaggccacacttttttacgaatttatgaatgctagtcgcaacgaaaaaatcgaaattttggttgaaaaatttatatgggaggggaggggcgaattgggggtgtggagggaatagcggccattttaaacaattaatctttttatattacctaattgaaatactgtatcactgacgcatttttaccatctaaagcatactgtatcactgactcattttctattgcaccgctcggatatttgacagaaatgaaatgtgactattttacaaatatttttatgattattttctcatttttaagggcattggatcgaccttttttggataaaatttacaaatttagggggagagtagtgattttggtgctcagtgcatggcgctcagtcggccgttgtccgccaaaatgacacaaatttttgtttcattttttggtgtcattcccttgcccatcgtccgttcttttcttcaccattatctccaattttcctcccatccattaaaagtggccattattatgtcatttttatcgagtcggaggaacgcctcgggggaaaatgtcggagggcggggagagaattaatcgcctcgggggaaatgaaaaagggaaaagaattaatagtgccaaggcaaaacggcgaaggcttgcccaacaacagaagggcaaaagtcatgttttgttgtgcttatggcgtcatttctttttttaattaataatttttatatttatttaataaataatagaatattttttctccatccgatttcttttaattttatttatataatattcattaaaaaggtaatatttttagtatagattaaatggatagtcaaatttctgaggacaaattaatgctttttaatttacgcattaattggaaaaaatttgatgatcagacaagggaaagtatcagatcagtgatcgaaaaggcattgagcttaacgcaaagacaaaggtgagctaattgaccaatttgtaatgcattaatcactgcccgggggttatttaagggaatcactttattattgaatttatcgatgctcgattttaaatgattgatcagaaagcgaaattcaatgcaactggcgaatcactagaataataaaatcgggcagcagatgtcgtttccttcaaatgagaattttgattttataaagcctaaaatgttaaatatatattaaaacgcgcaattctgctcaactttttttgggctattttaaaatttattaataaaatttagttttatttgcaacgacatttggttcgatgtttttgagttcttcggccgtgccgaactcggccttctgctgatcgcacggctcagcaaacggttcaatgcgttggtggacagtcacttttcgatgacattgtcagggaatgggcataaatatttaaatttaagcataattgcttaaggatccctcatttgacatttgattatgcgatgattcttcgtgcggaggacggcaccggtgccatatttaaagtgcggcacaaaggaagtaatttgcgtgatgaaatggaagaggtgccaatggacagcattccgtttaggaaaatcattaagaaaatccacaaaattgccatttggtatgttttgtctaacgagcaaaaaaatttttaattggcctaatttgaaattggccagttggaaagggtccgccgcccaacctcaattagcaattactgttaaatatcaaacaattagcatctcattaaggccttgccatgaatttggcaatgcccgatagcgcttgtttttgaattcaaaaaggtttgacacattataatgcgctgattattgtggccataacttttttgaaacttggccatttactttaaaatttctatgataattaacggcgggacgaactgggccccgctaattgggcccataatttaatttagtaaatgtgtaaatctcaaatgtttacaaagtcaaaatggggttaagaaataagcccccgggggatagatttcccccctacccaaaaaacggataagtaccgattatggtttcaaatccgccccaatccgttcagttacactgatcgctctgtgttcacttttttgcgagccattaaacatgcgtttgactcgcgcactcaatttgaagtgtgcgcggtaattgagcaaagttgggacataatcataaaagaactttggccgctagtgtaagtgcaaatttaaaaattataaattttcagaatatcattaaaataaataaataaataatgcattttcaggccaatgtttcttggctgcatcagtatttcttggaaaggcatcccaaaaattgagtgtttgacatttgaggccaactgacattttgggatatgtacagtgtaccgaaaattaaatgatttgaaactaaaaaattaattaaaaatataaattaaaatcctttggatttaatgctgaacaatcggatatgtaaaaatgttgctcatgttcaagcgcaaatcgtacgcctcagaatttaaatgaataggtcaaaattctgtgccaagcaactaattgctaaatgaccaacaccacatagaattattggcaacagaattattggcattctggggcacacttcactcaccatacaaaatggcccaaacttaagtttttgtgaaaatgcgggattaatcctacgggaacctttcccgcaaaagttttaaattccaattccgcaaattttgtcggcttttcccccaaaaaacaatgtcctcaaatgtcgaatgttcaaatttcaaatcctcaaaatccgcgctgcgcttggaatgattttcccgtctctctgttggattgtgctgagcttcgcatgatttcgtccgctcatttgccaatgccttatgctgttgttgatgatgcctttcatcgaacaaatgtggcactgtttaattggcttcatttgccgcgcgcggacggccgccccaaatatttccactggtgctccgagttggatgccaacgaaagcatcaagcaactgaaggaggtggagggagggcactcaccgagacggggcattaa

SEQ ID NO: 4843 - DNA, 3992 bp, Heterodera glycines
  unsure (1)..(3992): unsure at all n locations
aaaacagacagaaaatgtttttaagttaatttaaaattagcgccataaactttaattaanatgaatagcccattgtttgtttttttggctcttccatttntaattttccactttcaatgccttccgtggcaattgtgaagatcattattttcaattttttttttgtatactcgtgggtttcctataaagaaaatatgattcctcatagttttttttaaattgatacatattttatcattttttaaatgaaaatcctaccaattgagcttaataatcgcaaaaaccaaccttttttttgttgaaaatctgttaacaaattgcacccaaatttttaaaatttcccccggcggcgcctatcggcaccgccggacccattctttcccaaaagttttttgaaaaagcgctccgaaaaaagtgatgtgaaaagcaaatctgaatttctattaatattcgatgatttagtccaaaaatgattaattatttgaaataattgaagaaaatttgtttgaaaattttcattaatttaatttattataaaaaaccaaataattttgtattattttcacttgatataaattaaaatttgaatttttttttaaatttttaaaatttcccggttggtcccggttcccggtttttcttgcggtcccggtcccggtcccgaaaaaaaatcgaggtcccggtcccggcttctcaggtcccggcaagtcccggttttggcaaaaattcccggtcccgtggcaccagggctggacgtaactgattttcagttacggccatccgtaatccgtcattacggcgattttttcagttacggccatccgtaatccgtcatgacgggggtcaaaaaaggccgtaatttggcgtaatccgtaatacgtaattttcaacaaaaattttttaatttaaaaaatccaatttaaaaattgttaagattaatttatgatcagaatatctgcttgttttttgaggtgaaaatcccaaaatagtttgtttcgcggtgtgctttttccaaaaaactggggaatgtggggggggggggggtcaggcggcgccgaaaggcgccgccggaaaaattttttaaaaattttatgcaatttgctataagattttgtctaaaaatgactaagattttggagctaatatttaaaaataattaggaatttttggggcgggcagtgccgataagcgccgccgaggaaaatttttttcagaattttaacgaattttgttaaaaaatagcaaatttttagcatttcctcttttcccctttgctagcctcccccccccctttatgtatgttaataatactacaaattaccaagaataagtcagattaaatcgaaatatgggtagccttttaataaaaatagaaaaaaaaaattcattttataaaaaataatcttgcaagaaatccgtaatccgtaactccaaaaaggccgtaatttccgtaatccgtaatacgtaatccgtaattacacgtccagccctgacccggacctacctttaaaaaaaccggtccgggtatcgggtaccaggtcttgaaaaaacagggtatccgggtctggccctaccaaaaaaattttttttttttgtgggtttttatttttgcatacactgtaactcattattaagcaatgaaattatattcagaaattcatcaacgacacatcgccggccaattattttgtcgttatgccaaaggacaaataccgcgcatcggaggatgaaagccttaacagcaacaatggcttttccattgtgaatgagaaaacgcaagaattgctgcaatttggacaattttggtgcaaccgttggatgttaattcggaatcaaattagttgggactgggcgggttttgtcatgaaaatatttaatgatgacgtctcgtcctactacaaagatcgtttcatatttgcactgaatgatgagcagtatgatgatcccgaatgaatcaaaatgacattaattgagcaattttggattattaaacacccttttcaccgtggttttatttgaattgaattttgtctcacattaacttttgctgaccaaaacttccgaattgaatctgattatgagcgtgagaaaaagttttactttctaaacggggtcaattaatataaaaagattattccacaatgtattgtatcaatacggtcacgatatacttaaaaaactgtttgattgagacatgggatggaaaattggagttaattaatggtgaacaaatgaacggacgatgggcgtgttagtttttttaattaaaattgttttttatttttattgttacgctttatcttttgaaagcttttgatagtccattccaaagaataaatacataatgtttttcaaaattttcctcatttcggccacctcaaaattcgtactttactcacatttaactgctttttttcattgttgtttattgtaaatatttctctatttttgtgcataaaacttaactgtaacaaggtaaacaaagaaaaaaaacattgaaattttggagataaggttaagaaacgaacggatgatgggcaagagaacgaaaccaaaaaatgaagccaaaatttgtggaattttggcggacaaaacgccgactgagcgccaaacattgagcaccagaatcatacctcaaccaaatttgcaatttttatgtcaaaaacggttgattcaaagcccttaaaaagctagaaaataattctagtttttgttccaaatttgcaatttgtcccccgcccaaaaaatgatcaatttggaggacttttaggaacataaattgagaaatcgaatgggtttgacggcatttagaagcaatttggcataaatttaaaaaaaaagaagctaaaagtaagttcaaaagcaattaagaggaaaaggaatgaatggatgggatagaaaattggagataattttaagaaacgaacggacgattgacattgaattctttttaattttatttttaatttaaaaatgattaatttaatatttattttatgctttttcttgtgtaagctttcgccattccaatggtagaacaagaaattcttttctgttgtccaattttatgacaataaaattttgcagcgtcaaaactgaacaattaaaatggtcgtcgcttcactgaaattgtgcaaaaaattatttaattgtcattttatttgttaaatttcatttattaccaatttaattatcatttttctttttaaaaaatttaataaaactttcaacacaaaattcattttcaaaaaatttctgattctttgatttctgagacgaaaaattattagtattttttttttgtcttatttttagcgaattttattccgaacgaataattagctgatcaataaagcggaaagctatagtaggcagcaaaaaaacaacaacaaggtaatagccctaatgggaaaaataatgatttgaatttttcgattttttgcatttaattatttatattatatttttcattttttttttttttctaaaattgctcagaaccttaaaaatttttgtaaaaatggttttttattctatgaaatattgtaaaaaataaatatgttaaattgttgtttccatctttttgcctttaaatttttttggaatgcctttgcagcaaaaaaaaatgtcctttaatacacatataaaatttatttccctaataaattttcttatcttttaaattgcaaaaaaaaaaaaaggttatagttctaatgggaaagaagtaataatgttttttggatttttcgattttttgaatgaattatttttccaattatttttcaactaattttatttatttatttatttttctatacccagaatatatataataaattattttcaattttttcaatttaaataattaaatttgnaaatgccttgcagcaaaaaaaaatgtccttaaaaatataaaatttatttccctaataaatttcttatctttaaaattgcaaaaaaaaaaaaaaaaattaaaaatttttttgctgctt

SEQ ID NO: 4844 - DNA, 3302 bp, Heterodera glycines
tgttcatttgtatcgattggattgagggggggggggttaatgggtttaaacgctgtgagaaatgccgagagagggaagggacttccgttgccttatcatttgttggtgcccaaacatttacgaccagtacagttgcatcaatgccaacatgtaatttagcatctatcgattcattagatttcactaaatttgacaccgattaataggcgcgagtgaatgtcagcactcgtatcaaagcgctgattgtgagccgttttgttttatcccttccccattgatcgcttcttttctcctcctccccttaccgtttttgtttccttttcctttgtccatagctttaaacatttgattgatttgctcatttccctcatccagtcaatctctatctctgttttattagcaataccatacaatataataccgtaatagtcaattttacttttatacgttaatattgtaactttaatttgcactgttttgctgttagttgtgtaaattgtgttacgacagatgcctttttggttcgactactttttaattggtacttataaatttttctagtgtatttaaatgctgaaccgaagtccgaattataattgtaaacctttattactttttataataatacaatttatttgtccattaattagttaattagtcacccgccatttcccccctctttcgaggctaattcgtcctctccaccgccgtttcttccaaaatttgtccccctttggtaagcacttgacttccgtcccattctttggcattcccgtccaatggccataatcgtccgaccctttgggacggtcgccccggacgcgcgcgaatgaatgtttcacgggctttccgtttgcgtcgcattccacgaaaatgcgctgtcgcttcgcttttttcagttgaggtactgaattgaaatgaattgaaaggaaaaatattgttggaaagagccgttggagagcgttaaaaaggcacttaaaacggaaatagttgtgtttttcacgcacttttcacaatgacttggcgaactccgatggtttgccccgcgtcactctttgcgatgcattggtaaatgccttcgtcctttttctcgacttcgcgaattgcgagcgatgtgccgagcaattggtactctgaacgaacaaatcacagatggccaccccttcgtttggcaaagttttggcacttcgtccgtcgccggaaatgtccgccgccgctgtgtcgtcggctttctcccacgagaccaacggttcgggaatgcccgtcgcgttgcactgcaaaacgaccatttgtccgctttcgacttcgatttgctcgcgttcaggcaaaatggacggagggacttttccgggagaataatttagcacgaataaatgaaatgtttgcttccaactcacttaacaccaccaaatccactgttttgttggcttttccggcccaattatccgcttcgcacgtgtaaacccccgcgtgttgcggctgcacctccccaaacactgccgtcgatcgccgtgtgtccgccgattggactgagccgccaatgccttcgttagcggtgaaagccgtaggtgcaactgatcaaaacgaaatataggccaaaaatgggagaaaaataacatttggtcagtggctgatcgtctcgaagccaacgatctttggcggtggaattcccaccgcttcgcaccacaattcggctgtcgcgcctttctccacgatgacacgcccgcgggcacgcgcttcgtcctcccttattttcggcgcgactaaattttgcagtgtccgtctgtcccatttccgttcgactttaaatgtggccttttcctccaatttcttggcaacttctcagttggctcttcctttttaatgatggcattttccttttccttccgctgattcggccatttcttacggactttggccacgtgcctttcccttctccgaattgtcccgcctaattccctctcacctccaacatggactatcactgtcgacgaagcatttcccgctttgtttttcattgtgcacgtgtaatttccgccctgagcccgcgtcactttgccaatgcttttcgtcggtccctcccccgccaaagcccgtccgttgtaagtccattggatttgctctccaatttcttttcccgtgccaattacgccgcatggaataagcaaagggccgccctcagtgacatttattgttaaaataccctttgaattagttaattaattgccattttaaaggtccctcgcctcctttctcgaccacctttctcgaaagggtcggcgcccgaataatgccaattccgaattccaattggtcaatgcccgcgttgttaacggcggagcagcggaagaggcgagtgccttcgtgagaaaggccaaaaaggtgcagcgtttgtccgtattcggagagttcgtattgggcatttcttttcaaaaccgtgccaatcggatgaaaatgctttaaattcgcttggattcgcatttgctttttctcctctcaccgatgagtttgtgctctcggcactccaaatgacttgtggtgtcggatagcctcgtgcggtgcaactcaaagtgccatttccgccccggaggacggccatttgtcgtgccgattcgcttgtcagcttgggcggtattaacacttccagggtaaatgcttgttggtcggtgcccgcttcattggtcgcttcacacacgtaaatgccagagtcggagctgcgcgtgtcgatcactttcagacgacttccctccagaacatatcgaacgcccacttcgacaagaacgccgtttcgttgcttgaggcaaacgaatcatttggccaagaaatcaaatcgtttatcagccgttgcttacccaactgatcagtggcgcgggttcgcccgaagcgacacagtccaacacggccactttgccctccaccgcctgctccgtgccccccttggcaatgatcggcgcttggaacacgtccagccgatactccacgctgtcgttgcccacgtgattggtcgcttcgcatcggtaaactccgcgatcagacaaagaaatgttttggatcagcagcgatcggttgccctcgcccagctgaacgttggcatcttccttcaaagatttctcgtcctttgtccaacgaatgttcggcggcggttttcctatgacgtcacagaaaaaggtgagggaacggcccaacggaagtctcggattcaattcggcactttcgcgactgatcgccggaggcactgaaaagagataattaattaagcaaaatgacatcaccaagcaaatgggatgaaaaatttactgaga

SEQ ID NO: 4845 - DNA, 1265 bp, Heterodera glycines
aagtgctttcgttgggcctaacggtagtgtcgctttttgtctgtgcgtgcgcttcagtttcggccctcccaaagtgttgtggcctccattggccccgtcctttccaattccgtcggatctgctgaaatttcgccctgacaacgctcactcgcggcttatgcccgccggtcacaaaagcgggcgcgtaagcgtggacgactttagcgccagccgatgggtgcgcgactgtcgcgcggtccaacgtcagcgagtcgtacagccattgccgttttctgggaaacccgaacctccgaccggaaaaggcggaccctcttcgaactccgtgcagaagtcgtcgcatgctgaaggcgtactccgcgtagatgggcctcgagaaaccttcccgggcgcgggagggaccacgagaatgccgaaactgtttcctgagtttagtaggccgacggaagggctcttcggcccattcctcgtcgtcccttcggctacccctccccagcgaaaatcgctcggcgcgttcccgcgactgttgcgcttttcgtctgagtttgtttttgtgcgagtgctccaaattccgacaaaattcactgtccgaattcgtacaaaaaatgtccacgtcgaatttgtgaaaggaatggccagccctattcgaagcgacgcatttgtattggcccgcgtcggccagcgaagggctgcgcagggcgagcgatctctcgccgcggatctgttggccagggaatgattggtccattttgcgactccacctcaatgtgcgggtccgtctccggctccaacggtcgtccgtcttttgtccatgcgacgcgcaagtcgcccccctcccccggggccccccttttcaatggacagatcaattcgaagggttcgccctctcttcgcgacactctctccgccgtgccattttccatctcaggaggcactgaatgcaaaatcgcaatgttctccactgatcaagcccattcattaccaagcacttccaagtgaaactcctcgcgcactttgcccactttgttggcgacttcacaggaaaatgtgccccgatcagagagagtgactcgccgaatttcgagtgtctgattcccctaaattttgccggtcattcattgctgatcgaccgattgccaatctgatcatctgctggtcgacctgttctagcataattcgctgctgtccttcatccaccaacgtgctttcgcctttcctccaagtgatcgtcggctcgggaatgccaaatgccggacattccatggaaa

SEQ ID NO: 4846 - DNA, 3553 bp, Heterodera glycines
ctccacgaccattgttctgtcattttctgattctttttcccttttcccaattttgtgatctttccttctctttttccatttgttgatcgcttattggcacttttcccaatttcgatcattattgttatttcagcaaattactattttcccctattttccaatcattttgatccctttccattttctgatcacttattgccccctctctccccccccccaatttccgatcctttttaatcccctcctcttctctccgcacctttgggtgacaaaatgacgttgcttttgtccgccaatggtcttcctgccttcaaccatttcactttcggcgttggctttccctccggcaaacattccattctcgctgtgtccccttcgaccactttcacttcgtagttcgatggcaatgggacaattcgcggatgcatttgaaccaaaaagggaagcgggggagtaactaaaaataaaagtggcactttgggcaatacctcgacgaagaaatcggcgttggcactgcccgcttcgtttgtggcgttgcaagtgtatctgatcagtggtcggattggccaaatgatcccaattggagtttgcttctcctcacctccccccgtcggtctctctcaattctctcagtatcattttccctccctccggtggtccctcctccgttgtgtttgtcttttttattcgctcttcttcttttgatcttccttcttcgtccgttttgtgccacgtaatttgtggtgttggcactccattggccgggcattccaacgtcaaattggcaccctcggtcacccgaatgaagcgctctccctcggtaatggtggggggaactgaagcaaaatgggagcaaaggagaagatggaatgggtaatcggaatcattttggacaaggaatgcgattgggttaagtcgtctttcccaaaatgccattatcgtctttcccaaaattcccttctcttcacccccgctttttcctttttcccactgacccatcactgtcagttggatgttctgtcgcacttctccgcctttgttgctcgctttgcatgtgtatcttcctccgtgctcctttctcgtgctgtaaatgtgcaaattgtgcgcgtggggaggtgtaaaagcgaagtgaacgccgcggttggcgagcagttcgcttccgcccttttgccattgcactttcggcgtcggtgtgcccaaaactttgcattccaatcgctgctcactcccctcgatcactttgaattcggtggcaaaatcgacaatttgtggcggttctgaaacggacagaaaaatgaagcagaagggaagcagaattttaaaattcaatgagagagagagataaagagcgatagagaatgggaaagagagagtttacgcaggagagtgagagagaaagaaagtgcaaggaagagtttttcgcctgtcacattatccatcccatacgatcagtttaaaatttcgcaaaattgataaatgtaccgatcacttccacaaaagtgtccatttccgtcctgccgattttgttggtcgcaacacacgaatatcggccagcatcggaactccgctgcactctttcgattcgcagttgtgtcgaattgttcagcaactgaattctccccccttctgatgcatccaccgtttgtccgtcgtgcgtccatttgattctgaaatgccatccctttttggctcctcaaattcggctgtttactcgggcattggaattccgtttggttggcactccaattgcaccgtttggcccgttaacacttccaaagtgccgtaatgatcggcgattgaaggaggcactgaacggtttggcacattttttcacaatataacgaaacgtttggaccaaaccgagcacaatcacagaaaaggtggcattagccacgccagcggcattcaccgcaacacaagtgaaaacaccggcatcggaaggacgaacacgtacaagatgaagtcgttgagcacttggagaaagctgaagtggagaaagtaaaaagtggagaggaaggcaatgaaaagatggcaaaagagtgaaaaggaccaatgcccatttgggcatttttcgctaccattttgggattcgttttgccatccgtccccctccccctcccctttcctccttcaccatcaccacttccacctgaatgtttccgtcgttgtgctgctgttgctccgtgattggcactccgtttttggcccaatggaaaagtgccgtcgcgtcggcgggggcgtcgatggccattcgcaggggacactccaacatttgcgtgtccctctccgccatttccacggtcaattcgctctccgacatttccggcgccccttcgcatgtcaaacgttcaaatttcgaaaatttcctcattcattaactcactgagcagtgacacgacaatgtctttctccgcccgcccctgcaaattttgcgcaacgcacgaaaatcggccgacgaagcgttggtcgacccgttcaatgagcaactgctgactgttggcaattgtttaatttaatgggccacgaaaataaatattaaacacaaaaaggggtggaccaaacaaacgaattaattaattaattaatgaaatgcctacccatcgtctagcaaatgaaagtgccgcccctccaattccaaaggaactccgtcctaaacaatgctttttattttgtctttaaatcttgaaaataattaatttatttattttatttcgcttcctatttttggttttttcactggcgaatggcaattagcaattgttgcaatatttgagtttaaaacacttcggttttagagaaaagccatcccagcgtatcattaattatttcttatttatttaattaattaatttttattttccatcgaaaaaccaattgcccgcccaaccgaccgccaatccaatcgctttttccaaaccgaaaaacgcggggaacggaaagggaaatgaaaggcaaacaaacaaacaaacactggtgcaaacactgcagaaatgagaaaatgcgatgctgaatttaatgataacgcaaaggcatatcataatttgttttgccaaaagtgaaggaatgaaaattctgagaaaatgcaaaaaatgaattaattttggcattttcagtattttatgtttaaatttcagtgttttggtgcgttggattgaattgtttcaaatgtcatttgttagtttgtcttttcgttttggcattactccataatttgtggccaatttgctgaatttaatttgttggcgatcatttgagggtcggccgactcaaacggagctcattaaattaaattaagtgaaattgaattggtcaaattcgaattgcgaattggacagtcatttcgccaattctcacattctaaccaatttaaatttgaattctttcgcttcgcttattttttggcatctttcacttttttcatttatttatcaattcacaaattttaatttcacttttttttaaacttttgacctttttgttcaaaatattttatataattatcattatcattttccggtgaatgaaaagagaagggaaatgggggggggggggg

SEQ ID NO: 4847 - DNA, 2138 bp, Heterodera glycines
cctctccccggcctatcattcactttttctcccactccaattccctcccttctttggctcatccgacttttctttctttctttctccccttcttcagaatggggagaagaagccttaattgggcccatccatcggtgtaataaaatgaaaatggggagggggaggggaggaaaggccattaccaaatacataaggacaaaatgtgttgtgccatcgacggacggtggaaagcaattagcacaattaaaggagaaggcaaaccgagcgaaattcgatggcaacggtggagaagcaaaggaaaagctgacatttgaaaaagtcgaactcattccgaaacgctttatgcaagaaaagtgacaacccaaaacaaatgtacgaatttggcatttgccattcgccgcacctctcaaaaatttgccggaatttttaatattctccgctgctaaacccgtcaggtggcccgccacttcttcctatgtttcccctcattctcctcccgacaacctcctcttctcgctgtcaattgtcttgaatagcaaatgagttgggagaccactgccggagggcagaggccactgcttttcattcgctctcccttctctcctcactctctctctctctcaccccactttctctctcttttctctctcgctttttctcactatttccccaatttccctcactctcctctctttctttcattcctctctatcactttctttgcttctctgttttgactctcttttctctctgccaattttgaaattctcttctccgcccattccctcaaattgccttaggcttttctgctcggatggttgggatgtgcctttgcctccctctgtccctcccccattttccctctcattttttcatttgtccgatcatcgtaaaatggcatttttccaaaactaaaaacatctgctgctgtgtgtttagtttggtccacccttttgcttttcctgctttacttttccttttttgatcagtgtcattccttccgccatttcccttaattttcccgcggctcttccaaatgaaagccggcgccgaatgataaaagccgaagtgtcgctctgttatttgtgctcatcgacaaatgccgccgacttcttggccaaatgcctttgtaagcaccgcaaacgaaagaaatgaacggcgaattgcgccaacccaaagcagcagcaccagcagcagaaacagaggcaggcacagaagggttgcatcgtcaccagcagcaccgatcatttcgtccggcgcttctccatcgtcttcggcccctctctttggccatcgtcgtcctcccccgtcgccttggccatcgtccccatcgtcgtccccccgatttccccccttttctcgggtctctgctcataatcgcctcctccccctcccgcttctccttctgctaattcttccgatggccttctcctcccttctcattcattctgcaaatgccctccaccatcggcacgaacacccgcaaaaatgttcaattgagggcgaaatttgcacaacaattaatgctcatgtgtgccgaaatgggacgtaagtgaaaaatgggggaatttgttggagaaagggacagaggggagagaaatgcgaccccaattaggcgaaatgcaaagacagacagacagaaacaatgattaatgacggatggcagagactggagactcccatgtctttgagaagatttgaaatatgtagggtaggtatttggtttaatccaaccaaaacaaaaccgagagccaaaagcggcctaactgagaattgataaacccaattaaaacccggtcattaactgccctaatttgagactaaaaacacagcatcgattggcttattcattagtcattgtctgcctaacggctggcaaatcaaaaaccgggattagaaaatggacgcctttgtccctacatggattcccagccaaatctcgatttaaccaatttcaacaaaaacttcgttcagctgtgtgtccgcttgcactcttcgcggcatgaaagagtgccattgcgacgtggaggaggacaacttttgctttttgtgctgcggcagtgcgaatgatcgttgtttgccggcacatgagcacgacattctcaggtgagaaattgtaaaatcgaaaaaggaagagg

SEQ ID NO: 4848 - DNA, 1312 bp, Heterodera glycines
taataataaccaagggaatcaaatcttttcttttttaacagagctctctggggaacagtttgtccaacaatgtctgagggttttaaaatgatctccgctttcgtccctcgcttccttcttctccctctgcccttctgtaacgaagaagacgccttgtccagcagcgttttcatgccttctcttccctctgcgagtagcgcttccttcacatcgccgcctctggcagcctcgccaagcactcgtgcgccgcgctcaagcccttctttgccaacttcagctgctatgtttgttgcgtagggcttcgccgcagcgatcatagggcggagatagcgccaaagattacgcagtaccgctcccactcccgctcccttctgtcttgggattccaagaaagtagccatagccacgctggaaggtcggggatccctcaaagtaggaaatgcttccaccctgctgatgattctccaaccgcaagttcgacccgttgaatataactcggaccatcgtatcagaaggttacgacctttttaaactgaagagtcagcacaacttgaccaaattcaaaaggcacttctcttaaaccaaaaaatggaaatattttgaaaatctcaacactaccgtccggtcagcgtacgaatctcaacgtccagcacgtccacctctctagccacaattttgtggaataacggtgactgaaagtccttctctaccacactgcctgacgtgccctcaaccgcaatcacttggaggagattggcgaaggtgttgccaaaaatcatgctttcgatgattccactgtttaggtatatgcacagatgactgacaccaccggccaagtcaacagcgtacttggcttggtcttcgttatgaatttcttgctgctgctcgtagcccaacacgtaggccagctgatccgtcaaagtgatgtgtgatattttgtcgctgaaaatccttagcgtaaagcgtccaagctcgtccgcgaagtagaatcggaatcccttgaccagctctatcagctcgttcttctcctctcttgtcttcagctcataattttcgtcgaacacttcgctctcaaagatttcccggaactctgcaatgttttgctgaatgtttgctgatgggttgaactccggcgagtcccatggcagttccggatgtcggacaatgtacttgtgcactgcattcacaaagtgatagtcatccttttcgtgcagataatgaacgtcgggggtcgggtccttgccatggaccagtcgcatgtagcctccacgccacggcttcagctcttttagcagctccaactctcgctgctt

SEQ ID NO: 4849 - DNA, 984 bp, Heterodera glycines
tctctctctctctctctatgcttttttacgttataaacacattctcaaaaacataatcttatagttattttttcattgctttacactgtatgaatcatctcatcgaatagcagtccaaattcgtttttgtataaatttacgaaaaattgttttgggaaaatgcattttttggggagatgactcatgccaaattgttttgccccaattcctaatttattttttcattttatttttattactctcccattattattgaatacaaacaaaaatttcaaatgaatttattttcgtttttcttggctttctccatctctttactgctgtttttcccggtgtttggctcaggtattttttattttgtgttttttaacttttttatttaatgtttttttaaaacaattaatttcaaagccctccaatgcaaattgggtcgtgccacctatttggaagaagtcacctcccctggaccatgcccaaatgcttccgacgaatattgcattgccgtcacctgtcgcaaaggtcagccagagtccttggcaaaacgtttgaaacacagccaaattaaaaaaaaattgccactaattaattaagaaaacagatttgaattggtactaaattaagtttaagaaattcattttaattgacactaatgaagttgaagaaatatctttattggaactaatgaagttgaagaaaacacattttaattggcacttattaagtttaagaaattcattttaaatggcactattaaattgaaaaaacagatttgaatttacacaaattaattaagaaaaaagaattgaattaacactatattaaaattgaagaaaatacaatattttaacgaattaagtttaagaaaatcgatttgaactggcactaatgatgtttaagagatacgtatgaattgtactaattaattatgttgaagaaacacatttgaactgacactaacaatgaaatacctataaaatcgcacta

SEQ ID NO: 4850 - DNA, 6291 bp, Heterodera glycines
aaaccatttgaactgacactaacaatgaaaatacctataaatcggcactaattaatttttgctgtttctagcggacaaaagtgtcatttacaccctttggggctgtatgcagaacaatgacaaagcatcgtgcgacaatgaagccaaagagatgactgaagggattaccaagaaaacgggcgtttcatgtgattgccaatttggagagaaaggcaaagaaatgggcaatcaacagttcattttgccaccaattgcaccaattgtggaaaacgtgacggacataaacgcgttgaaaaaccgtaagaaatttaggaacgcaaattatagggtgtcgtcatgacaacccgtataaaaggcactcgtacactgttgtacaaaggcaactcgtaccattgcctagcttaggtatagacttccggctctggcctaagctttagactagcctaggcttcttgggtctaggcttaggcttgcttgtctctaggtttaggcttaagcctaggctttgttttgtaaaatatgagttgccttttgtacgagttgccaatgatatagatgtcaacaacattcataagaaaatttccataaaaaatatttaccgaaaaccattttattaagattcgatagtaaataaacattaaaaaaaattaaataagaatttctagttttaaataaaaatgttttttaagattcttgaagaaaaatttattagaatttttttttaattaaccatttctttttttgatggggattatgagacgaatttatgaaactccctagcggaatttacgaatcctcattttgaggcattgatattcactttttacagggcttgaatgcaaaatcggagttttccgtgaaaacggaatcgggcagatccacatcggcttctgtggggcggacgctacgcattgcttcgcggcgagttgtaagatcggtaagggtagcagtcttcaaagaattaagttcagacttgagaattaattatgttttaaaagcaaattcatttttttaaaatgtgatcagtcaattctctgaaaccgaaatttcgaaaaattataattttttggtgaaaaggcagcgtaagaatcgtgatcagtgagtgatctgtgtgattaaagagtctcgaaaagcccatggaaccttttttgacattcttttcaagtcttaaaatatattttgttaaattttttaattctaaatttttcaaattagatataattatttgggtttttaacagattgatgcattgataaaaatttaggaacaattatttgaatgaattttttatctatcctataatttttggtatacaaattgtgccaatttttatagggtttttttggcttttatttattgatgaattctttggtaaaattaaattcattatttaattgctgttcatttaattaatgctgttcattttgttgcagccagtggtgtgatcgacacttggggctgtcagccgtccaatgactattgctcaaaagttggcaaattgtgccatttttgcaaactaggcaaaaaggacgagaaacactcgaatatgaacttcatgattccgacatttttgaaaaaaaatgcaacgcgtgtgaccaaaggcattgtaagctcgacggttttggcaccgctgccggagggcaccaccactacgacgacgacgacgacggtttctacgactactacatccacggcttccaagacgatttcgacgccctctgcgaatttggtgaccgacatttcggatgaaatgtccgaaacaacggttgacggtaaaactgagtcccggccgtttcacccccaaagttttttgttcaattaatcattttattggggcggaggagcaataaaaaagccgagattaaaacgctgaccgaaccgaaatgtccatgccataattagcaaaaattgttcataataattgctcttttaatgttccagaaaacgtttccatttgtgccaacattccgaccgtgtcgattgcatttggtacattatgacaacaatggcacataaaaaatgattatttttgagcaaaaaatagtgcagataggaatcgggggaccgaccaaggataaaaagcgcactttttggggcttaattttaagttgtaaagtctgaatcggtctgaaacactttcgattgaagacatatggtcatcaaaagttccttctttggtaaaaattaggacatcgtcgacataggcaagagaaatgtcctcgagacctgaaattggtaacggatacctgtccggaattgttacttcgttcagtttcctgaagtccaagcacggacgaatgccaccgtctttcttttgaacaatcaccaaaggcgtaacccatggtgtgtcggactcaaccattacgccggatgccaggagttattcaatgtgctttttcagttcttatctgtacctgtacggcactctccggggtggtgaggaaattggctcatctgtcgttgtggtgatgtgatgttctgcttctgaaaacatacccaaatcgtattgactttggctgaaagtgtccgaatattcctcaatcagaagtttcagcctcttaagttcatcatctgtggcaactgtttttgaataactcacaatgaaggatggatcgattttggttttattctgatcatcaagtgcaatgacttgtgtttggttggcctctctaagaagtccggaagagtcgcaaatgacttcattggcatatgccaaatgcattcctttccaaagacgtttggattccattgatggattaattaatgccaactttatctgtattttgcccgcaggcgaaacgctgttcaacactgacatgccctttctgattaggctgttgtcggttctgtcgattaccaatgggtttgatgggctcgaaagtgtctcaattctggcattgatcattatttctgaatccctggggacccaaatattttcatccgcacaaattcggatgtcgttaagcaaaaacgaagattggtggcaaaatttgacttttgaatcccccaccgaaaattcctttttcgaataatcaaaattttgaatttcctccacgtcggtttaggaattgggcttttcttgcattgcaattgttggccaaatgtccgactctattgcagaaatagcaaaccgggttgttagaccaatttctctggctcatgtgctcctgtctccctcttgcccagtcacgtcacgattgctgttgcctcggcctcccctgtagttggcacgttgtcgctgaacatcatcagcagtgaagggcctgaacccccaagtgttattgcgttgctgccttccaaagttgcgatcattttcggcatttggatttgaatttgattgctcattttcggatttgtccttcagcgcattaatcaggtgagagaggcgagtgacatcatctcctttagaggcaagaaatagagcctcaagctcttctgcttgggctttgaccaattccaaattcttggcttgtgtaaggccaacaaggcgaatgagaaagctcatatttggcttgagtctgtccaaaaattcctcacaaactttctctttgcgctgatccccagatagtgatggatttgatgactcaactagcgaagtcatacgccttaaaaattggccaaccgtttcatcctcacgctgtcggcacagtgcaagggttctcttcgccaattcccgtcgttgaggcgaatccaatttggctctcaaggcttccaaggcgctggtgagagtcacgatttggtcagcctcgagctccttgaaaagtgtcctcggcgtgtccttgagtgctaatttgagacgtgtgactttctctccttcagtcagatttttcccggacaccgataagtagtccttgaatcgctcggcccaatcatcgaaggcgtataccgattcttctccgaataactccaaatttgaatttatcgataatgagttgctcaacatgttgatgccaagaaagatcgggttgggccggcaggattgttggaagaggtcccgacgcctttctgtgtttgcgttgccgtaccgccacctgtgcttgaaaagccacggtctgtgcccttgttatccttcaacggcgtttcaaattgtgaggagtcgtcctgctcgcgcaccgtgctgctgcatctgttccatcattcgctcgttcaagctcgtcgattcggtcaaccaacgtttcaatttgggccttgacggtctcaaaattggaattggcatttgagacgacctccgagacccattttgtctttttgtccatacaacggttaagaaccctaatggaacggttcattccgtcttccaatttgaccaattcgttatgggcggcctctaagtcagagaccttcaccgccgtttttcttttcccgaccaaaatttcctattaatgaccgaaattgtcatttcactcacctcctcctcatttctcaactcatatactgtattgtgcccgcaggcagaagtgctgcgacgaacccctttagggttgtcgggaatatccattgctttagtcgtggagagagtaagattaattgcttttgattgcttaacaaaattaaaaatgaaattattttagccaaatatttgagctcaaatatctctcataaaataaatgattgcatgtttgcctattcctttctgactgaaaatgcgatagatcataaatgaatggccaatgaaagcagtaaaagaatttccgcgaatgtcgctctttttgaatgaatgtgtaataaacatcgccaatgttctcacgtaaattatgtgaactgatcgcatctccgctaaatgaagagcgccgccgtggcctccgttcccacggccgagtaattaatggcggataacaagaaaatttttgcaatctttgaactttgaaatggccgaacattggactcatacaaaaaataactcaaaattaattcgaagtcattaatttggccaaaattgtaagtgagtaaatttggcattctcatgattggccagaaactttgaacagtccaataaagaattcacgtgcattaatttgttcggtactctttacacaattttctgaatctctaattatgaatttttttttaactttggcacactgatcataaatcatgtaaattatctctggtgattaactcaaattaaaattctgatcattaacatttttaaagtgcacgtaattaaattttaatctttaactcaaatttaattctgatcagtctcttttaaaagtgatcactaagcgcttgactgtattgtgcccgcaggcgggtacccaaaacattctctcctccggcgccattactttgcccgcaggcactgcagctgctgtcgtcgtcgatcactcctcattgtcgtcgtcgatgaaccgtttgccgaaatggcaaaacaaaccatccggtgctaccagtgagggaggcgcgtgggtcccccagacgactcaccgcttccgaataaatggggaggacgatttgggaggacggatcccgggccctgggatcgatggttaaatcccccaaattgcctcagtgttaaaagactaatttattctccggataaaataggtgatcgaaatattccatggacggacgagatgagaaaagtgaattaatcgatcggtggtaaatccgatgactccgacgactaactgatcgctggggaaaggaaaagtgtgaagagaacggaaaaggggcggggatgaaagagataagaaaagcgatagtggaaagatggaaagtccggctgctgagggaaatgaaattgttttgagggtgggccaatcccttacaagattgacgaatgcgatagaaaaagaagcgaaacaaggagagagagagagaagaaagagagagagagagtaagacattgagacagagataaatggagagagaaaaaagagaaagagagggagagagaaagaaaaaaatatagagagagaaaagaaagaaagagagagagagagagagaagagagggaaagaggagagatacaaagagataaaagagagaaagaaaagaaaaaagagaggtgaaagagattgagtaaggagggtgggcagacagaaagacagaaagaaagagatagagacatagataaaaagaaatatattggacaaagaaaattttatttattaaaattgaatatttcaacgacttacgtgtcctcaaaaacttttattttggcgcctctgcaattgaattgattatccgtttctaagtaatgaattttcacttttgccgtacaatttttgcttgccccggtgatgcatccgtcaataagggcgagaatgccgaaaatggaaaaaaaat

SEQ ID NO: 4851 - DNA, 1229 bp, Heterodera glycines
attaaataaagaaccgaacgaaaaacaactttttttagcatttgctctccattcttcgtcaagccgtttcagaagcttttcccgatgcgattgctcagggctcttcccaagtgatcggtaaatgtgaaataaccctctatttgatggatttccccaaacttttcaggaatggtcggatacccaaatgtgggcaaaagtatgacaatcaatcgactgctcggcaccaaaaaaacggcggtgtcctcgacgccgggcaaaacgaaacatttccaaacactgatcattgacgagggggtaaataaatatgaacatttatactttggtcatcatttttacaaaagttttgccgagaattaataactattttttccttttcagttggttttatgtgactgtcctggccttgtgatgccgcagtttggcattagcgatgccgacatgattttgaatggtacaatttttgttttgttttttcggacaacaattccgttttaaattcccactttttcaggcattttgccaattgcccacatgcgcgactatttcggacccatccaattgctgtgcgaacgcgtgccccgccaatacttccaacaacgctactccgtcctgttgcccaagagcattgggtctttgaacgggcacgacctgttgaccgcagtggcattcctcaagggcttcatgaatgcctctggcattcccgtacgtcatgcctttggcacttcaaatgcatttctttttcccctcaaggattgttcgcgtgccgctcgtctgatcctcgccgatgtcatcgatggttcactgaaatgggtcgccgcgccttcgaatgtttcacagcgacaatttgatcaatggacttttaagactattgagctttcaaaggcacatcaacaagagcaacaacggcagcaggtggttgggttggagcatgggaggccaaaccagataaaattgcggatttattgcaaggacgacggtcccgggggggcgggtgaggggaagtgggtttcgcatggttggggcattggggataaacaaaagaaaactaactgaaaaacataagcaagtaaaagcaagtacctcccccttgggtcccggaaaatgagtcagtgaaaattttcatgtcataataacaagttccttgggttttcgaggtctaggacccggtatccatttcggccaattaaaacgaaagtccaattttcgaatttatttgatagcatttttgg

SEQ ID NO: 4852 - DNA, 1609 bp, Heterodera glycines
  unsure (1)..(1609): unsure at all n locations
cattttgccacttaaacacaccngagtcaaaaaacgacatttgtgtcaatagagagagatcaattccatttgaattgaattgtaaataaacttcactggttgcgatttctcacaaaagaattttcttttggcagttttttgtccaaataatcgcccacttcaaaaatatttaaatatatattaaaattaatttgaattcacacaaaaataaatatttaaaattggacaaaatgaaattagagtcaattaagcaaaacaaaaaacatttgccacctcatttagcaaattatgtgctcaatcattgatgagtcacccgtcgcaattggcaatggcggcacagaaacacagctggtcagtgagtatggtggttcaacagaagaggcaatcaaaagcataagcacattcaatatacaaatacagcaaaagtgccaaataaataattaaattacccataattaaattaccgtatttttctaattatccctccggggggattattaagcaaattcagctgaatacctggcaacattttatttgacaatggtcttttaagttagctctagaggtttaaaaagaatttttttcgaaaaattaaaaattccatttatcccccagggaggataaatggagacagtgcataattagagtaaatacggtacccaaaattaaattcattttaaaatgcctgccaattacagtggaataatgatttttttaaaatataattaattcaaataaaatttattttctattttctccatcacttttacctctgacagaattattgtgcatttttaattttcaattttattcactataaaatgctaattttaataatttccccattagtcaactccattccgtggcgttttggacgtgcgctttgagcccggccaaactttgacagtgaagggaatcgtcggggagaaggcgcgccaattcagcgtcaatttgcacagtcggacggccgacttcagcggcagcgacgtgccgttgcgcgtcgcggcacgcgtcgaccgggcaaaggtcgcgccgttgggagcacccgccaaaacagaaaccaaataccgtatttcagtttttaaaccccctgaaaaggggggggggctctattttaggggtgggggtgtattgtatgtaacacgataatattcagaatatttttctcaaattttcaattatgttagctctaggaaatcgagactatggcataatttctaaaattggtgctaatttcacacactgaagagggagagagtacgctgagactgatcaatgagattggcccggttgatcgataagacagaaacaaacggacgataatcgagcggaatccgtcgagaataattattaattgtctccattttcatccgtcctctcagattggcctcaattcgatggtgaacaaaatgtgggggaaggaacagcggaaggggcactcgttgaagcccggcaagcccatcgacttgcgaatccgggcgcatgacaaggaatttcaggcgggtggcccatcggagggggggggggggtaaaaatataaaaataaaacataaaaattaaacaaatttaaatatttatttaaaaaatgaccnntgcaggcccatgcaag

SEQ ID NO: 4853 - DNA, 5094 bp, Heterodera glycines
  unsure (1)..(5094): unsure at all n locations
ggggggggggggggtaaaaaaaaaaaaaaaaaaaaaaactacataatattaacaattaaatattattntaaaaaattagggatagcattgtaaatggtgtcccacgcttacaagaaagaaaaagcctcttgcagatcataatcgacggcaaagcgttcaaacggtacgcctaccaatcgccgcttcagtccatcacccatttgtccattgacggcgacttggccatacagcatattgtgccgactttttttgaatttaattacgttttgccactttagcattggggcgggaaagtttacgtgagttataatattggattggattatgcttaattgattaatgtaacctgaatttgtccattttaattctgattttaaattgctttgagcctgtcccctatgaaacgggccttccccacggcttcccaattggcaaatgcctgaaaatgtccggcactccgtcgctgagaaagggcgggcgctttgaagtcaatttgttgcgcaaaaatggtcacattgcgttgcatttaaacgcgcgttttgacgaaaaagtctatcgaaaatgtttttttttgtgccaaaatttgaatttttgccccaggcggtggtgcgcaattcgctcgaggcaaatgaatggggaaatgaggaaagggagggcaaaatgccattcgaaaggggccattgcttcgatttggccatcacaaatgaagccaatcattttggggtacgtcgggattataatttaactttttattgtctaattaagatgattaatttaatctctttttcagattttcgtcaatgggcaacattttgccaattttgtgcatcggtcaaagcccgaagacatttttggcctgctaattcagggagacatcgaagtttgtcaagcaaaagcaatttactaatttgtaattattcatataattaatttagctgaccggactggaaatggaatgactgacctaattaccgtcattatgaaaaaaacttttggccaatctcaaccaaaataaattgggaaatatattcataaattaatgaccacaatttgttgacatatcttttaatcattaattaattggcaaaatactgactaattttcacacactttgtaactatttaatttttcttttgaattaattcgggctgggatttcccaactttggaataatttattcaaatttttaattacacagtaaaaattaatgggtgaacaaatggaatgaaagtgcactttaaaattcagaaattatgcaaaatattatcgcaagtggaaattgggcaacttctgaacaaattggcaaagtgtcaatgggcacggcaagaacaaaaagaaaataataatccgcttttaaatgaattaagaaaagtgttacatataaaatgtcagagatttggcttgggaaaaatgaatgttttcagcagagttcgaaccactcaaaaagataaagtaaaaaatgaatttgaattgacaaaaattgtaattttttaggatttgaactctgacaaaatatttaaaaaagtaatggcaaataaaaatgagcaataatggccaaatgaacaaaacaaaaaagacaatggcatcgttttgctgaatgagtcagtgacaaatgttttggcttggtttgtttatttttgtgactttttcttggcacggtcatttttgttttcattgaattaggcactttttgttgctgccggcgctgctccgacgctttgcttttgacgccattcgattgggcccatttttcttggcctaaattttcaatttaggcacaaagtcggaaggagctaaaatatgcaaaattgaatggttggcccgatttggacgcataaaatgccattggacatataaagtgcaattgaaccaagaactcttttgtaaatgcaataaacaaaacattccgaccccaaaacttcaccaaaatccccaaccaaattctcaaaatccccaaatctccgccgtccgtcccccccccccttcggtttgcctcggaagttgcgctgtcctcgctcggaaaagtgttcacaatgcgcacaagttcgtggaacgcggcgtccacattcaccggcggatctttcgccgacgtttcgatgtacggcacgcccaactcggcagccaattgccggccctgctgttcactgactgaaaatttgggggaaatgccaaaacaaaattaggcatttggaaaaagcaaatcaaaaagcggcaaatgcaaaatttggttacctttcctctggttgatcaggtcaacctaaagaaacaaaaggcatttggttttagtctattagctttgttttttgtactaattacgactaattagtccctctccctttttaattaccctttccctctgtcattttctctttttaattcccttctctgctcactttgttgcccaccaacagcaccggatattcgctggtgtccttcacccgcaacacttgctggtacaatttgcgcgcctcctgaaaaaacggaaaatttagcaaaaaattaaatttaaattaaaaaaagaaaaagagaatgcctgaaaactttgctcgtccgtcaccgaatacaccaacaaaaagccgcgcccattgcgcatatatctgaaaatatttaaaatttatgaaaaaattgtatttaaaattcagaaaacgcaaaaacgcactgttctcgcattgcggaaaactcctcctgtccagcagtgtcaagcacttcaattaaattaaattcgaatgaataaagcaattaaattgaaatggctttgcaactgaccgtcgagaatgacccattggccatcaatttcgcaatgttgaatgtactgatcctcaatggtcgggtcgtaataatccacaaattgcttctgaaatggagaaacgaattgaaagattttgcgagggatttttacaatttttaatgaaaattttacggaaaaaagtgaaaaaaggacgaaaacttggtattattaggccaaaaaaggtgacaaaaaggacgaaaaatggtgtaaaatcggcctgacaatggccaatttgtctctccgtccgtttgtccgtcctatgcccccacctgcctggaagaattgaatggtcagcgacgatttgccaacaccgccctcgccaatcacaacaagcctaaaggagagagagggtgggacggcaattggcttggtgccattggattggttcgtttgtttattacttgtaagtgggaagttgctggtcttggtcagtgccgggcggacgcttcgcgccactggccattttttgtcaagaacaaagttatgataagttgaatataagtatttaaaaaggccttaaattcgaaaagaatgcccattaagattaattatttaattaaacaaatattcggcattagctagcaattagctaagtgccggctgctgttggcaatatgtttttttaatatttaaatgaaaattcgaataattaatttattttgatttaattaattctaaaaatgatctgtcagttcccattaagattcaccgcagacaaaaagttattaaacgaatttagctaaataaagtcataaaaatagaatcttttgcctttttggtcatttttttcatttttgaaactttttaatccaaaataatccaattaaattatccaaataaattttaaatttggtcagtaatatcccaccaaatcttgaaattttctgttttcattttatggacatttgaatcacattaaaataaataaataatcccttaaaaatactgtaaattcaaaattggctctcgatcaagttaataatgtgtatggggagggggtgagcatttgtttgctgctgacattgatccgtcgcctctgatcaccgtcgtccgcaatgcctttcccgctccccattttccgcctccgttcaccgccaaccaaaataatcgccgctttcgcttcactgactcacccattgctcctctgttggtggtcagcagtcagcgaatgttctgtggcggtgattaactgatcagagccgaatgaatgagtcattattctcccataaatcgggggagagaattctctgataaatgagagagagagagagagatagagagatagagcatgttaaaagctttcgaatgataaaagctatagtggaaaaacgagctggcgtcgaaacgagcgcgccgaaacgcgtgggtcccaataaatcttaggaaaaacgctaaaataattgaaaatagttttttcaatttttttagattttaggtgcttcaggaaaaaaataggtaaaaacctaaaaaaccgtatccctaattccgatataatttgattttcgacaaaaatacagaactctcggcacactttagattttgattaaatctctttagatcgtgttgaatttatcatttttggtttattcggtttctcaaaagcttttctatttaaaaagaaaaattattttaaattttatttgaaaatgatggaatgtcccgatgacttttgagctttctgcgtcacatgccaacccttttaatattaaaatacaatgagagagacgcggcaaaatgagcgaagtttccccacccaaattccttgttcaaatctttagtctttcaaaagtattcattcgaccttcatcagtgaatgggaagaatttttccgaaaaaccgtcgtttttaacacaattttgaaatgggacaaatgaaatgattgatgataaatgcatcttttaaattaattactctcatcaatcacagcaattaattaccacgagtaagaatctgcaaaaaggtcgcggttgattagcgctataaaatttgaatttttaattggccattttagccgtagatttcatctgccattacattttcatttttttctctcctaatcgggtgcgccaaaactagtcatcccaacacaacacacaaacctttgagttgtgccgaaaaaaaaacggactgatcgcaacaatttgggagggaaatcggcgacagggaaatgtaatcaaaagaatgacgttttgattagtaaataatgatcaatgatggtgattatgatgatggagcgtaattacatatgctcaacaaataaaaattaaaaaggataataatatttattcctttatcccccccccccc

SEQ ID NO: 4854 - DNA, 1744 bp, Heterodera glycines
cggggcacaaaacgtacactcactcaatacacaatacacacaatttgatcactcactgatccaacaacgattctctcctttctgtgtgatcagaagaaaaaaagcattttaatcattttgagaaaactgatgcaatccttaactttttgctctgcctaaaaactttttgcgaaagcatttgaacaccgcttaagctattatagcttttcattcagtcaattatcagtcacattttaataaattcactttgatcattttggtcaaatactcgatcacttgatctgttatgcctttcatgattgcttcttcatgctcattttgattcattgctttttcagagaatgtccgttaacaaagcaacggtcggtgccattgctctgtccggctccaccctgttggtgtgcctgtttggcattgcgtccatttacagtgacattcaagccatttggaacgagttggacatggaggttggtccgcagcaacagatgatcaagccacctttaaaatgaccatcattaagatggaccagtttaaaatgcaagcggacgacctgtggaaggacatgctgaagatgggtgccgggacggccgcgaatcgggcacgtcgcgaggcgtatgggggctatcaggtgagatacccaaaaaaactgaactttaccgttctggagactcgagaaagggtcaacaaaaaataaataaaatgaatcagacacactttgaaatgaacatttggcatttttaggcttccggcagccaaccacaaccatcccccggcgccttgtcttcaccgcaaggagtcgaagtgccgcccgccgttatgccgggattcgccccgggcgtatcgccttcggtcaacagtgtgttctcgcccactgctggcagcaacaatgtattctccccgttcgccccgactggcagcaacagcatcaacaacgggctgccaatgccttttggccagtcaccggacggacccaacggcggtggcactttccctggcggcttcatcaccccggccggctcgggcccaggatgcagtaggattttggatttttgaatacaaattgggataccggtatagtgggaaaaggaaaggaaaagccgagaaaagtcatgggaaccgccatccaatgcttttcttaaaatggttcgggtgtgcttcgatccctcactctttcgtcgcccttcccacactttttcttggccacgaaatgcccccctttggccattgtttttgcctaacttcgaatcaccaattgatattttgttggcactttcttgacttgtttttctcagagtgcaagtcgcgaaacacgtgccctgcgggccccgctggtccgccgggcgacattggaccctcgggcgtgcccggcatcccgggaaaagacggcattcccggacaggcggccgaagactcgcaaaacgcaccgctcaaaggctgcttcgtaagtgccaacacgggagggaaaatatcatgtgtacaaatgttaatttttacgcatggttcagaattgtcccgccgggcccaccggaacgccaggcaccgccggaaggcccggcattcgcggaatgtgagcaatacaaattcataaaaagggcataattacacagtgtgtcaacaaaatgcggagcaaaatctgagcgacataagttaaacaaattgttaactaagaatgccaaatttcggcaaaaaaaaactaaatcatattttgtctataaatattttaaaatattttatttattaatgt

SEQ ID NO: 4855 - DNA, 4134 bp, Heterodera glycines
  unsure (1)..(4134): unsure at all n locations
catggacaatcagaaatataacatttnaaggtttgaataaatttgtaaanaatgaggctttntgatccaaaatgaggcttttttgcatgcgaaatgaggcttctgaaatttntaatctgggagccctggaattacctaatgtaatttgtcggtggtgggcggagcgtttgattgtcgacttactggctatcaaagatacctaccaaggattagggtacttatatggttcgtacgccacaaatttaaaatttttaatcatcttacctatgttgcttagaaagacacttatatggttttcaaggacgcggaacacgattatggcatctatttagaccaatttcgaaccccgaaattattgaaaaaatttgaattttcgactttggggattttgactgtaggtcgaatccgtctcaggagttcgaaattagtctaaatagatgtcataattagagaccggattttgaggcatatgcctttttttgctaacttgctacggcctaatatgcacgaaaaacgagtttttaacttggtttgaagcttctagcttgaactttggtgcctttttttgccttttttgcgattttgtgccttatgccgggcacgaaattttggtgccttttttgccttttggtgccttttttcatgcctttctcaggatttttgggaaaaaaatggaaaattttttaattttttgcaatttttaagtaaagctatcattaaccagcttgtagtgaactagcgctgcaaaacgagcgatgtcgccgttgttttcattgctgtttgcccagtgcacgaattccttcatttgtgccgggacttccttcgctgcagtcggtttcttctcaagcactagaagatcattcgacctatacactcctgctgcgtggggctccctactgcccaagatatgcttgtgaagaagatggattgcctcaaaaatggggataaacggcggagaaaagctcctggcattatatgacggaaaatttcttcgaccaagatgtatcaagaaaataaggatccggaaaaaacctaagtattagagcagattcaccttttcgcttatctcctttttttgcatttcatagtccgtcaaaatcccaaaaaagtgctcgtcatctttgaataggcttctttccgatggtctcggatgcattaatctgcttccagcctcacgatcagttaaattccccatatgtgcgctgatttcttcgtcattccaatttgggtcaaattcattggccatttaaattctaaaaaactatttaccttacttagttaagttattaatttttgtcagatccattttcactcatttctctatcaactttactccaactgcattggtattttaatgtaattgaaatttaaaaagattttattcgaaattaatggccaaaatttgtaatctctaacattaaaataagcaatttaaatttcttcatgaactgctcgcttcagctgatgcgccccgttctactccccattttcagtacacatcggcagtctgaaaaattgaattttatccacataactattttatttttatttcatttttgtcacttaattatgtcatttaagaaatttttatttttgcagtgccattaattgggactttataacaaacattccaagcaacaaaagcaaagggcgttatttttattcaataattaatttcgtttttgaaaaaaaaatgtttgtctaactttttatttatgtattttctctttcagcatggaaaattcgctgagaactgatgtgctgctacctcatcacccaatttgcagttttggcccttgcccacttgcaacattcctcggtaaaagccggatgtggggtggactccatttttttgcgaaaaaaccaaaaaaatttacataaaatcttcaggcaaagaaaagacaaaaattggtatcgaaaagtttgtttattttctgtttcacactgctgctctgcatttcacttctcacaaaaacattatcatttttcatgctgtgatttcatacccattttttatgctcgaaattccgacaaatttgatttttttttttaacttacatatttaagtaaattttcgtatgttttcatttttccaaaatgtagataaagaaaattcggccctactgtcgaaatagttggaacgtcataactttttttcttcgttcatcacttttaaattggtatcatttgaaagctcttcataatctgtacaaaaaatcaaaaataagcaaaaatacattaaaaatctgaaagaaaaacgtatgtatgacgttccaaatttactgggacagagtgggcgggaaagagttggtcggatttgtagggcaactgaaacattttttattgttatttacgctcaaacctaaaaattcaaatttaacaattatatcggaattccgagcgtaatcaagcattataattacaacagaaaacagctagttttttcaagggatttttcttaaatcgagattaacttttttttcgtgtatcatcgtcaaattttattttttggcatttttaagccattttgaaactgtaatgtctgttggcataatgtccacttctgttaaagtccatttaatccagtcgcaatttgccgggattctgacaactaaacgaaatggactattttaactgaaaaaaatgaaaatttgaattttggatgaaaatttttccatctattttccgatcaatcgaaatggtttaccaaattttgctgctgctttccgggttccatccaagccgagtccaattttcttcgtccaaaattgcttttccaaaaattcggggcaccgagcgcaacatctggagcctacaaacagttcacgaaattttgttcaaaataaatttggcatttactattttttttaataaatttcattatcaaatttttaaatggatctgacaaaaaatgaaaataaaaatttaaaaaatgggcttggcgggggagaacaaggtatggacgacgtcagacatctgttgtcagaaaactaatttttttgctgtgacattcatacttatatacaggttttgagatgaaattcgaataaaattcaaatgttgaactgcaataaccaaaggaaaattaatccgatctttttttgaagtgtaaaagcagaattgaaccaaacattctgaaaaaaatcaaaacccgcaatgttctgaaatgaacaatagaaaatcaaaatgttccggattaaaaacattatggaaacaacaaccagaaaacaaaaccattctgaaatgaacccaaccatctaaaaatctagaacacatcaaataagcattctgaaattatgtaacgaacaatcaaaaacccgaaacaattctgaaacgaaaaatcggaaacattttaaaacgaaaaatcgaaaccattctggaagaaaaacccgaaacaattctgaaaagaaaaaacaaaaccattttgaaacgaaaaatcgaaaccattctggaagaaaaacccgaaacaattctgaaaagaaaaaacgaaacctttctgaaaaagaaaaatcaaaaccattctggaagaaaaacccgaaacaattctgaaaagaaaaaacgaaacctttctgaaaaagaaaaatcaaaaccattctgaaacgaaaaacccaaaacaattctgaaaataaaatcaaaaccattctgaaaaagaaaaatcaaaaccataattgaaaagaaaatcaaaaccattctgaaaaggaaaatcaaacaattctgaaaagaaaaaacaaaaccactctgaaaatgaaaaatcaaaaccattctgaaaaggaaaatcaaacaattctgaaaagaaaaaacaaaaccactctgaaaatgaaaaatcaaaaccattctgaaacgaaaaacccaaaacaattctgaaaataaaatcaaaaccattctgaaaaagaaaaatcaaaaccattctgaaacgaaaaacaaaaccattctgaaacgaaaaatcaaaacaattctgaaacaaaaaatcaaaaccattctgaaaagaaaatcaaaaccattctgaaaaggaaaatcaaaccattctgaaaataaaatcaaaaccattctgaaaaagaaagctcctccttagtgcttcagtgngaggtccctataagagaattagactaaaaatggaaaaatttgaacttttga

SEQ ID NO: 4856 - DNA, 5803 bp, Heterodera glycines
  unsure (1)..(5803): unsure at all n locations
ttgtctcaacttgccaaaaattcatttccacataattagacgcccttttcgctgctttgactcgcttctttttctgctgctgctgcaggtggagacaaaggcctgaaaattcaatgaaatttgaatattattttcaaaacaaaaggaaaagctgtcaccctaaatggacaagaggaggagggttagaaaaaaatttacaaaattgaaaaaaaaaatgatttgatgataccaaaataaaaaatcccattgtttaaaaattttaatttcggaaatcttcttaattgacgaatctactgataaattttgttttgttttcttcaacttaataaaaaaaacttcacatcttgatcagtgcgcttttttggttttcgccaaaaatttaacctctcccccagtcaggtccattttcttgccttttttttgctcacccaaggcaatttttgcaggcactaaaattgaaatagacattgatcaatctgttcgcaaaatttccatcttttttcttctgctgctgctgttgtttctgaaccgcctccgccctctcctccccaacaatagtaattggacatcacttcaacagccaagaatgagaagagccaatatccgattctttcttcaatgtcagcttttctttagtctgttcattcaccaattcaaatggctcaattggcgcagagacgaaaaaagtaaagtagacagtgtaactgacagaagtgcgggcacggacaaaaacctaaacaaaaaaccaaaattcgtacattgtcaaatatgaaattgtaacgacaaactgacctccttgaaactgttgagccattcaaagtttgtggatgccatcatttcccagcaatgcaatgactttggttggccatcttttctcggattgtgcaaccatttggccaacgcttggccggcagaagtcgcatttggcccatcaaaatcatcatcagcaagcacatcgggaaacagatcaccaggtaggattgaattcaactgatcaagatcggatagaattgttggcgaaatgagtcgacgcaaattgtccaaaaattcggcaccgtcaaaaccaaattggcgaatgtttgtcgcaaaaaatggccatatttcacggacaacatcatccaaaattggcttgttatcttcgtttttttcccaaacaatgattttcaatttggtgcctttgtcccaaatctgctgattggaacggagaaattcgatgacgaagtgatcaatgtacctgaaaaggggaaactgttgaaggaatacgaaaaaaataacacaatcagtttgaatttactgaatctgaagttgcttatagctggaaaagatgattttgttgggcagcggacggtccggcaatggaaatccctccgatttgccttcaacaaaaagttttggcatttcatcagtgtccttgcgaatttcaattgctttccaaatcgtaaattgcgttttgccgtcaaaatgtttgtccaccagcgcatcaaaacgtggcgaaagcaatgccattttgaggccaagttgagcacggtcaaacgatgggaaaatgtccatccacacgtcgttgcacacccaactgaaacatgaaaaaatagtgaaatgaaaatttgcgacatttttttaatgattgcttaccgtcgattcattttttgctgcaattagcaaactttgctctttatccaattgatttgtgtgtcacaaaggacaaattgctgaaatatggagacaattaagaaaaatgagagaacgattaatagcacacaaaaataataaacgatgaaaaaatgaaagaacaaagaataaatttgacaaatctccgtctgtttttttgcacaaaaatctgtcttttattaggaaacttactggctcggcagcttcgcggcctcgccccttctcttgacattttcttatggcacaacatatagcattttcctcgtcatgtcttagcgttttccttgtcatatttcttagcatttcctcatcttttcttggcattttcttatggttagaaggtacgggctcggccgcttcgcggcctcggaccattcacttggcattttcttatggcacaacatttagccttctccttttttcttgtttattggcactttcatatggtacaacattcatagcatttcttaggtcagtggtctctaaaacattagagacacactaatgggcatctcaaaacaatacaacaacagagaattctttttgacaaaatttaacacttgtgtggtctctaaaacattagagacacagtaatgggcatctcaagacaatacaacaacggagaattctttttgacaaaatttaacacttgtgtgggtttctaaaacattagagacacactaatgtgcatctcaaaacaatacaacaacagagaattctttttgacaaaattcaacacttgtgtgggtttctaaaacattagagacacagtaatgtgcatctcaaaacaatacaacaacagagaattctttttgacaaaattcaacacttgtgtgggtttctaaaacttgagaggcacatcactgtgtatctcaaagcaatacaataaaaatgaattttttaacaaatttcacacttgtttaggtttctaataacatagaagcacattattgtgatcccaaaacaatcatttatcaaattttaacaattttctaacaaattacaatttcaatgtatgtttaaatatgattataaaaaagaaaataatatccgtatttgataatatgtgaagatcaaaaatataattaaataaccaagcatcacaaaaaatcaacataataaccgtaactgaaaaggtctgagtcgcaaatcaaatcaaaacaacgaacaacaaacgaaagactacccatttttttgcgacttcttaatttggtcaaaagtttctgaactacgacgtttaactggagtcgtcaagatttcctcaaaattaacgcgaccaactccaattttaatagatgcaacttcgcagtgaatttgaagacattcatctataaaaagactaaattcaaacctcatttaaatctttagacaaaaaagtctttaccttgcactttaacaaaaaaaattggcgaggtttatctgcatgtttttgctgaaagaaccaaggtgctccaccaatttttctccactaacatataagtcagccctttttcctttcgtgtcagcaaccactgcagcaagttgttttccgattggtgcaaacgacgaagccagagcacaattcattgcttaataaaaatgcaatttcaaaaaccttaacgacacataatgtgcatctcataaaaataaactaacaatgaaatacactaaaaaaattcttgtttacaaaatcccacacagatgtgatcaacaaaacatgatagcacaataatgtgcaaaatttttttgacagcttttctcgtgctaactatgtcataaaacatctttaaaacatgttttgaatttttcaattaaaattaattaaatcattaaacttactataaagacaacccggtatcaatttctcaaaagattccacaagctttggagcaaactgaacaacttcaatttttgtgaagttcgtaaccacaaattcatatggcaaaggagtgtggtaaaccgaacagccatcaaagcgctcaacaacaaatcgctgagctctcaacaaagacattttgacaacctaaatgtttccaatttttgcgtccataacaaaacctttatttacaattccaagcgaacaaatccttgaaaaatttaacgaaacgtttttgaattcagtgacagcaacattttcgccagaggaacacgtcaacaatgcagtcattttcttctcggaaggcataatgctcacaatctgcccacaaaagcttctaaaaaatttcattttaataaaactcatttaatcataacttacgcaagctgagttccgcatggaattgccctgagtttttccaatgtgctaagcattagaaagtggccgaccggcagtgcagcaatggaaatgtgcaacgaatagaagaccgaccggcagggagttttggcaatgaaaaagtgcaaaaaaaaaagccgaccggcaggcagttgtaacaacaaaattatttttaaaaatagacaatttctggcttaaatgcaaattaagaaatttttataaatgacaacattttgacataaacatctctcatgcaaaaagaacaaatgatttggtggaaaaaatcattttacttattattttagaaacaaaaacaaataaacaaacaaaaaagctaaatacaaaatcaaaaaacacaataatgtggttgactgacataaaccgcacaccacactattgtctaacaaaaaccactcaccacactaatgtggttgactgacaaaaacacacactattgtctaacaaagacaacacaccacattaatctgattgactgacataaaccgcacaccacactaatgtctgacataaaccacacatcacactaatgtgattttctaacttgaaccacaattcttctcaaagcaattcaaaatattgcaaccaatagtcaaattaaaacattcaaattagtttagaatgaacaacttacacgtttcccataagtcatgagtcaatctttcacgctaaactgtataacatcagcatttgagaaccataaccaaatttcaattcaacagcatgtgtaaaggcagtccaacaaaacaatttgccttcttcattcggaattttactttctaaagttttgcatattaattaggcttgacatagcaaaattccaatcccaaacaaactcccggcaacctgacatacacaaactcagtcagagcaattttgatgaccgacagttgcccgaccggtagatttagttgcagaacagcttcaaaaacaaaaataaaacgctgaatggccgaccggcagagtgccgggttttaaaaaatattgccgaaccggcagaacattaaacctgcagaaaattaattttaaaatcaaaacaatttggcaaaataacaaataaacaaaaaggaaagcataattataaagtaaacattaagcacaaataaaagcataatacttggttcatgaaaagaacacaaaatcaaaacaacaaacaaattttgagaaataagaatcatgaaaactaaattctaaaattagacagagacaaaaataaaaaatgcttttttcttacataatcatttacacaaacgataaagaaactttttcttatacaaataacagaataaaacaaaaacacaaatgaaaagcaaaaaaaaaacctttttgagttcttttttataaaagcataaacaaaatccaaaatgaaaaaaaacaaaaccaaacatttccatttttcaaatgcttttttaacgcaaaacataacaaaacgccaaacacaacattcaaacccagccacagacatacactcatctttattatataggattagtcgcgtttttaaattactttcttcgaagaatgtttaaaaacggattttngggtaatagttcaaatccatcaatttcgtttagtcaaaggaaacggagagcgtggacacatacagattgactatcagctcacaatgtccagccgggcaacaacatcatccgctttggaagtgacgcctatgtccgtgtcgaaacatgtcactgaacaaaattgagaaaggtctttttatttgggctcgttaattccatgaactttcgcttttttaataatcctattttgcaaattttattctggagtatttttgtacaatttaatattttccttttccggctttcattcagccaacatttccactttctatcttataacaatccc

SEQ ID NO: 4857 - DNA, 1585 bp, Heterodera glycines
taattacatttggctaatttttcaggactttttttgatttatttagtgcttttttggtatttttataagactttttggttattttttcataacttttttgcattttttgtgactttttggcgttttttatgactttttcgtgactttttggcgatttttcttgactttttaagtcgacttttttgagatttttcgtgacttaaattcccatccctagtgatcagcgaccctcaaatccccataaaatgtgttttcacgactttttagaagaaaaaattttttattccaaaaaggggggggcaccagcttcactattaccaaaaatcctagtcatactagtccaattattataaagaaaatgagtggaggttcgagtgtgctttacaacactaatattttgttttttcgtctgtttcatattacattatttcccatgatttttttgtttttgtttccagattaaaacatattttaaatttttgtcgttcaataatgcataaggggtgcagcaaagttccatccacctccgatgttcggtcaccatctgtgaaacggaagcgtatgatcagcaatttggagattgaagaggatgaggagattaccacctctgatgaggagcgcgaggcgactgccaatgctaacaaagagccaggttcatatttgtttagccaaaaacataaaaaattacggcacttttggtgtcggggcacccctgaaaaatgccaaaacgtgaaacccttttcattttttttaataataattcgtaaaaactttttctcttatccccgaactcataaaattcaatttttttttaaaggttcaaagtagagttgatcgggactgggaccaaaacacggacaaatgagtaccaaggtcccggttttgaccgggaccgggaaattcccggttttcccagccaaaaagtcccggttttgcccaaaattcccggtcacgctcaactctagttcaaagtaaaatgaattaaattatagtacttccaactcagaaaatgatgacgaagacgaggaggaggagagtgaagatgaggaagaaacgcctcttccggaagcgcttgcagtgacgcgctcacggcgtgcaaatgccggccgacgaatggccgaactgatggcacagcaaacgaacgaaaaggacgatttctacggcactttgtacggcggatttgaagaggtttttcttttttcgaaaaccatattttaatggaaccaaatggcgaagccaatttttttttgaccccaacattttctcataaacagcagtgggcgtcgccggggcaaaaaaaatttttttttttttttgagaatttcagaaaatttgttttcgtatcggggcaagtgcccccattcacccacctctctggatatcggagcagctcgggtaatagtaccgatggtatcacaccttttttgaaattttttaaaaaaatttcaaaagtcataaaaatatttattataaggttttcggggtcgctgagcacgaatatggcatccatttcacccaattccgaacccctgatccgaattcgaacagaaatcgaaaactcaaatttttcgaaattcacatttat

SEQ ID NO: 4858 - DNA, 3938 bp, Heterodera glycines
ctgctgcacagcagcacgcgtctgttcactgtatgcccctcccacccgccgctgcccgcgtagaaagacagtcagacagtgcactatttcccacctttccctccctctactttttttcaaattcatttttaacgcaaaactcaaacaaaacgccacacaaattcaaacactggacacacacatacacacactcaactttattatataagactagcggggtcagcgccttcggcgcatcccccgctaggcagtacgattgtgttatagaattatgaatgataaaatcgactggctcggccgcttcgcgccctcgcatcattttcttggcttttctccaatctctgggactcaacccaccagcaattcaatctctgggactcaattctccggcattccaaacattgggacttaacccaccaactttcaattacattccaatcgctgggactcgacccatcagcattccaatctctgggactcaaatctgcggcattctaaacattgggactcaacccaccaactttcaatgacattccaatcgctgggactcaacccaccagcatttcaatctctgggactcaaatctccggcattacaaacactgggactcaacccaccaactttcaatgacattccaatcactgaaactcaacccaccaactttcaatgacattccaatcgctgggactcaacccaccagcatttcaatctctgggactcaaatctccggcattccaaacacggactcaacccactaactttcaatgacattccaatctctaggattcaacccatcagcatttcaatcactgggactcaattctcctgcatttcaatcactgggactcaattctcctgcatttcaatcactggcactcaacccaccaacattccaatcactgggactcaaatctccggcattacaaacactgggactcaacccaccaactttcaatgacattccaatcgctgaaactcaacccaccagcatttcaatctctgggactcaattctcctgcatttcaatcactgggactcaattctcctgcatttcaatcactggcactcaacccaccaacattccaatcactgggactcaaatctccggcattacaaacactgggactcaacccaccaactttcaatgacattccaatcgctgggactcaacccaccagcatttcaatctctgggactcaattctcctgcatttcaatcactgggactcaaccgcagcaaatttctttagcatttttaactttttgtgtgccttgggatgttgaacagttggggagggctcggccgcttcgcggcctcgtacgggggccttcgccccccccccacaattttttgcgccaaaggtaccatcatttaatcactgggacttaacgcaccaacattccaatcactgggactcaacccaccaacattccaatcactgggactcaactctccagcattcaatcactgggacttaacccaccaacattccaatcagtgagattcaatccaccagcatttcaatcagtgggactcaatccaccaacattccaatcaacgggactcaatccaccagcatttcaatcagtgggactcaacccaccagcattccaatcagtgggactcaaccctccaacattcaatcactgggactcaaccctccagcatttcaatcactgggactcaattctcccgaattcaaatcactgaactcaatctcatcaatccttcagcaacacaattaccgggactcagttctccgacatttcaatcaccggaactcaacctcagtaacggaatacagaactatttaaaaggaatccagaaattgaaatataacccataataaatcaaaacactatggtgtataattattgcccccaccccataaattcaaattaaaactgacctgtttaaaactttccacctaaatttgatcccgcaagtggcacgtcaatatcccaattgcatataaatattccactcgaacacaggcaaaacatgagatgtagcatttatattgctttttctatccatcaaaggatttttctttcattttttattactatcataacatgctttttattcaaaacaaatatcaaaaaccaaatcagattcttttcatattataagcaaggaaaagtacaaaaaacgtttttaagtaacaaacctttttcattcaagcgaattataatgcatttttttaatcaaacaattctccattatcgtttacataagcaaaacaaaagctttaatatcaaaatcacatcaattaacaaaaaaaaaaatttagacaaaaaaataatgataaacacaaattttttcttacacacaaaaacagaaccttcatataccggattttccactcaaacaatgtgctcattattttattaattattttatataataaaagatgggttataaataaggaagggatgcgagacaaatttcccattatctctccctttcctttcttttactctcttttcttttccattgcaatttactctctttttttcccattccctccttctcccacacacacgcacgcgtccaacagactgctgctgcacagcagccacagcagcacgcgtctgttcactgtctgcccctcccatctgccgctgcccgcatagacagacagtcatacagtgcactatttcccaccatccctccctctaacctctacatcctaggaggagaaatcttttaccttctttttctgtgctatttcttttgccttcttcttcttcttaactatttattttcgtctcttttctttatattctcttctttttcaaaacaatttcttttcatctcttttcaaactcatttttaacgcaaaactcaaacaaaacgccacacaaattcaaacacggacacatacatacatacatacatacaaacactcaactttattatataggactagccattttttattttattgtgaccaagcatatctttcctcgtatttctgggatttttttcagaatgtggtcatagaataggtgggttgaattatttgtattttttatgagtattatgtaaggatattttcgacaaaacataaccaattccgagtttcatgaggcatcaacttcattcttttcttgtcctgcccaattgtctcaaatgtatacctaaaaatgcgctaaaaatgatcaaacccgtttttagccgaatatcctgtcaatatttccctattagaaacgatactgtgaattctttcgcctctttaattcattcgtgctttgcttcggattagtctaaaaatttctggacgccaattttacatattagccattttttattttatttgtgaccgcaaatttttacatactagccattttttattttattgtgaccaagcatatctttcctcgtatttctgggatttttttcagaatgtggtcatagaataggtgggttgaattatttgtattttttatgagtattatgtaaggatattttcgacaaaacataaccaattccgagtttcatgaggcatcaacttcattcttttcttgtcctgcccaattgtctcaaatgtatacctaaaaatgcgctaaaaatgatcaaacccgtttttagccgaatatcctgtcaatatttccctattagaaacgatactgtgaattctttcgcctctttaattcattcgtgctttgcttcggattagtctaaaaatttctggacgccaattttacatattagccattttttattttatttgtgaccgcaaatttttacatactagccattttttattttattgtgaccaagcatatctttcctcgtatttctgggatttttttcagaatgtggtcatagaatagatgggttgaattttttttatgagtattatgtaaggatattttcgacaaaacataaccaattccgagtttcatgaggcatcaacttcattcttttcttgt

SEQ ID NO: 4859 - DNA, 1794 bp, Heterodera glycines
tgccattgggtgaggaggttgtggtggcggttgtttttgccacattatctgcttctgagaatgccaaccatttgaacatcaattcgtcgaacaccaacattggatcattttttgcttccaaaaatgccatcgaattgaattcccttttaaatgtttaaaattgaatattgaattttataaattttttaaatattttatgggttttcattattgtgttcaaaagaaaattttaataaggtggcaatttcaatttgtttattgaagatttaattaaaaaattaattgcccttaattagtgattgaaattatttaaacattttactaacattggtttgtcaattaaatcatttcggtcagcacgataatcggaaacatgcgcaccaaacttgtcaaagtcaaactctgttcataaaaatataaatatttttttattttaatttaattgtcctactttgtccattaattaaaactgagagatgggaaggctcttaaaatgataaatgattattaacaacaattaaaactttcaaaaaattacttgttttgtgctgaacaatttctatcacattttctttggtacaaacaaaacaaaaaagaataaaagtaattattataataaaaatgtaattcattttaaataaataaaatttgaatatttatttttacggcttttttcttttttatataataaaacacatataaaaagcaggaaatgttgaaatgccaacgatggctgtcattaatgcacttccgcaatttttaattttacgaaaacaaattacagacaatatttgacatcagcagataagaaatcgatagcagtaggaaaggtccggaaacagagttaatttttaaaatattaattaattttttttgcaatggaattaactctggctaaagcagacgtaattttgtctaattttgtggcttagaattaaatttttaaatttttttttattttattgaaatccccaaatgtcgggtccctaaatgtcgggttgccaaatgtccgtggttttctaagtgtcttttgctcaaatgtcgtccggtccccaaatgtcgggaccccaaatgtcgggatccacaaaagtcgggtccccaaatgtcgggtccccaaatgtcgggtccccaagttgcaaatccccaaaagtcgcatcacggtaggaaaagcaatgatatttaaataaattttagacgggaaagggtaaaaaaaacggaaaattaatgaaaaacgaaaaataattaacggaagcagcaaaaataaatcgtagacaaatttattaatacaatcgtaaagtaaacaaaataaggacggaactgttaagcaaatagtgaataaaattagactaaaatgaataataataaaaaagggaaaagcgtcaaagcgtaaaataaataataaaaaaagcatttttaattaaattttccagaaactcaggcggaaaacccggtacatataaaagccgaacggatttcatcctttaattgaatattcattaaataacaaccatttattttatcaattccgaaaaaaaacaaaaaatgtttacaaaatcttttaaaattatttcttttttactgccattaattttgagtccaactgcatttgggtgcattttcagtcaatcagcaacggcagagaactgtttacggaagtacgacgcatcaatgtgcagaagtgtgtgatcgagttgcgcgacatggaatttttggcacatctgatggccaaagggtggtacattcgctgctccgcccaaacgcttgtcatcccggaagagtgagcgaaggccaagc

SEQ ID NO: 4860 - DNA, 1962 bp, Heterodera glycines
  unsure (1)..(1962): unsure at all n locations
gatcagtccaaattggcactcagcggtgaacagatgcgtcacntgcacgccaagctggaaaacttcgactacgtggcgaggaagtgcacaaaaaagacctgtagctcatcagcaaactgtcgaaacctgtcgccgagctcgaaatcatacaatggacaaattagcgagaatcgagggcggtggtggcgctaatgatttcagaagaaaatcagacgaaagtgatcgatcagtcaatccgatgctattttctatatgtttgttcttaattgtacatatggatccattatgatactattttcatgtgattttatatttgataaagggaatttaagtggcaatagtgaagctgccccccccccctccaatcctccaatttttgacagacttttttttgtgtccaatgacctaacttgattagtgctaatacattaaaattggaaaggcccaacattactctaaccatgtgccggattttatttgaacaggaagccgaaaattcaaatttttcgaatttaaatttccgtgcagaaaacaacatctttggtgttgcagtcaacgaaaattttcaacaaaaactgcccataacttttgtcaaagtcaacaaaaataaacattcttgataacattcgatagctctaagagttctgcgttatggtggtaacatgtgctgtctccgtgatgtctgcgtgtcgtctcgcgtccaattcgaggcggtgggctggactttggccattagtgttgtccggaagcgcatgtcgcttaagtcacactctgcagtagagagcggtattttgagaaaatacggatcaggattacggactaggcatacatacggattacggagctacggactaaaaatccggaaaatccgtactctgtaaaaatccgtatccaagaaaaatacggatccgtatacggatacggatttttaaaaaatttttcttttttgataaagattgatttattaaatacaaatcttgaaaatttttttataaattctaagcaacaaaattcaaaaaatacaaaactcgagacaaattgaaagtgggagttaaatattttagtatttaatcatacatggacaaggtgaaggaggcggataagaaatatgctttatgaaatacgaaataccccctccccctcctccgaggccaaaattttttacgaaaaaaatgctcaaaaatttgcctgacatgtctatttttttcttgcttttcaccacactttttttgcggcacgctatttcaaaaaactgttttgagaaccggcagggggacgggatccggcggtgccggtatgcgccgccgggaaaattttttaaaatttgattgcaatatgttaacagatttacaccagaaaaatgagcaaacttgtgatttttaaacatttcatgaaattcgttgacaaattttcataaaaaatatctataggtttgaaaaatttacaaatccaagtctgtaaaaaatttaataaatgaaaaacgaaatgtatttcttaaaaaaatttacaaattgaaaaaaaatgaaatagaatttcgtaagatttcaacgaaatgcaattcaataacataaaggttttgagtttttggcaccaaaattttgctattttccaatttagtaattttccaatatttaccagtctttttcgattttttgccgaaaattttacgaaatagttccgccaatttcaaagtattggtgaattgactgcacaaaatttaaaaatttattcaatttcaccttaaaaaacgtcaaaaaaataatccgtaatccgtagcataattttatacggatcaggatcaggatacggacttgatatcgatacggattacggacttacgaattaaaaatccggaaaatccgtagtccgtataaatccgtatcggcccaaaaaaatacggattacggactacggatccgtaaaaatccgtatacgaatccggtccgtacccgctctctactc

SEQ ID NO: 4861 - DNA, 1067 bp, Heterodera glycines
actaatttccattttcgaaactctcaaatcctcattttaagaaaaattatctttgccccataaaactgcaaaattaggaaaaacctatgataaagaactatgctataaacccagctttgtctaaaattgaataggcttaattttattttttaaatttttttgctctatttatttgttttttaatttgcatattttatataaataattttttaatttaattttttgcaaaagttaaagccaaaaaattgcacctttccggtcgaaattcgtcagcatcgtcaccccataactccttatttcgatgaaaagtgtacaagtcaattgtcactccggtccctttttccaccaaaatttggcccaatgtcgtcgtctgtgaacaaacacgcgtcacaacgccaaaatagaaaaaaaaaacagattaaaaacagtaaatttaatgatgacggaaaaaagttttacgattttttttcaaaaatggggtgttaatttaaaatagagacacttgataaaaacgaacaaaatctcaacaactaccaaaaataaacagataaaacaaactaaataagaaagaacaaatcttttttcacatttctgtttattttgcgaacagaaatatgtcttttaggcagagttatgttgaattttctaagttttcaggagaaattaagggtcaaaaggcttaaatcgcctctaacatttgcccaaccgaatcaaactaacagcaatcagcactaagataacgtacagacatcctttaagcattttttattcattttatgccataaaaaggcattaaacacaaaatttttgcgggtgaaaaaatacgaaaatctgagtaaattcgaaaaaaaattctagggggttgggaaaaatttttcatagaagatgaatatgacgaacagaaagagcacaaaattctctacaaaatggcctttgaatgaggtctctacgtcgcgtctccgcgaaggcgcgtcttgttgaaaatggatgtctcaaaaatgaggaaaaatggcttgaattgagtcattttttggatagtcggtatttacaaggcacccctcagcgaa

SEQ ID NO: 4862 - DNA, 1056 bp, Heterodera glycines
cagtttacgccccataaatttttttttatatatttatataatttttaaaactaacataaagcttttatgcggtaaaactgttcaaatcgtccatattgtagattattaataaagctaaaagcagcaagagaaaatatttcatttttccagtaaaataaattttttagggtgtcacaaaaattacagcggacaattgaaaagacgcgccaacacggcggaatcacttcgctggccgcaaagagtcacgggtcgaccgcagccggcaccgcttcgagcatttcgtttacacctgtccatgggttggaaattgtgacgccaatgcaaaaggaggaggcgtctgggaaggcttcgacttatttcactccgtccaccaatttcatcgcccccacaaagccggccattaaaaaagtgaagcaacaaatgcaaaaaatggagtgataaaaatacgacgccgaattttgaaatttaattcttcgataataaattatttcgtaaattggttttaaatttttactttaattattttcaaatgaaaatattgatttaaacatttaaaaaaatttcccagtgattaatcattgcaagagacggggagggggagagggctgcattggcatttgtgccattcattatctgacgaaaatgaaaagtggacggggggggggggggtggtgagcaaatgatgatgataaatgtttatttatgttatttggcacagaagatgattcattttcattgtgtttcgttgacatatttttctccggaacaaaaaaatgattagtataaaattggtccttcctccgtcgccccaccattcccctacaaatttccgtaccaggtgttttcgacagtgattggtttcgacaaaattataatttttgtcaaaatataccaatcgctttcacttgtgctatacaaacatttattgtgcactcaaaaacacaacaaatttcctagataagattcttgaatcgcgtgggaaagtcccgctaacaaataccggttttgagtgctaaagatgcgaagctgcaggctcttgtagcagaattcgaaaat

SEQ ID NO: 4863 - DNA, 2192 bp, Heterodera glycines
  unsure (1)..(2192): unsure at all n locations
tggatcagaatttgggctttgatgaaatcccggacncaaaattcacttatcaattctatcttgtccgtctaaaatgtggcgattgcctcataaaatggcttaataaatcagataatctttttaaattttcccggaaggtctataattttgcttggaaaaaaaaattgaacttcagactgaagatgttttaaaaaaaatcggaattcttccagatgtgtcaacgcagaagacccactgacaaaagacccacaaaatttaaccgggctttcacccagttgtccttcaccgttcggttacatccttcgggtgcgcacgaaatccaccaaatttgtttagaacatttaattttatcagaactctattaacaaataattgcactcacttcgctcgagcatacggtatcaatttcttcttgggccctcaactgtacatcagggtgacatgccaaataatagctgacaaatcccaacgaattggcggtggtgtcaaagcgaaaattcgttaaaaaaatttaaaaaaaatagaaaatttatttacccagccaaaagaaacaaaagcaattgcattccaatttcatcaacagtgttgatccggttgatcttaaaatttgtgttccatttaattttattatcaaaaattaattaaaatcagagttggcaagtttttttttaaataagtaaggcaatcaaattaaagatgaacatccaaaaaaaaagaaagaaatttcatatataatttaacattaatttctcttaaattatggaaggaaaagataaaataagcataattaaatcaagggcacccattggaaaaacccgctttcaagtacagttgtaccgatttccaagtatataattgtcaaattttacaaatccaagtacaccataaaaataaagagaaagggttaatttttattcaaaatggtttgtattttccgttagaatgatttttccgtttttttttttgattttttcacaaaatgggcattttttacttttcatgtgctcactgatatgcgtatttgttaaacttctataaaaactctgattttaaaccaataagaaaaaatgataaaaatttattgcatttggcccaccccaccacctttgtgacagctttgttgaacacgcaaaactggttcttgtactcaatgttctcctcatccgtgaccgcatccaaaaacagatcaatgaaatcgacttgtcgtttctgatcactttcgaattgattattgttgccattattttgatgttgttgttcatggtgatgttgtctcgttcgacgtcgttccttaaccgcttccctgattttgttgtccatcagtgcgaacgggtcatgccggattttgccggtctgtcgaatgaacggcttgatcaccttggcaccaagccacgggaacaaggtggccaaatactcaaaccttggttaaattttttatgaagaaccacttgaaaaaagcaaaatttttaattcatttttacccaacccctagcggatttaaggaactgtttcatccagagatatgttttttatgatctggtaaatccgtatcatttaccaattgttttggaaccgcagaaatgcggcaacggcccatttggcgtcctccgaatggaattgtcgcgactcgcgttggcccattgcgacgcgtgtaatcacatcaaaggtcatctccacaaaataactaaaatttatttaaaatataaattttaatactaaattaatacacaataaataatttatgttatttcatatttattgtttcccaaataaaatattggaataaaataaacaatttaatctattcgaatttcaaaaaatttgtgctgggattagttggttaaataatgaaaaaattttaacttaagtaatgttctataaattaaaaaaaatttttattaatatttcctttaattaaaatattaccggtgtaaatttattggcacatttggctgcgctttgcgctctttctccatcagttcaatggccactttcaccgagtcgtccattgttggcattaacttcaaaaagcaacaacattcatcttaataatcattttttaataatttaatttattttacctttttcaaattgctaactgaaaatgccggatttgcggttgccctgaggcgcttccatcgcgccccgcgggcattgaacaaatgcatgcgtggctccttgtcaacatcgcc

SEQ ID NO: 4864 - DNA, 2265 bp, Heterodera glycines
cgaggggggggggggtcgcaaattttgaaaatcttcttagcaaattcattaaaaagtccaaaaattttccccggcggcgtctggcggctccgccgaaccccaaaattcctatttttcttaaaaattggctcaaaatcgcaaaaatttgccttttttggtgaaaaaatgttaacaaatcacacccaaagttcaaaaaaaaaatttcccggcggcgcctgccggcaccgccggcccccctgttcccgaaaagttttttggaaaaagcacgccgaaaacaaacgttttttgaaaagtaaaaaaaggtcatcggcggccgaccccccttcgcaaaaaattttaccgacccacccccctttttaatgtatgatggcaaaccaatgaaccactgtaggtcaacaacttgtcataaaaacccaggaggggggggggggggacctttccgtattgctccgtccatttggccaattgaaagaagcgaagcttttcctcccaaaacatttcgtccaaattgccactgaacagctttccatccgggcagggaatgcctcggcgtttccaataggcggcacggtaaagccaaaaacttgaaatcgacaaatgaattaattaattttttaattaattaggtttttgagcaaaatatttgacttacaaataaaaggcgagaaataaacagaagaataagaatgaaatttgtaatagaattaaccaaaacatcggagtctgaaagttattttatttaatattttttttaaattaaaaataatgaaaattaaaatataattggactcaaattatttgaaaaattgtgactaaattaatttaattatttctgcaagtgtttagctgattttcttttttttatatatatatatgccagcattattaccttctcattaaaagtgttaattcaatgatttgtacacacatgaccaacgaatgaatgaatggataaatacttttatcagtaattgaaggaagaggaccgaaacattcaaactacaaattacaaaaaatatttatgaaaataattcaaaaatagaaaattgtttggcttttacatatgataaaaaatgataaggtatttggtcttcttaatcattatggggttattagttgtatgcactaaaaaatggcaaatatgcgcataaaatacgcactaaaaatccctcaaatatgccctaaaaacccaaaaaatgccgaaatatgcactaaaatctgcctccaaaaatgactttgaatcctcaaaaaaatgccaaaaattgtttaaaaactcagaattgtctttgaaaataccaaaacaatagttaaggagtatttttagataattgcaaaaaaaaaaaatttttttttcaaatttgacattgcattttgaatctttgagaaggacagaaacattcaaactacaaattacaaaaatgttcttgaaaataacaaaaatggaaattgtttagctttttcacactataaaattttaattattataaccaagttttgtcgcaattattaaaaattttttttaatttaaaattgtaatcttttatgaattttaaaatttagccaaattaaaaaatttataaattttctattatatttttaattttaattcccgaaaaaatgtcattcctgatgcagaggatacctagttggtatagcaatgaatgggtgctagcgcgtttgttaaaaactgccacccatgcgcgtttgttaaaactgccaatgggtttgaaaacaaaaaatgggtaaaataattaaattaatagcttggctcaaattcaaccaaattaatatttcgtggtatcattcaatagctttaattgttctctttcagaatataattttcctaaatttttaacttaagtataaaagaagttataaagcattgaacaggctatgttttttgcaatggtaatgcatatataataataaacatttaaaattttaaagtctttaaaatgaaattgaaccaaaattaatttatatattcgatagccctaagaattctctatttatatttaaaattttagaaaatttcattgagtttcaaaaaagttctgaacaaaaaatgctgacttaagattttttgcaattttgtgacaataactttttttatacttaagtaaaaatttttggaaaagcatattctgatagaatacaattaaggctattgaatgctaccaaagaattttaatttgattgaaattaagcaaagatatgaatttttatgtgttaaccattttttgttttcaaacccattggcagttt

SEQ ID NO: 4865 - DNA, 4466 bp, Heterodera glycines
tcggataaaggtaaaaatgaagtcaatttttgtcgaatttagtttttagctcagcgccaacatactttcgttgagacaaattctgtacgatatgtctatcagccgatggacaacatttacatggtaattctattgttttttgttcatttaacagttaattttcaggttttgatcaccacgaaagcatctaatattttggaggacctggagacgcttcgtctgttttcccgagtggtgggttagggttattattactaacatttgaatcagagcgcgggaaagatttgttctcccttgaagggttcgaggcataactttgaatatacacagtatgcgataaaagggtggtcaaataatggtaacgaataaactcgtaaaacccaaaaagctatagccggaaattttcttcactacaaatttcgctcctctgattgtgtgctttttttttggagggattaaatttaaatatttgtttatttgaaaaaacagcaggtggggtcatgtactacatattcatactgatggtcagtcccgtttaatttagatacccgagtattgccgttccaatgatgagtccgaaatcactgacaaggcattcgatttgattttcgcttttgacgaaattgtcgtgcttggttatcgcgaaagtgtcaacttggcacaaatacgaactttcactgagatggactcgcatgaggagcgtgtgttcaatcaaattcaaattgtacagcctttcgaaatttagccaaaatttctcacaaactttttaggctcaacaacgcgcagcccatacactgatgaaagagaaggagaaggagataaagcggcaggaaaaactgaaggaagcatttgaagggcggaattggaggtgaaacgaaagtcaacaattatttaaattattctaaaaaaggtacggctgcatccgccacggggatcagttcgtcacaggcacgaactgaacttacgtcggtcgtcaaagacaccgcgcccatttcttcactgttgggtggaacgggtggaacctctctgtttgggggattgggtcaaaaaaagcaggcggtcccatttgtgggcggaggaaaggcgttgaaattgggcgcgaaatcggcaaacgaggacgcttttctgcagcagttacggcatgagggcgaaaaagtattggataaggttaatgaaatgccaaattgtgttaataagccgaaaaacaattccactttccaggaatcggccaatgtcaccgtgtcaatgtctggttagaatttgattattgtattattgcttgacggctgcataatttattgttttttgattatacaataaatattgcattaactaaagaaagaattccgtttatttgagaatctgatgctgctgtttcgaatattggtgtaaaggctggcgctgtccacttcaaatgcgttgagaaaataaatgccgtgctaagccgaggcgggggattgaattcgtctgactcggcaaaagtgtgatggatttattggatttgcctattccattccttcttcagatatttggctccatttcgctctgtgtttccgatcccaagtttaacagtgttgccatccgagtgttgaataatatcaaacaagtgcctggttgtcgacacggtgacacttctcaggacagcaaagcagttcaaattcaagtaatatatcggtttctgtcctttttcatttttatatgatttcatctattactgtcagcgtttttcataataactccagtaagaattcccaaaattaggttcatccaaatttggacaaatcgtcatggcaatccaaatcactgctccgcctcaagtccgagcaaaaaccgtacccggtcggtgttgacgttggtgtgttgaaatggtccattaaattgcctgacgaagatgcacttccattgacacgttagagttggatgacgaatcgaattaaaaaatgaatctttcagtaaattgttggccaaacgaatcctcggagggagtgacggtgaacatcgaatacacattgcaacgcgaggatttgcagctcaaaaatgtgcgaattgtcatccctctaccgtatgtgctattcattctgatgaatcttttatttttattgtgtttagtccggcaacagctcccgtcatttccgagtgcgaaggagcgtacgaatacctaaagtctaaaggccaacttttgtggtccattccgctggttgaacggggcaacaaaacgggcactttggaattcacaacagccaacggaaatgctgatcactttttccctgtccaagtccatttcagctccaccgacagtttttccaaaataacggtcaatcattgaatatattttttatacttgcaagggtttatagtattttcaacgtcctttaggttgaaagcgttgagacaatgcaaggagatgatgttgagttcactgatgaagtgaatttgtttccagaaaaatatgagattatttaatcaagagttctgtgaaaattggtgtgatttttatttatcatgggctgtttttaaactatgcttttttaattcatttcctttcgaataaaattttatgggacatcctcttttttaatgtttttggacaaaaaaaaacgtcgttttatgggaatggtgcggtgcgtcttttttattcagagggaagtgaatcatccgtgatttctttattttgtcatatttttggtcggccacaaaacgttgcctcattattctttttatgtgttcatgatatgactcatttgatttcgttcctccgttacggtccaatcattcatccgcctcctccgatgtttctcattttcactttcccctcccccttccaatggaaggttgcaggaagctccgcctcttttctgcattcacgctacaataaatacacacattgtgtgattgcccctccccccccccccccccctctccgtagtcaaattattttgtttgttcgttcgcaattctgtctgtcccctcttcagctgtgctgctgaattttccactgtccttccgtttagttttggctttggttcctttccatttcctttcccccctttacttagcttatcccctccccctctaaaaatccctttttcattcccacaatttgattaaacatttccatttccctttgggtccgtccccaaaattccctttcccacaattcgcagctgtgccaataggaatcgattgctgttgtgaacttttggttaattgtaagttttatatgtccgaccattccatcggtccgtctccccacacaatcgcatctcttcctggataaattcgtcagcgttgtataatatgctttcaatttttaaaatctgagacacagttttttggggttttcaaaatcgaaaaatctgtttctgatatccatttagaaccctgaaccagattcgaacaaaaaatagaaaactcggtttttagactttacgctggaaaaaattgatttttttccaaaaaggggcacaccatctaaagtattaccgttggcgctaatggatccatgaaatttcgatttttttatttatcctcttattgttttaattttgattttgtttttaaggttgtttaaacttaaaattatatttgcgactatctcaaattcatacgcgctgcgaaaagaacggagaaacagggcgaacacccaagcgaactttgaaacagtggttggttttttcgttttcattttagactggtcagttcaaattaaaataagcgagtgtttcaaaatggcatttatcgccttggcttttacttggttttcacccgttgtttgatatatggtcaaagaagcgaacaattgttgctgcttcggttcgcggcttcgttctcttccctttgctatgttttgcttgcgttgggttggcttttctcccttccctttgctttggttgcgctttccgtgcgtttcccttccgctgcgctctttcgcgtcgtctcctcctcacctttcgctgtttctgctgctgtttgttttgttattttttatcaaagggcgcttcctttcttcggattccttttctgctgtcgttgttttgttgttgaattttgcgtctctttttcttctgctgcttcatcatccatttccttcccattatccgttctctctctctctctctctgtttttcctcaacttttgagtgtcgaaatgaatgggccgatccgccgatggattgcctcttcttctttctgctctgtttgtccgtgttgtgtgttcattacgctcactctcttctccctatttcactcgctcacctttttgtgtgcccttttcctcccattttcacgctttccttaactcccttcattttttctaatgctttttcttcacacattccgtttcgttgaccgggaaatggacggggcagagggtgtgaggggtggggtctttcctcgagagtgcatttaatgatgacaatggaatgtaggtggaagtgtgtgcggataatggtcattcctttctgtaa

SEQ ID NO: 4866 - DNA, 5760 bp, Heterodera glycines
  unsure (1)..(5760): unsure at all n locations
cagcagcggcagttgttattgttggtttgagtgtagtgatgtacttggatattcttcgcgttggcgaggaagttgattgggaggggaataggggcgattgggtggcagaagggagtgggatcagtcggtctttccgctgcttttattggtcactttcgttagcccaccccccccccccccccctccttcgatcacctcatttcgttagccattataagtatttcctttcgtccgtcttcgacacattcgcttccttcccgtcacatccaatcttttcgcttttccgtcactacggccacccgcgttttgcattccctttctatcataaaattgagctgctgattcttttaatcatgtcaatggggggtggccattgaccgcttttgcatcggtggcacgcgaaaaatggaccaggcaaaacaatgcctgtcccgcttttggcattggctgcgaattcgtttaattgccttatggacttttcttaaatgggtcggccatgaaatttgttgttgcggcatatgcttacaggaggaggatgatgtggagaaaggacgcacaaagaacccttttgatcagcgtaaggaagaagatgcagaattggatcgttagcaaatttcaaattggcaaaggattggcattatgttttagaaacgcatttgcctaaataatataattttttctaatgcctacataagaattaataattttcttagaagtgacaatttcgacgacagcgatgagtgccggtactcaaaatgcgacaggacagggccacgtgcacaaagtgataatggtcggctcaggcggcgtaggcaaatcggcactgacacttcagtttttgtacgacgaggcgagtgattttagagagaagggccaattgaatgtgtaaggagacccgagaaataatttcgaaaaaatggtagtgattggagttgttttatacagttttgatcaattgtgcttatcccttttcatttaattttggactttgatattggtgtttttcatatttacacatgccaacactccctcccccctccctccgctctgtcttcactggaataatttactttcatatcacagtttgtggagaattacgaaccgaccaaagcagatgctcacagaaagcaagttgtgttggacggggaatattgtgcggtcgacattttggacacggcgggacaggaggactattcggcgataaggtcggcaaatggttaaatagtttttcggaaattacaatcacaattactctcttttatttcttaaactaattcagggacaattactatcggtcgggagaaggtttcatctgcgtcttctccatcaccgatttggattcctttgatcaactcgtcgaatttcgggagcaaattttgcgtgtcaaaaatgccgacccaaatgtttgcattttgttagtcggtaacaagtctgatttggacgcggaaaggaaagtgcctttggagcaagcgcaacaacgtgaccaattccaccaacgatggaaaggagctcttttttgcatttaggtgccgaactttggggctgtcctttcgtggagacttcggcaaaaacacgcgaaaatgtggacaaggttagccaagggcagaaagccaaccgaattcggattatcagttgtcatcgattcttatgggttttctttttgcattcgattgtgtttcattacggtctctcaaaattattcatacataatcggtttaaggtcttttatgacatcatgagggaaataaagcggaaaaaggtgggcacaatgcgagcgggcggtgccaacggcggcgatgcggcgggtgccaatggaaaacggaaagcgaaacggacatggaagggatgcaccattctttgaggggaggaggccaaaggaagcggagagaggaggcaacaatcggaaatattctgtccataatatttaagtattcactgtctggaaaagtggccaatggtcagaaagttttttggattgttcaaataaatttcactggctaaggccgtcccttcaatggccactgcgactaaaatcacacactttttgcgctttgttgttttttcgatttctttaattttattgagccttttttcatttgcttataaacaacaaataaatgcaatggttgtcatttcacttaacggtaaaagttgccattgctttccttttttatttgttttcgttttcctttacggttcctatcaaaaaaggtcgcttttatgatgatgaactccgacaattcgagtgctatcaacagcaaatccttcgatcaaatttcggagattggatcaatggccacggacggactgcttcaggacgacggagtgccggattatgcaaaaatcataatcaaacagcagcaggcactcattgccacgcttatgaacatgcaacagcagcagcaggaggtcattgaaacaaggaaaatttggcgtgattggttttatgagccgagattagtccggggaaatttctaccgacggcaattataatttgttgagaaataaataattgaaaatcggctgttcagtctcggtacgcgtcgaccatctcactttttcaacagcatcagccgcactttctctccaacaacgattcgtcctttccccctcctggcatccccacccatccgtctcctccgcccggcatccgtccacccgtctctcccgcgccagtgtcggcacctccgccgcctccaccgggctttcgtgcacccccaggcttcaacgtaagcgtcagttcccgcaagttcgaactcgactccaccaaatccgacaccggcggctcccacaaattcgacatcagagaggagctgaagaaggcatttgccttagacgacaccaacgaaaacgacagctcctccgccgagcagcagaatttgtcaccacgttcgcagaacattcgcgaggcacagaacgcgcgtctgcccatgtcgagcagtttctcgtccatcgaaaatttgcaaaatttcaccggtttaagccaacaggtgggcatttcacagcaaaaattacgaggaaatattacatacaaaagaaatgatagtgaacattcttccttccatttcctttgctttttaaggactcatcttcgcccgtctccgcgctcagtcggcagcccatcgccgcggccgttccgtctcctcagtccgcgtcgtcgtcggtgtgcgccttggcacttaattatgtgttggttgatcaaatggtgttgaattatgagcgagtgtacgagcaaaaggagaaaatggccagcgaaacgtatgactgacaatgagcgaatgatttgcatttttacgtggaacaatgggcgaccatttgaactttttcagtctcaccatggtggacagacagtcttcgcccgaacggagcatttaccaacgctttgccaacctcggcgccgtcctctacattttgcagcgacttcaccgactccaccccgacggcttcaccgtggcacaatatgtgcagtttgagaatgttcgtaacattggtacttttcgatttctaattccaatcaattctttgctcctttccccagtccccgttagttccacttataagcattttttgttgaaatatggggctttatttttatgccataacggtaaataatttttttgttagcgtcagaagcgagctcggccgacctctgagggcttttttttcaacaacactttgccatcggtggcttcgttgttggaatcggacgacgatttgctaagagtggacataaaggaagagaagttttacgtgtcggaggaggtcactcagacgcacctcttctgtctgagcaagaatttgtgtgagtgtttttagacttatttgatgtcatcatagcattttcaaaaattatttaaccaaaaatgcaacaaatagaaaattggtcaattcgggggttacgatcgttccttcctccgtgtggagagtaaccgccccttttgttctatttcaggctccaatttgttccgtcttttgcgtcgctgcagctccaacaatgccatccgcgtccagcatttgctcgaaatctctgtaaaacgattcgttgtgtccctccaccattccaaatgccatttcagtcccaattggtgcccatcggcgcccccatgcccaactccaacgctttggtcgacctgtgcaatcgcttcccgaccattttcaaattgcgttgttcgcctcaagacaattgtgagtaaatgcaattggtctgctgagtgtgtccttctcccttctcttcctcagatcgctttgacaattcggtgattatgctcaacgaacagttgctggacagcgagaatttggcgtggcgcgtcgttttggacactgacgaattttaaagggtgaattggcgaagaagcggactctgaccaaatttgccataaaatctttttgttgttttgtggagaaatggaaatttacggggataaatcatcaaaaaaaaaattgtccacgctacacgaaatttatgaggacgaaaagataaattaaaaatagagtatactcgaaaaagagaccgctatttgaatttagggatttttgggtagaaacaatgagttatcgggattgccttttcggatttgttaattggaagtgattgatggagggggggggggggaaatgtccgtgtcgtttgctatttttgccgtcccttaaaaactccgctgccatgtgtctcggatttgtgatatccgtccgtccgtccgttcatcaccaattatctttctttttcgctgttccgttgtgaagcccttttctttcccctattaatccgtcatcttttcttcatttgccttcattattagggttccttccttcttccgcatctcatttatttttcttctgtttcatttctgtgccgtttttgtttattatttttatttaaaaatggcattttcccccgggtgatttttctttttcatccctttgttttttcctttttgcccctcccattggggcttttcctctttaaatttccgtgctttttctttctttgctgttgttgtcgcaatggttgttggcatggcgtgtgagttcttcgagggccgttcggttggccatccccgggggcataattctattgactttttaaagacttggccaaatgccccacactgaatttaagcaatttaccaaaattcgctttggcattccttccattcattcgttcttttgaattccccaagttgcattttccttttaaatgtgaatgatttaatttaccataggaaatgccattgaaaagcattaatgccctccaaaacggttaatgtctttgagtggcgtcccgaaacaattaaatttgccaaatgtctgccagaattcagcacgaggctttttttgaacattttggcattgtgttggacaacgccgagggcgtttacttttccggacaggaaattgccggaaaggtcggaatataaaagtcaattaatttgcccaattggccaaacttcgccttgggcaggtggtcattgagtgccgggaaccgcgccgaatcagcgaacttttgctggaagtgaagggacgggcgcggacgcattggacaaagtcacgcaaaatgtgcagcgaaaacgaaacgtacttttgcgagcagttcaacacggaatacacgcgaaagttgccaaaaacggaggccgaaaacgacgcggggggaggaacaccacgggaaggggggaggacagtggcggaacggagaagggaaagcatcaaaatgatggtgaagaggggcaaacggaggagtgggggagacagagtgnaaggaga

SEQ ID NO: 4867 - DNA, 167 bp, Heterodera glycines
gggagtgggagagagaaagagtagggggaggggagtgggagagagaaagagtagggggaggggagtgggagagagaaagagtagagggaggggagtgggagagagaaagagtaaggggaggcgagaggggagagaaagagtagggggaggggagtgggagagagaaa

SEQ ID NO: 4868 - DNA, 3067 bp, Heterodera glycines
  unsure (1)..(3067): unsure at all n locations
gagttaggaatttttctgaaaatcgatttttccagaattctggaatactttnntatttggaagatagaattccaaacanatctcattaattctcctaatttttgctatttttcaaactttattccactaaatttgaccaaaaacgaagacagttatgaattttcgaaatttcactggatttcccggggccaaatagtgacaatttttcaaaaatttgtaaccaccttccaaaaagtctgaaacgcaaaataaagcgtatatacgtattcagcacctcaaattatgccataaaaatgcattttggctaatttaggagcaaaaaaatttttcatgaaatgcaaaaccatggggtcccccctatggttttgaatttcaaaattcatttttattttataactttttaaaaactcatggtaaaaacatgagataaagcacattatattgggcttaaaattctctacaaaaaagctcttagacgattttttgataaattcaactcctgacgagttattgcgccagaactgaaattgaggcctagcaaccaaaaattttctatttccaaaaaatttttgaaaaatttttctgaaaatgacaccaatcgatagagcatgaaaaacggttgcttgaaagtggtctccgttttccccggaaaaatctgtaaaaaatcataaaattcaaaaacggaaaattttcgagggggcctagctcgaaaatttctgaaaatttcagaaatccaaaaacatggttggatagagctcgtcgagctctacaaaaaagccgcttacaccgacctcctccggtcaaaccccggcgagttattcggccggcgctgaaatggcccaaaaaagtataccatttttagccagtttttcagaaaaactggtaggccctaggggttcggtcaagaaacaaaaaatatcccaaaaagtccaaccgagtgcctttacgaggccgatttttcaattaggcctttaaaaaatttttgaattccaaaaacggcaaaaactgcttcgaaaaaagtgacttttcggcgcctggcgctcagttggccctcggatcggaaaatctatagttttcctgaatgcgccgtcaaaagttgcccccaaggtcgaaatttcgaacccctcccggcaaaccgtaaggagattttgtttttggaatgagttgccttgtttctttagttatatataaactagggtagccagttggctttaaggtagaaaaatgcttctggaacccgaatataatgcggtatttacatgagcgctgcgcgcaaaggacttcgttgctagtgcataagcgaacatgtggccagtttattaaccgtcattagcggttgggcaattatttcttgtaaataaaaattgtccaacccccagggtccaccacgcggaggaacacggaggaaaactggcaaaaaccttggaccccactcgccggggggtgaactccaaactggaatccccggcgaggagctatgctctgaagaaaacacctgaaatgaccggggggtgaactccaagctggaatccccggaaataaatatgcggcatctctcctcgcactctgaaactggcacaaaaacatcctaaataaaaaagaaatgtgacaaatatataataaaaaatatataaataaaaagtgcggcaaaaactctcctcgtcctgggtccggaaatgaaattgcgatattcactgtaaaaaatcaaatgaaactgacaaagggtaaatgtacaggccggcggaagagagtaaaaagcaaggccgccatataatacgttcctcagggcccacattgtgcccacatactatatggatccatgcctcgccgacctgccccaatcctatttaaaataacagccaacggtcaaactcacctccatccaaccatccaccttacttgaaaagcaaggggtgtgtttgcccgggattgggaattaaacgatttgtttatggctgttatttgacaaaacaaacaactaataatgctgcgaggaagacagcataaaaatattaatccaaattaagcccggaagcaataatattcctgatcaatgggtttccattatcatcaagtggtttattgggagcaaaaatccttatattatcacgactcgtagcccttgacaatgctgtgtataattgtccatgtgcaaatggctcttcagtaaaatcaattcctaatcggaatgcggtttgaccttgagccttcacaacagtcatagcaaaagcgaggcggacggggaattggaatctttcaaagcttactccgtcggggcgtttgtctttgtatgtgtgccggttacggggtataccaacaattattccgtttgcagagaagcctccacctattgtctcacattcaatcaaattatcagtcaattttttgacaagaagacgggtgccattacacagtccttttgacgtatttaaatttacgagcaacacaacaatagaacctgttttaagccgaagtaaatgggtgggcattcccattggattaagctgattaagctgcgctacgtcaaagtcagccgcatttacggcaaaggggttttcatcagtggctttatcaacagagaaatattcaacaaaattgccaagcatggattgcgaaatttgagaattatttaaattgaagtgttttctaattttcaaaaaaaattccaggcctctacctatacttggaagggctgcagaaattggcaactttttagtaccaactttgcccagttcagtccccgttgaataactcattaggctttgacctgagcgcagggtggccagcagacttattgtagagctcggtgagttcgatttttccaaattttaaaatttcgaaaattttcaaaatttttcgagctaggcctaaaaaacggttttcgggtttttgaattttagtattttttaacgaattttcccagaaaaacgaagaccacttccaagcaacagtttttcgagctctatcgactggtatttttttcggaaaattttcgattttttcccggaaatagaaaaaatttttggcctgagagggacatttgagtcccgggcccataactcgtcag

SEQ ID NO: 4869 - DNA, 4034 bp, Heterodera glycines
cgggttttcatcagtggctttatcaacagagaaatattcacaaaattgccaagcatggattgcgaaatttgagaattatttaaatcaacaatcctatttgtagtggcaagaaggaggcgtttaagcatttcactacttggcatactaaacccttgatcaaatacccaatcaatcaattcttctcgagagtctacaagcatatcttttgggatagcgaccgtgtcgccacttactcctcttccaacatcgtcaagccatttcaggaactcgatctcatttgggtttactcgcatgctttgggtcaatttgaattttgtaaaaagtgagtaaagtggggaggattgaatgcatgcggaaacttgcgctggacttccatatgagtcaattacaacaggtagtgattgcttccaatcaccagaaataatcacgcattttccaccaaaaggtaagtgccgtttctgcgaacacataagacgacaaagagcatcaatattttccaaaacagtcctctctaacattgtcatttcgtcaattattatgatatcacactctgttattctccggccaaagaaactatcaaagggaatggatggcaattttccaggttcaacatttatcccaaacttaaaggcagaatgaacagtggtgccaccagcataaaaacgggtggccgccataccagtggaagcggtgggaataattttagcgccaattctacgcaagtgataaaggatataattaagcaaataggtttttcctgttccaccgtcaccatacaaataaaacaatcttgaacatcgtgagtcaataaatgcagtctttaccaaatcaaaaaatttttgctgttcaatattcaattttccacgctcataagagcttgtgtcaatatcatttgcatcatcatcattagcgtgttgtggaaagaaaaattcatcaagcccgagctggggattattcataattgaaattgtaggggttgggagtccataatctttacactgttttcctagtcttactaaaagtttttctaaaaggaccaatgcacggtcaattctcgcaggacgttcggcatcggtacaacgcaaatcacacatatgatggagaaatttatcccaaagcagtgcgccgtcgataagacaattctctgttgctccaaaaatcaaaatgtttgccagtaattggcgcatttgtgccggaccgagtgaggcggacccctctgtcatcgttcggatccaaacatcactatcatcaataagacctcttaatcgggcagcctcaagaaatgtggagcagacatgcgggggattaacgatctttagttgctgagggtttccaggaaaatgcttagttaacaaatacaaagcaaataattcaggatttcggggtgacactgggtaaattctcccaataattggttttctctcacgggttttaggccttggattagtagaaatgacacgtttcttccaaaattttccggacctattaaatgagtattgctctggcatgcgttcgaaaaggatttttttaacgtcgggattagtttcacacattttccaatatgcggtcaagggagtttctggcaaaatgcccgcctgaagttgctgtccaattgcctcttcttggccggatttataataaactttttgctggccaggcaaatgaagtgacaatgcaataactgtatgcgataatttggcatacttgtaagacataattctactgtaggcctcaggcgacgaacgatataacattcttgcataaaaagcaggttcatcgatacttatctttccattttcttcatttgtcttaacgtacgaaaagcttgggcccttgaatggatatttgtacagatatttcaaatttgtgctttgcccatatgcatattccagattatggtgagtctcaaaatgaaccaagatatatgggttataggaggaaatacgagaattatcataaatgacttgcgctttgcctcgctttacggttaaggtttgcccgccctcttccgggctcggacgaaaatagatcgctggacgatcatcgtgaaggacagtaaacttactaaacggcttggggaatccctttttgcattttccttttttattaagacaatggggaccacagtcatggaattgaaatttcggtaataattcacgtagtttacgaataaaattggcccaatctgatttatcatttttcgctggttcttcaggtatatgcgcccatattatattatcaacattctctgggatggcaagcaaacttgtgtgataaacacgatgggcatgtggaccgccgtatttcttttggaactcacgacattcttgtccaatcattttacccaaaatattttttttgtcaatcaaataatgcaaatggcgaagtttatcctcatatatacgacatattaaatcgggtcgatctacagttttctgacctttatggaggaaattacgagaaatttcacgccaacgcggattggttgtgaaagtgagaaagaatgaagcgttgcctggttttttaaagcgtgacattattgtggtagcatcataaaatttgtgttggaaatacgctcgtgtgcctggctctgatctgcggaacataacaatactccccaagtcttctgtggagctaagaccagcattacgtgaaagccagcgaagggcattttctggaagtgtactacgcaaatttaattcgggacgacgtaaataatttgcaacattcgtatcaattcgcgccgcgtaatcaagtgtaaatttctgacttagtccgccaccggaactccaaatgttgtgaatgtttttgtgttttcttaacgccatacgatagcggatatacgacctaatagataaaaactgccgcggaccgcgtttgtcaacagaatcaaccgaactggcaacggactcattgtcatcatctgatgcatcagcatctgaatcaccagtgttctcatcagattcgacatcaatctccatggcctcattcttttcgggcttatttaacggattgtatggaattttaaggtgaaagccattatcaccatgtggaaacatcaaagggtagcaaagagaatctgtgagtggatgatgtggagggaattttttaagttttccttcgtcattggtaatccatatccctttcaaaaagggtggctgttcactttcagcccaaacggcaaacaatgaattcccctcatcgggtaaattggcttgtctcgaatgaatagaaacgtctcgaacacttgccggtgcatctcgagcctcgacgagcgttaaacggaaattaagtacagcctctgggcctttctcttttagagtattctgatattgtttatggaagtttaccaactcttgggcaagagggttatattttcgaataataaaatcaagctttttaattgtggtttcgtttactcgatcaccaccatacgctatgttctgagtcctttgcatgaaggctgtaacagggtcaagaatgtataattgcgaaaaggatggagaaaattttccgggtaaagttgagcctatttgacgagtgaattcaccatttaacaaatagcaaacatttccatcaagtgatgactcacggtatccaaccgaaacggacgcaaatgctaacaatgaattataaacattttcattagacaaaaattccttagctatcatttttcgctgagttcttcaggtatatgcgcccatattatattatcaacattctctgggatggcaagcaaacttgtgtgataaacacgatgggcatgtggaccgccgtatttcttttggaactcacgacattcttgtccaatcattttacccaaaatattttttttgtcaatcaaataatgcaaatggcgaagtttatcctcatatatacgacatattaaatcgggtcgatctacagttttctgacctttatggaggaaattacgagaaatttcacgccaacgcggattggttgtgaaagtgagaaagaatgaaagcgtgcctggtttttttaagcgtgacattattgtggtagcatcataaaat

SEQ ID NO: 4870 - DNA, 7717 bp, Heterodera glycines
tagtttaattgaaattgcggtactttgttcatttgtcccttttcaaacatcaaacacaaaatacgaaacatagcaaagggaacaatgaaaaggggccaaaagttgaaacaaatttggcagaggtccaaccacaaaaatgccaaaaaagcaattcatttcttcagttgaatatttatcacattgatagaattgttttgcctaagggatcgataagtttcgttgattaaccgtaaataaaataattaacacagaattcaccgaacacgcgaaatcaacgtcaaacttgagaattgggaagacaaattatagtaattaagtacataattcagactccttttttcatacaccacgaaatataaccaaaaaagtaaaaattgaagctcaacaacttctcgagctgaaattttaccaagagaacggttcaatatcagttggacagtgaatcagtttagaaataccattttagcggtggtcagctgggtagtgaatatacagtcactggtacttccgggttttgccacccccccccccccccctgaaatatattttttttattttcttttttctagggtaattttaagcgctgaacgttgacgtttatttctttcatgtaactcacgtaaaatacgtgacagcctcaaataaacgtcagattcgtgttcagcgcttaaaagggcgggggtttgcttttaattagctccaaaaaatctcataaaaaataaattttatgatgatttgtttggctccacattcctttagtcgatgtatcgcctcgattcaatattcattttggcataaattgcaccagattttgtctaaagattaaccaaatttagggattttaggctaattttttaagaaaataggcttcttggtgggccggcggtgccgataggcgcctctgggcgaatttggaaatttaagctctattttctaacagatattcaccaaaaaaattaaaacttttccgataaatttttgtttttcttcggtatttttattttgtaattttgaaatatattaaattttcctgatttagtcaaggaaaattgaacttttattccttttttatgggaccataaaacagtattaccgcagtttttccggaaaaaattcataaatttttttttcttttactctttacaattacttcctgtaaattggtcgagctgaaatttttactaggtaggctcttaaaaactccaaaaataggcactaaaaatggaaaataggctctaaaaagtctcaaacttaggggtgtaaaatgacaaaattcattctaaaaggtaaaaaaataagttaaatcagtattggttacagtatttttaaaatcaaaaatttgtacaaaaaaaaattttagatgatttttgagaaaatttttcatttcttaggggatttattttcagaaatttttgagtcgattcttaggggtgtatttttcgtttttaactttcggcaaaacgccaaaataggcaaaaataggctctttcaaaaaattttaggctctaaaaataaaagcctagaaaataggcactaataactcgaaaagtagtttaacaacagcccaaaaaacatgtttttcgtgcgttccaggccacggggttaaattaaatcatcgaaatcgttcgaacaaaaagtcgaattcaaatttttcgaatttcacatttttggttcaaacttgtttaaatgcatgaaaacgaagttaaagtcattagtgcttgaataaaagatcatttaaaccatttttagactaaaaatgtgaaattcaaaaaatttcgaaaaaaggggggggggataaactttactattaccgagaattggctttattcgcttaattcgcgaacatctttttaaaagaacataaatttgaaagaaagaaaataggtgatcagatcgagccatcgactttcactttaaagacccagcggacgacgatgggactgctccggccggactggcatcgtcaccttccgacatgggcacgtcctctgcaaatgattgtgtttcccttggccgtttttcccccacccgtccttttctcaccggattctttgttcatttcctcgaggttgtccagcagaacagcaagagtgtaccttcaaagtttaaccatgatttaaggggagcgcaaagcaccgcaaacgaacatattcttcctcttttcaatcaactgaaaagtttaattgttgtaaattctaggacagggatttccgacccgttgttcgagcatcttttgtttggcgtatgcttcttccaactcatcctgaagcagtttcagccttttcgaagtttcgactctgctcggcttttcctttatgacttatttaaaaaattcggttgttttagtggttactttgataagtttagcgagtgcgtcatattcctgtcggttttttcggatttgttttgcctctgccaattcccttttcactgcatccattttgttgttattttgggtgatcatttcatctgatatttgcgaactaacttataaaaaatgacataattaacaaccaatttcggtgcaaagttgttcataatttgcaatttcaatttcggttatggcggaaatctgtgcttgtttttggaaagaaagttcaatttggtccaagttgattagaattttgttagtaatactaaattagaggaataaagagcataaattttgaattgaatatagccaaccttttcgtatcagcgtttgatttgctcaacataattatcaattggaataattggacaattcgccggtcatccccagtgccatccccatcggcgaccaatttcctaataattgcttcttctgccattaaataatctacaaaaagttttaagggaaaggatttgttttaaaatttcagacgaagttgtcagtatgtccgtttttcagttaagttatcactagagttcgacctttgtcatggatccaggttcaggtccaggccattttggccatttttttggcaacctggatttttgcggttgtttaaatttaattaaatttatttaaaaatatttggcattctgtcttaatattcaaaaaatgcaagggatcccgcggatcccacacaaaaaatcccttaactatatactaagtcagccgaagccccgcccctatttttgaattggcggttaaatgctgttttgttgtaataggaaaaagaaacagaaaattaaaaaatataattggagattaatagagaaaggatgggtagaagagagagtgcagtgtatgtttctctgtcggcgcggatgggaggggtagagtgggtaacgcgtgcggttgtcacgcaggattgaatgcgtgcgagtttgtttatgtgtgtgatgagtgtgtaggagtgcttgggaataaggaggtagagaagaagaggaaaacaatagagagagatgaaaaaggaagcgagagagtgtacagaatgaagagattctaaaggaaggggagagagagaggactgagagagaaagagaagaagagatagggataaagagaagataaaggagaaaaagcaagaggacaattaaagagaaagcggaagataaatagcgattgagaatggggaaatggtaacgatagaaaaagagtgggaagactgagagatgacagagagagagagagaaagagagagagagatgagaggatgggagagagacagagagagagcagggagagagaaaaagagagaagggagagagaatgagaaagcaaagagagagatagagaagagaaagagctaagagagaggtgagaggatgggagagaagagagagaaaaagagagaaggaaaagataaagaaaaaaagagaaagaaagaaagagaagagagaagcagtgagaggtagagcgaagagagagagagagagaaaaagtgagagggtggaagagagagcagagaaagagagaagggagagaaagaaatagagagagagagaaagagagagcgacgggatagagagagagaaagaaagcaggctaagggagagagagaaaatgaaatatagagagagagagagaaagagagagctaaggggagagagaaatagtgagagaaagagaaagaaaatcgagcagtgagagagagagcaaagagagagagagagacagaaagagggagaaagcaagaaagagagagggagagagagaaaagtggagaaagagagagagcgcagagagagagcagagagagagccaaaggatagagaaagagagagaagaagaagaagaaaagagggagaggaagagatcgagagagagagagagagaaagagaaaaaaagcgagcagtgagagagagagtaaagagagagagagagtaaagagagagagagaaagagggagaaagaaagaaagaaataaagagatctaatttgcgaatcccgttgcgggattagaactcaatttttttttgcggaacgggattaactgctaattaactgtaagcatcttctcaacagcacacatttgatgtcacttggaggctttaccaactttgcgaaaaatgcgcttttaacagcccaaaagcacatcgattctgcgcttcatattgaagaggaagatgaagaagaggagcaaaatgaggaagatgtagaaaaggaagagctttctatttctgatagtgtagtgatgaaaagcatttatgccgttgaggtcggtactcattgtattgacatcgaatgattgttgtttcagaatcacgaagcagatggtatggtgagtggtggggacgcagtgccccttccgagtgcagttgctgactccccttttctcgaggtcgatttgaataggacattaactccgcaatctcaatggacaaatgagtcgactggcactatggtatgcaattaaaggtaaaaaaaattatcatttatacaaaagcatcctatcgttgacactgagccgaatccgatccgagacgcacatgagccaaatcacattttccactattcaccctcatcagtatggaattagagggatccaattttttagaaacgaatcttagcactctcccgacgacgacgaaagcagtcaaaacggacagagttcgtcctctcagtcagcgcccatcagctcagccttagacgcttccttgactaatttatacaaggaaaaggtctttgctctttctcaacggtcaattaatgttctttcaattaacaggaaaacgacgaatgtgatgatgatcggagcatgccgagaagggcgtcggagagaacgctggacagatttgaggacgtgagaacgattgcatccagtgacattgaagttattcgccaaatggacgattggtcagttgacactcattttcatccaaataactcaccaccatccgaatgaacaaaaacgggttccgaatttccttctccatttaggtcggtcacgagcagttatccgaacagctcccaccagcagagcaacacacagaaaattggacaaattcggtcaataggagaacttcagcaaagccaaacaccgccagagttaactaccaaattggacacttcagaacaatctcagcgagaaatggacgagaaaattgccatattaatggccaaattggcgcatagggaccaaaagatagaagagttgggcagggccaacgaaaacctgcggacaacgaatgcaactttagtggcgaaaagcaaacaaaagtaattggaattttatttgtcgccaaaaataattttagaaatgcggcggaagcaaaacttcaaagtcaatttgctgagaaagaaaaacaactaaccgatttgctagacgaaggtaaaattgtgtcagaaaaagtttacgattgaaaaacaattcaggacggaaattatccgaatacagcggtcgtcaagcgaaagaagttcgaaagttgaagcaacagttggaacaattggacatcgtcacggctgcgagggacagcgcagttgaggaactgcaagaagcacaccaacagctgcaagagcaagagaacgcaatggaacagttgaggggtgagggaacagagcaagtcgagacgaacaaagaaaacattgttcagacgaactcgaaaattgtgagcataaagcgaggaaactccaagcacaactcgacgacaaaatgacaaatgcgaccaatttggaggggaaagtgtgcgaacaattaaccaaagttgaggcgctaactgcggaaaagagacgaatggagaagacactccaaacaacgagcagagaacgcgaagtgcgacaaaaagggagggggaaaaggagaaacagtgggacgaatgcaacacaattcaggaattggctcaggaaaacaagaaattggcagcaaaactgatgaacagaaaggcacaggatcgaataatcggagagcgagagaggggacttgaggaagagctgagacaggaaagactcaaaagcgagtccgccaatgcgcggatccgcgagttggagcaggtctttgccgttgaatgcttttccagcttttacccaacgaattcagcgcatcgaatgcattcaggacatgaacagagacattgcagttgaatatcaaacggtgggcgaagggggtgagcggtaaaaaaggggtgatgggacagtagagataagagaagaattctaaaaatattatatttaaacaaaattccattaaaaagacaaagttttcttggctctagtgcactttatgagtccaatcaattgacaatacctggtttttatacaataactgttcatgtttgaacaaaccctatatttttggtatcattcgacaacacaaagtctaacgaagctaaaacatataaaatctcaacgtttaggcaattacgaaaaaagatcttattaattaagtaattgctgattatttaggtttgtaactttcttgaaatgttaaaattctcttgttttctcgtattattacattattcagactttatgctttcgaatgatgccaaaaagatagggtttgttcgaatatgaacaacgttattgtataaaaacccgggacataattttgcatagatttcttgctattttagcaaattcacctctgctcatcacaatttcttctttggaagagaaactgcttggattggagcgtgaaaatgacattttgacgcgttcgacgagacaaatgtccgccgaattgggggcaatgaaacggaggcacgaagccgaaatgggaacaatcgaacggagtttggaagaagtgggaatgttattttgtcagagtgaattttgttaatttcaggaaaaacaacaaaatgcacaaaaaacggaggaattggcgaaggcgttcagcgaaagagcgaatattcaaacgtaaaaaagggggggggggagaaagtgaaacgaaaatttaaaaaaaaacagcatttatcattgtcctttacgccaaataagaaaactgactgttcgccgcttttcagtcgtatagaaaaactcgaagacgaattgtcgcagtcgaaaagagagcactcggaaagggtaaaccgaatggagaagagaatggaacaattggagacggatatccaagcgaaggtgtccattaacaaaacaaaagcttactttggctattcatttgctaatttcaaatagattttcagaggaatgagttaaccgaattgcaacgtaaaaactgcgaattccaacagaaaatcattgcatcgactgtggagcgaagaaacaatgccaattcactactcattgtgaacccattggaacaacagcagaaacgaattgacaacgaggacgaa

SEQ ID NO: 4871 - DNA, 2169 bp, Heterodera glycines
ggtcttttggtcctatttgatacaatttgagtattttaactcatccctaatgggtcctcatcttgtcccacagtccaccccaacgctttcccacgcaatgaacggtccaccgtcttcgtccgccggactcgcggggcgacaatggaaacaatgccggcggtggtggcctcatcgatgggccctcggcggtggtgccgctgcgcatcacttgggcgtcccgtccgcaatggtcgtcgtcagttcgaccgccgcttcttcggctggtcaaccaccgcccacctacaacaacaccaacgccgcaatgggcggcggcgtgggtcagcacagaatgggaccgcacgggcagtcgtcgtttgtacaaccgcagcaacagcaaaacacgggcggagggcaacaacagcatcaggtggacaattgaatgttcggcagggtcaattagttgttaaatttcaattttaatggcactggcaaatcccagcgaattactgaccttaaaaacgggatgaatttgttgcctaataacaacagcaacaattagggatgttcccattgcgtgtttattatcccacaattgttttttgaaagagaagattttctcttatttttcaatttgttctttttattcccattttcagccaatgctccaaggacctccgatggactctcatcatcaccagcaacaacaggggccaccactgcccatgacaattgctcagaggcagtccgctgctgtgcagcagcagcagcagcagtcgtccgccaacccaaacgccgctgggggtgccatgatggtagcgcagagtccgcttggcgccatgatgaactcggtgagcggggagggcattttttgcattggcacgagatactacgtatgaataaaattggcttaaaattttaccaattttattttcataattttagcagcagcagtcgatgaacaacgcaaacagcggaggaccaccgcaaatgcgcgggggtggcattgcgcagcagcagcaaatgctaggcgcggggggcggcgctggacagccgcaggacccggagaagcgcaagctgatccaacaacagttggtgctgctgctgcacgcacacaagtgtcagcagatcgaacgggtcggtggttacaaaatttatatattttttatcccttatttcctgggatttcatttttacaattgattattattttcccataaaatctctattttcagtctgaactgcgacaaaaccgtgcgccctgcacattgccctactgctcggtgatgaagggcgttttggagcatatggtcggctgttcggccggccggcagtgtcagtacgcgcactgcgcctcctcccggcaaatcattgcgcattggaagaactgtaacaaggacgactgtccggtgtgcaacatggtcaaacggtacaccaccggaacagcggctgaccggcgacaaggcatggcaaaacatcaagaaaattttaatttaacgcaataataaatttccgatttcttgttggtaaattgctcccatttagctgacattatgctgattgctgtcggttttccctctgtgactttacctcagcaaacaatccaaggcgcgattggccaacaggtcaatttaatgccagaaatttaaataattaagaatttttatgcgtggacttggcgcaatcaattatttccatgaaatttatgacattggctcttttccagcaaccttcaagttcggcaagtgcctgcagtggaccgtcctctgtcggcatgaacaacacttctaccggtccgtccgccgctgtcggccccacaagcgttggcagtgtcggcggtggtccgatgagttcgttcggctcaccgccgtcgacgagcagtgcggtgaacaatttgctggacgggtacacaccgaacacgttggttttttgatttttaaattatttttatatttatttttcgaatttccctaccttaggaatccctttctgtccatcaatccaccaaatcgggtcggccaaagtccccaccaaatgggcgttggcgccccctcgcaaatggtcactgttgtcggttttggcacttcgggtgacccattgccgccaccggagccgcccagccaaccgcgcgattggcacgcctccatcacacccgacttgcgcacagcggggggttggcaagctggtcaaggt

SEQ ID NO: 4872 - DNA, 1936 bp, Heterodera glycines
  unsure (1)..(1936): unsure at all n locations
cccccccccccccccctccttatcagatccacaaatggtgcacccaactcagcgagctgttcgtcgaggagatcaacccgttgatgcgtcggatgggctatgtttgcggccagaagttgtccttcactccgctcgtccagttctgcttcggcatcaccaaaaacaatgcggcctgtgtgatcgcccgggaccagccctacttcatgtacgagagcagttcaaccggttttggagtgacggtggcggagcgatacatttgtaagcgtttaattgcttttaaacctctttaattgcgttttgttgtctttctttagactgtgtgaagtgtttcgaggcgttgcccgatgagggcattaatctcaacgagaacacgccggacccaccaaagtaaggaaacaatgtttttcagtttaaattatttctaatgcccttttcccttcccaccccatcaacatcaagctggataccaaagccgatgttccagaagatgaaaaacgaccagatcgacatggagccgtttgagcaatgccaaatctgcgaccgaaaatggcaccgaatttgcgcacttcacagcaacaaaatccacccgggcggcttcgtctgcgagcagtgtcgggtcgagaaaaacagaacgcgacaggagaacaaattcaccgccaaaagtacgttttttggatcactttggcctatcaaatccgatggaatgatcgtttatcattcaaatttgcttccagaattgccgcactacaatctgagcaggcacattgaggatcgtgtgaacaacttcctccgccggaaactcaccgattctgaccccgaggtggaagtgatcattcgcgtgctgtgcagcgcggacaaagaggtggaggtgaagccggcgatgctcaaaaagttagtgaaatctaactaacattgctaaaattgctcgaattcaaatcattattttctcagatacgcctccgagggctacacggaccgctttccctaccgttccaaggcggtgttcgcatttgaggtggtcaaagaccctgatactggtgcctcgcacgaggtgtgcttcttcggcctgtacgtgcaggagtacggcaccaactgtcagcagccgaaccagcggagggtgtacatcgcctaccttgactctgtccacttcttccaaccgcggtcgctgcgtacgtcggtgtactacgaaatactgctcggctatttggacgtaagtttgcgtgcgattttatcccatggggatgctaatgaatttttcggtcttactcttcgaatttgctatgaaatcatgttactttacaataaaattattttagtatgccaagacattgggctacacaatggcccacatttgggcatgtccaccgtccgagggcgacgactacattttccactgccacccgccggagcagaagatcccaaagcccaaacggttgcaggactggtacaaaacgatgctgaacaacggacagatggagggcactgtgtacagctacaaggacatctacaaccaggcgagagatgacgggttggacacgccaatgaagctgccctattttgaaggtacagctacaaatttcgcaaaatttgaaaatgtttaaaaatatggccaaaactggcaatttttccggtgtttttccactcagtggttctattgacaggtgattattggcctcgcatcatcgacgaatgcatcatcggggcggagaaggaggaggagcaggaaaagcggatgaagcagcaccagcagttccaatcggcggaggagnggcggcggtatcggaagggcggcggttccgcggcaaccgcctcactgtccgacgacgacactttccaaacggacgacggctttccggtggtcaaacagaaacaacagccacaacaacagcaaaaggcgagcagcaacaagaagaagacaacctgaagaagtcggcgc

SEQ ID NO: 4873 - DNA, 1758 bp, Heterodera glycines
gggagcaggacaaaacgtcgccgccaaaattttttaaaattttatctaaaaaatttatcaaaaattttttaattacctagcctggttcggaaaaaattctagaaaaattcgaaaaaaaaatttattaaaaaattcaaggaaaaaaaaattatgttttttcgattttttcttagaaatcaacaattttagtttttattaacacttagattttcagaaaagctaaaataatttttaattttcttaaaattttgaaaaatttttaattttttttgctgcgacgtttcggcggcgacgttttggggtgtacccgtgtatgataagaaatggcccccatttcagctccctctcctcctttttaggactacgacctgtgcgaccagtgccgtgccaaaacagaccatccgcacgaaatggagaagctggtgcttggcgacgaccagaagtcggcggacagtgccgcgtccgcggcgtcgcgcaacgactcggtgaagaagtgcatcacttcgttggtgcacgcgtgcatatgccgagatgccaattgtcgtcggggcacgtgccacaagatgaagaaggttagttttgggtcaaatgggacccgtctattcatttgacaatgaccgacccttccctggccaatccgtacggggcaactattttattatgttttaatttccctcattttcaaggtcattcaacacaccaaacactgcaaaaggcggcaaacggtcggctccaactgcgcggtttgcaagcagctgattgccctgtgctgttaccacgccaagcattgcacgcaatcgaagtgccaagtgcgtcttgtgatgccaccaaggctatttatggggacaatttaaagaggccaccctcgttagcggcgtttcaatatgccccgtttcatttttaattaaatgacttttcattgccattttaatttctaaaaggttttgctaagttttatggaattaatttacaaaagtaaagcttttcataggttttcaaattttcttgaaaataaaaacaaaaatgttcgatattttttactaattgtaagtgtttatgttttaatcctaaatcaaatttcgcaggtgcccttctgtctgcaaatccgacaaaaactgcaggagcagaagcgttcacagaatcgccaggcggagcggatgatgcagcgacggatgatgaaactgcaaagtgtcggcgcggcggcgatgaacggcagcggcggtgccgccaccgtcacgtcccaaatgacgtcatcagtgcccactccgtcttccgtctcgtcggcgtccatgcaacagcaacaggtggtcgttttgggcgtgtcttttgcatgtcggatgggattttttttttgagtttttctacggctgttagctgaaacctcccaaaaaaatagctttattaaaaagttggcgatcctcaactcatccccgtctattttttattgcgtatttttcttcagcaacagtcgccgtgggcacagccgcctcagtcgccacgccaacagcaaattggcgcctgcggactacagcagcagcagcagcaaaccgtttggtgcgccgccgatgcaaatgtcgggcatgatgatgtcaccaaatgcaatgccaccgcagcagcagcgactgaacggtccgatgggcgcggcagcggcgtaccatcgtaagtttcacaattggctatggccctattttcagaataaaaatcattatcacagaaatgacacaacgatgggaggccctcatcagcagatgatcaact

SEQ ID NO: 4874 - DNA, 1921 bp, Heterodera glycines
  unsure (1)..(1921): unsure at all n locations
aaatcgctagaaaagggtttcaaaaatttgtttttaatttttttgcgagttaagcgccagtcactacaatttttgaccaatgggccgttcttcattagtttattgtagttttcttcaaaaatgccaaactgaatgccggttttttggtccataactctcgctaattgtgtccattggcagggccctgccggacttcaccgtgtgccgtccagcggagcgctgcagcagcagatgatgtcgcccaactcgcagcagcaacagcacatcactccgcctccgtatgttcgaagcgccgccgccgcgcaacagtcgcctctccaccaccagcagcagcagccgttcgttggtggaggcgttggagcagtgcaaccgccgggtcagcagcagcaacaccaagaacgctttggcaccgccggagcccaaccgcaacaagtggtacaacaacaccacaccaaacagcagcagcagcggttgtttcaacagcaacagcaaatcagaggcaaacaaaaataaaataaggaggagaagtccacgccaattggctcgactgggcaaaatcggcctgttttccattttttaccaaatgtccatgtaatttgagtttgatccgtaagtttagtgctgggccatcaagtgatgaacaataacgatatgcagctgctcatgaatcggttcaaggaggccagtcaacgggggagcaacgacgaggtggaaagatttttctcggacttgcgcaagacgccccacatgttcaacgcgtttttgaagctgaccaaaaaagtgacattttcctccctcttattctcttactcctagggcagttgtcgttttaatccccacatttgtgcccttttttgccattcccttcagcagggcgtctgtatatccggcgatccgtttcctcatcaacatcaaccgcaaggaggtgctgcaacacaaccgcagcaacagcactttgtgcagccgcagtcgtccttctaccagccgaaccaaccgcagcagaacggtggcaacattccatcgtcacagtttggcgggcccttccaacagcaaatgccgtcccacggcgccggaacggcgcaatggatgcaacccccgaaccaatcgcagcaacagtccgccgcctcccaacggaattcgtcctgacaaatgagcaataactgtttgatggatgaagcaaataaatgttttggcggatgcccaacgacgaaatgatctgattgtgagcagctgatttagttttgtttttttgtgtttcgaattatcccagctttttttgttcgcttcgaaccttaggcatcgtcattttttttgtgtgtgtgctttttgtgtactcactcttgaccatttctcatcatttttcatacatataccatttcactctatttcattttttaaattattattattattactattatattaaatcactcacttatattacagatgtcatttattcaatcgttcatttttcatttccaatttgttggtcgtaatcactcgttgtctctttctctctctcgaacaacgcttatattattattgttttacatatgttcatttaccacctattttttgttcgttttgtgcttctcattgtttctttcatttgtcacaatgtgatagtgttcggatagagtaaatattcctcttttattacgccgaaattaccaacaacaaacaaaataaataggcattaaaaattagttttacaaaagtgtgcccgccccccccctcccccttcctctgagaataataatggcttaaaagaccaactgctgctgtttggacaggttgaacttcttcttctgctggccttggtgtctcccccggttttatttgtgaatgttttgctgcaatttgatccattttacagaatcgttttgtctatatttttactccaaccaatgntatgcgacct

SEQ ID NO: 4875 - DNA, 867 bp, Heterodera glycines
ccaatacacacatataatataacatatgcattgtattcattcgtcccttatttcccaatttcgccatttgtttgtctgttcactgcccctttttctctgctgctcccccaatgtttttgcgttgcgattggccggaagccgtcgcgcgatctgtgaattttgaataatcaaccgcatcattatgaacagcgaattgatgtttaatttattttgtcttaataggaaacagttatcatttcttttgtaacaattaccgtatcccctccctccccaacggcaaattgtggtgggtactgtcgccgttggccacacaattttgtcattttgtttgcctttctcaagacgaatgctgtactttcttcgaaagggaaatagtgtggtccaaattagctgctgaagggtgattagcccgacttaattaggcaattaactaattggtgataattgcccttccctccccctttctccccctcttttgcgtgtgtctgctgctccctctccctcccccccccactcattttgctcacctcttccttttccgcctccattttttgtggtttgatcaatgatcagcccatccgttattcttcttctgatcacaaatatttctcctcccattttccttttattcaaattatttttatgcatatttcattattaaatttctccagattttattgtcacataacacacacaccaaccaacttcaaatgctaaatctcctccaaatacctgattatttgcttatttgatgccggccgtcgattggtcaattgatatgtgtttttatatacaatatgtattcattcattcatttctcaagaaagataaatttcatttcattttgaggaacacttgggcatggat

SEQ ID NO: 4876 - DNA, 6380 bp, Heterodera glycines
aacaacgagaggacgcgcaggagttggaggaccaacagatgcgacagcagtcgctgcacagcttcatcagtgcgtacaagccgcgccagcaatacaaacactcgctgaaaatggtcgcgcagacgaacggcggggcgaaagacgcgaaagcccagggcgacatccaagccatatgcgacgagcagaccgcgtactgcaaagtgctggtgaaggtggagcgaccaccaatcggcaatgagaaccaaaaatggatgctgaacgcacaagcgcacgttttgatgccggagaccgccgcatcagtggagcagctgcagacacagcccaagcagttgaagcagttcatcgcccaggcgaaagcccagtggggacagcagggacagcagacgcagcaggtgaacatccgcgtgcacggcgcccaggcgcacacgcagcaggtgcgggcggtgctacagcaacaacagggcagccaactgatcagcgcgcagcatttgcgcaacatgcaacgccgcagcgccttcctgaacaaattccaaatcgaggcaatttactcgctgaaagccaacgcccaaaatgcgatcaaccgcgtgttggagctgttcaaatcggcctacttctggaacaccaaatcccaactgatgagcggacagagtgcacagaaagacggaaaggtgacgaaggcattttaggcattttccaccgccgaattcacagatcgccgccacaattctaatcgacccggtgactcagaagagtgccaacattaccatccgaacgccggcgcaacagttgcgcatggagcagatcgaagtgccgtacaaagtgcgccctttcgctttgattcgccagcggagtgcgcaacagacgcattcgctggctcagctgttccaccaattcagcatcaaataccgcccccaatgcaccgttgacgggcgcaaagtgaacactttcggtgagtcagcgttttggtgccggacgacaaatgcaactttttttgcttaagacgacttgatctacacggcccccctctcctccaattgttactccgtcgtggccaaagactgcggctcagaccaaccccaatttgtggtgctgatgaagaaggtcgcgcagcagcagcagcagcagacgaacaaaagggcccaaaacgcggctaaggtaaacgaacccatccaaaaacaaaaaatgacagaaaatggggaggggacaaaagatacccaatgaatactgacaaacaattaaccatggctaacctgcttgaaggtgctgaaagtgatcacgccagagcagcaaatcgaatgccatccgaagacaaacgccgctggcattccaacgcaattgatttgcaaagtgaacggacaacaggtcaccggagatgagcagtgccaggacagttcttcatgtgtgcagttcaacaacaaacagcaggatgacgtgaccattcagacggaggcaatcgcagtgcgtttcaacggacgcaaggcgtggctgaaggtgtcccaggcatacaaaaacacccaatgcggactttgcggacactacgacgactcggacgaccagggggaggagctgcgcatggccaacggccagagaggtccttagcaaacccaaagcagcgactttgatgccaacccaaacaataacagattcattttttgctttcagcttccgacttggccgagttccaccgctcctacgctttggaagacgcggaagaatgcccacaacaggtgatgaacaacttctacagcgaacagcagcagcagaacagcgagcaggacacattctacgggcagttcaaccaatttgaggacgaagacgaagcggacgatgagcagcaacaacagtctgaaaaggacgaatggcagaatgagcaattcaatggccaattcgaggagcaaaacgatggccaagtcactgacggaggcaatccgttcgaaggaattttcaacgaccaacaacagcagcagaagtgttgctgctgctgtgacgacgacgaggacgaagagggcaccaacgaacagagccaatgccgacaaaactgccaaaacggcggggaatgcccagagaagtgcaacaaaaacgaccaaaagcaatgccgaaagtcatcgccaccacagccgcaacaacaacaaaattgcaaaggcagcgacgacgagcagtgcaaagggatttgcaacgacggagacgaagcatgtgccgagcagcagcagcagcagtggaaaggtgggcatgggaagggactgttggcctaatgctaatttgcatttgactgttttcagcagtttggccgattttgagaaccaaaaccccacgagcagaaccacgcggtgtgcttttccacccgcccggtcaaacactgcccgccggatgcctacccgtacaatccgatgaacggttatgagcagcagcagcagccgaagaccaagaaggtcagcttcgtgtgcatggagcgggcggagccggagacgcgtcggctgttgcgctcgttgcgacgcggacagcgcgtggtggacgtaaacgcacgcggcgcctccttcacggagaatgtgagcgagccgcatcagtgctggcgcagacgctactgatggaagaacggacgatttggtggatgacagaggagtgaccccccaacggagtagaaaagcacaaagcgtagaccaacccaaacacaaaacaataatcaccctctgctgatcaatgccattactcaaatgatcagcaccacaactccgccatttcctataacaaattgtatttttgtaatagtttagaataaaaaatttattaataatccaattatagtgtaacaatgctaattagcagaaatgctgtgaaaatcacagtagtggaggacctcttagcaatagcaaataaacaaacttttcctcctaaactgcagactttggtaataattttaataataaaatatgatcggctaattaattggctgcattgattgcccgtgttaaactgccggtgcctgtcgttgctcaattccttggccattgtccactgtgcctgcttcggctcagctggtccagtccgtttggcattgcccctcccaattccgccgccattccccccgccgttggcatttcgccgttgttcgcctcctcctccagggcccattcctcgcgcagttcgctcgacacactggcgaatctgtggcaattgttgcttgtccccaaggggtgttttgctttccctatttatttattgtacaatgagtcccaattccacggaatgttttcgtccgttgtctcatcctcggggcacagaaagcgcgagaggaaattcacatctgttgaccagagaaaacaattattgctgctgctgtgctgctcccctctctcttctaccgatttcgcccccaaattcgcctctttgtcctccgccgtctcttttggcgaagttgtggtccgatgcgtagctaatgccggacagacggcgcaaattgatttggggagcgatggccgcctgttcactgagggcaatctgcagcgattaatcaattaattgcttgcagaaggacaattagcccaataattagtccgatacattaaaattgtttcccggtgctgtcaaattttgttgctgttcaccgtccgccgattgtccgtacgtcgcctccgtttgcagcggtggtcgccgacccgggaagccaaaaaatagcatgaactattatatcactcagaagcctctcgttattgcctgaaaatggccgagtagcggtggaagagacggcgccggtgctttgggagtttccgttgccaattgcgctgcctctgacatttcaatttctgatcatttattttcattctgatcaatcaatgcctgccaatcgctgctccctgctgctgattcgttctgctgctgaccattgcccccttctgctgttgatttgcgattggacttcgcccggtgggtgcgagacgcggcggctgctgaggggggagaggggacgcgccatccgtcgaactcggcatggtttgactctgcgtcggtgccggcgcgttgcggtcggactgcgcttgcgaacgtcggaaaagacctttcgccgttcagatgcgttaccacttataatctcatggaaaacaaacgactcactggacaatggcctttttagcgtttctttgagttcgcttgttttttgttctgccgatgattcggcacctccgccgacccctttaaaaatcgcactcatcaaccgacttttcggccgttcttcgcccgccgtaatccgatcgcgttccttcacacgaacattcaaatccgaatcctctaaataaaaatatttttgtcttcatctcccattgacactgatcagaaaccctcaaaagtttgatcgggcggttcgagttgtttttgctgcggacgtccaaatcggcccacacttttggaccgactgacggggcgtgccaaatcatcggccatttagattaaagaaataaaatcaaaatttgctcgtcgtttttatgtttattcattgtcgattcttaaaatcatttctgctgctgatggtttccattggttaccattttccattgctacaaaaattgttgcctaattcagaaattagaatttactgatggcttcgaattcggcttctatgaacgaccaacagcccatcccctctttcatgaccaattttcctgtcagtggccaacaaaaagcggcacttcaattcgccttttacaacactttactcttttcgctggtaaatgctattgtttctgtctcaagaaggtcagaaatgccaacaaattcagctcggaatttgtttggccagcatttttgcggtctatcgacttttgtacttatttctgatgccaatgttatgggctttgttagtcggcactgtgcttttcccgctcaaacgaatgatcagcgaaggcttaaaaggtaaaatatacctaattgagtattaaattcaatccaattttaggttggctcgatcgtttggatggtgaaaatcggccccttttggttggcctggcatttcttcccgttcaaatcactttgcaattttctttcgccgtttatgagacggcactgaggttgtatttttgctgactttctcccatttcaattgtcttcagtttcaccggcctttgccttggcctcggttatttcgctctgaaagtcctttgccattacggcgctttctcctctttgctccttttgatcggtcgaatttacggtttcgccgattctctcatcgaaatttccactcggaattgggtcgttttccttttaattgaacttttttttattcctttttaggtttttctgctgattttctgttattctttggggcttggcggttggatttatcttcacgaaattggccaaattaacaagaaattcgcgcgtgtcctttccctccccatttggtttttcattcatttttctttcatttcccttttttaggttttttctgttggcttacctttccgatttcttcggtttttttcgtgttttcattttcattctctgctgctctcttctcgtgttgatttctgccggattaattggaacaaatgccgaaaatgaagacgaaaatcaacagaaaaagcaccaaaatgaagtggggaaaattatggattttggagggattctgagaaaagacaaatgcacggagaaataaatataaattagcatgttaaaacaggaagagaagaatgacgaagctgacaccgaaactgagcaaagtcagcgggaaaatggcaatggaacgaatgttggcactgcgctgggcggcgaagcgcggcttgaccaggtgaagcggtggatttcattaaattggtttgatttgaatttgttatcccccaaaaaggctttctcctccgacgtccatttgcgtgtcattggcggactgtgcgctttgctttgggtggttaaccacgaccttttgctgtttttcttcgtcattattccttttgccattgcctttgccgttcacttgggtaattttttaatttttgtcaaaatttcttcgcatttttaggtgcacaaattggcctttttgcgttcattttgcaacatttgacgcaatgcaaagaacaaattgtgcataagactattaaatttgtgcatgttattgtggcggggcccctgcgaaaatttgtccatttgcttttcaccagcgaccgaatggtcatttcttaagtttttctagcagaacggttgattgattcaattttccaattttttactcaatggttttcagtttacaaattcttttttcatttttgtttttccatttttcagtttgtcattggcttccgcgaccgcgtcgatttgctttcttcgctcattgtcatggccattttggccgtcggatgtctctttgcgttgcttttcaccctttttcaacttca

SEQ ID NO: 4877 - DNA, 1351 bp, Heterodera glycines
  unsure (1)..(1351): unsure at all n locations
tttattatgcttactctatttgcatttgctgttttatggcaataaattcatctcattattacaattaaaaatattttttcgaattgtttttgtttgggngtttcttccactgcgaaaaaatcactcccttccccccctcatcagtctcggctttatttagtgtaaataatggcgttttcccagacggcccatccatcttttccgccccaggccatcggccaagcgacgatcgatcggccgacccggcggcgattgcttttgcttcggctttcgctcctttcccccccccccggcgccttccaattccgacgagagatttcttcactcaatgtccaattcatctgcataagtcatttttgaaatgaatgcccaattaaagccaatttcggcttttcgttggctttttttgtgctttcccccattaattacccccaattagggattgatttccatgtcccttctctttggtccccctctttttcttcactgttgccttttccttctccgttccgccgtttccgtccccgcggtgcccaaatgttcgcagcgattgttcgaagcaaagagcgacccgtcgccgggctctaacggctttagcatcgaaattcgagaagcgcccccggggatggacggggacagcgacgaattgcaggtgaaaaacgcaacaaatatttttggcattggcaaacggaacgccaacgaatgccaatcattcgaccattccgcaggcaatcaaatggaatggcacaagtgaacagcccgagggatatgtgccgggtcgaagttacgtggtcactgtgcgcggatggtcggttggatgcaattaattcattaattaatgtttttatttgagatggcacagcgaaaaaataagtgaattttcaggcgcacccaattcatcgtgcagacttttcgcggctttggcattaccgcactttttgaacagaatggaaaagctggagggaaatttgacattaagaaggtgaaatatctaattaatattaattaatttgatcagtttttgcttggatgtgtaccgtattaatccgtttttaattccaacatacggtatcatacggtattattctgttcccattcgactgctgttactcattgtttaccgtgatgttcttctttcattttcttttcagaaccgtcggacgcgtggtgagtcgcgagttgcgcccaattgtcgttccgccggtgtctcccacacgaatttgaggcccaaaaccgaagtcagcgttctgtggcgcgcgccggagagcggcgccggcggttgtgtgctcttccgcgcgaccgtaatccaatcacggcacatttggtattggaacgaaaacgaaagacaaag

SEQ ID NO: 4878 - DNA, 5250 bp, Heterodera glycines
ctttaatcgactttccgcccatggacaccgaaagttcccacatgactcgtcgaactgttctccaacagctcgcctccgtttttgaccctctcggactagtgtgcccggcacttcacgatgccaaaatgtttttccaatcactttgggaaaccaagcttgactgggatgatcctcttccgactgacaaagtgcaagaatggaacacaattgccacgacttggaaccagcaaaaggtccgtgtcccgcgccgagtcaccccgttggaagtggcctctcatcagctacatgcctttgtcgatgcaagtaaagatgcctatggagcatgcatcttcattcgggcacaacatggagtcgcgatcacggcccatctcatttttgccaagagccgagtgaagccaaaggggtcaaatctcactattccgcgcatggagctcatggggatgctgattggcattcggatgcttcaatttgccgaaaaacagctcggacttgccattcgccacaaattcatttggtgtgactccaaaccagtccttggttgggtgtcatcttctgagcagcaacctcgttttgtggagaatcggctaaaggaaatccgtgccgtcgaccaagttcgctttcgctacatatcgacagagcaaaacccagccgatgtcgcctcacgaggatgtactgtgcttgaactcacctcccatccactctggtggaacggcccaagttggcttatccatcccgaggatcgttggcccatcaccatagaagtcaagcctgccaatgatgacgtccaaaacattgctgagatcgctgccatcgtacccattgtccaaaaggacgaagcatggatttgcgccgacagattcagcgactggacttgccttcggaacgtggtggtgcttgtcctccgtgcccttcgtcgatggctcacaatgtctagcaagcccattatcggattgtgctcccgtgtttcggcctgtggaccaatccaagcaagcgattttcaactcgccgagcgtcttctgatcgaacttgcccaagttgactgtaccgatttggccaagcaaaggcccgaggtacgccttcgcactgacgaacagggattgatccgccttgagaccagactcggcaactgtacagcaagtgatgactggaaaagcccaattctgcttccggaccagtcaccaatcactctgctgataattcgagatcgtcatgagaaggtgcgacactcaggagtagaagccacgctcacttcattcctggagaaattttggtgccctaaagccaggggcacagtgaccagagaggtcaaaaaatgccttcgttgccgacgaatccaaggcccggcatttgctctgccagccatgccatccctgcccactgatcgtgttgtgcgatctgcaccctttgagcatgtcggcattgactacttgggccctacaatgacgagaatcgtgaccggtccaaccaccgcggcacataaggcctggatcgtgctgataacctgcctggctactcgtgccgtctatcttgaaccggtcctggacctaacagcctcgtcatttcttctcattctgcgccgcttcacgtgccgacgaggcgtgccaactcggatccttaccgacaacggaactcaattcgttctggcatccaaagtttctgcggctctcgaagccggcagagtgccaacttcagcactggaccgatttctggcacgagaggcaatccattggcgttttatccctcagttgtcaccttggcaagggggagtctacgaaagactcgttgccttggtcaagagctgcttcaaacgagagcttggccgcgtaatgctctcatgggaagagctggtcacatacacagccgaagttgaagcagtactcaaccaaaggccgctctgtcatgtctctgaagagcctgacggaatcctgccactccggccaattgacttcctccttccaagagcaaaacttggcattgcgttcaatgccgagactgaaaatgaagagttccgaatctcttcaaccaatcaacgagatacgctcatccaacgttggcattccgtgtcatcatcaatcgaccatttctggaatcgctggcagaaggaatacctgctgatgcttcgccagagattgcagtggaagttcaagaaacagaggaaccaaattgcgcgagagcccacggaaggagaagttgtgctaatctctgaagaaaaacttcctcgcaactgttggccgatgggacgaattgtcgagttacaacgctcacacggggagattcgaaacgccaaaattcgattggccacaggaaaagtgctaagccggcccctaaatcgtctttatcccttggaagtggcttcctctgccggacaagatgagagccaccagcagctgacaaacccgccgcttgaggaacatcacaaccgaacccaaacagcggactcaactccaatttgccaactgcgtgcccggcgcaattcacctggcccgactcattctatggtcactcgctcaaaaaccaaagcactggcctccgttctgtccattctgatgtgcctatttctgattggcgcttcccaaaccaacgccagtagcacgaccaagccaaagcgtgggaaaggacttccaattcgttgccgtggatgcgaactgacctgcacaaaaaccggcgttgacatttcaataccgaatgggattgtcaaattcttgctatgttgtgccggtggaactcagtgcatcactcaatcaggcgttcggaaatcctttcatcgtttgcccaaggaacatcttcttttcgactacgattgcgaagcaatgtactggacgaaacggggcaacaaaagaatcgggagcgtccaatgtccaggcagagatgcgtgcgagctcatcgattgttgggtgtgcctcgaacgactggcaaatcctgattgtcgtccagatgtgaccttcggactcattggtggagcgagcttcttcactttcctcttccttttctggattctgccactgatgtgccacgtcaccatgttttggatcctacagcatcttttcaccctgctcgttcgcttattgtgttgtttttggccaagccaaaatgcaccgcagagagaagaatcccctctccttgccttccaaagtctgcctactccgcgcaggcgccaaatgagtcgcagtcgttttcgtccttttccaaaacttcaaacgacgctcctgttattgaccctatgtgcctttacttcatgtgccagggcacaagttgtctcaatcactgcctctgctgagaaatgccaaaggtccgactttggctcggtgtgccatctcgagagctcgacaacagttactcttctcccatcgggtctgccggtacgtctactccttcgacatcccgacgagagagtccttggcacgcttgaaatcagcatgcgctcactgactttgcattgcctgccaaaatctgagcaatggcttcggtcctatcacattgagacagtttcggtaaaacggtgcccgagtcgtggaaattgtacacgcgagttctgcgatgaagtcaacaacggaaggaagacagaagttcatgagctgagcgaatggaccaagcatcccggattcaacagatgctcagcatcttgctccttttggtggtgcgggtgtttaaatgccggtgccagctgcatcttctaccgtccacatgccattgctaactcgccaattgtctacgagcaaatctcctgtcctacatgggaataccgcttgcgcacttcactcaaactgtcggtcaacgcaaacttcacgaaagagccgtccgtgtcgctcacacccggcattactttccgttggaaggatttgagcatcacacctattgcctcttcggttcctccggccccaatcatggcaaacaagttcctctcggatggcaataacatggcaatcagtgatgaaatccaaagtgaccttcaatgccccagtcgtgccaatgccaaacgcctcaactgcacactcagatggggctcatgtccgatgtgcctgcctgaccacgattcagcaaaaatcaactgccaatgccgagatgtcaaactcgaaccagcactcgccgatcctgagaagcgcctaccaattcagctcaaaaacttgcttctccggaacgaaaggcgggacatttttgccgaaatcacctacgcgccgattcagttgtccattcaattcgaggggcttcgaatcgctacggaagaagacctcacaaaatgccatgccatgtccaagggtcttttcgggtgctattcatgccacactggagctcatctccatttgcaatgccacaccgacttcggttcagcacttggctacgttcgctgttcggatggcacagaattcacagccctctgccacaaaacaccagaagttttgaatgtcagcctgtcattcaaccgtgccgaggtcgacatcaattgtaccattgaatgcagtggaggacggaacccattcgtgattaatggtcatctccgctatgtgccaaaacacttccaagcacctaatggaggaagctcatttgcctcgaaggccaaacccagcaactcatgcctaatttggtgcccagattggaacttcgacttttccgatgtcttttggtatttctttggcctccaaaatgctctacgaactgttggcatcatcactctggcccttttcatcgtctatgtccttttgcgttgcaaccctgcccttcgatcttggagagccataagccgagtcgtcctttgttccttgctctttggcctacgactgattcttctgcagcgggagggctgagccatctactcagcattcaaaattcagcaccaaagctgcagtttgaaggccatttttcggtgtcaagacgtgtgactgagactctcgacatttttgatgcacaaatcgggaccattcatctcgccaaaaaccaaaaatcgccaatggacttcgctataaaagccgtctctgtgccagtccattcaccattcctacaaattcccgaatcggccttccacattcaaacccaagcccaattccctccatttccaatggccacactgctatctttcctcgccaacacaatgaacatcgaggtggaacgctttggtcttgccgtgaccacatcgctgagccgttggaatgaggcccgaacaatcgttgaaggactgcatgaacgcggctacgaactcaagacgaggcatctgcacccacgtgagcgaaatgtgcgacttcacggatctgagct

SEQ ID NO: 4879 - DNA, 1185 bp, Heterodera glycines
gcaggtcgctacaacaacaaatcataacacaaaaatagaagagcatagtcacggaagtaacaatcaaataaatggatgtaaagaacaaataatatttatggtagatataaatttggtcacccgccgaggtcggatggtaaatgttttgagtttgaattgcaggaagaaacataatgatggcagtgcccaacgcgaacagtgctttacagaaattcacaaagcatttagcttggatttgggaggcggaggtggtggcgccggtgccctcgccgcgctccattcgtccggcattgtgccagaagatgttgtagttgcgccctggggcgcgctttcctcttcggccgccgccgctgtttttttgtgccatttttgttgttgttgttgttgttgttgttgctgttgcgttcatcagtgttggaaagaataatttttgctaaactatggtaagagattggcataaaaattcaccctgccgtatgggtggtctagaagatcccctgacagatgtagaacataaaaggtaactcgcccggtgggactcgaacccacgactccagcaatccgtgccgtgctctatctaaccaacagagctacgtaggtcctttatcccactttctcccgcgctccgtaccttttggcatcacacagacgcgtaccagaaaaaaaaattttgggtcgggcacccgaagagcagtgtaattttccaaatttttggcgccgtgtgaaaaaaacggtaattttccctaagattagggctctgaccggctctagtttcttgttgtttaaataatttgaaaaaaaaagttcaacgtagattttttagaaggtttctaatatagcttaccattataaatgtgcacagctttgttcactattttggttaaacgattggaaaatgtgtcaacattttgtttgtttccgtcgcttagaattccattttttgcaattttttccttgattgaattttcgtcaatttttggcatcacaatttgatgttgttcaacttttgctgtttcaattgcttcttcaaattgtttaccactgtttatttcgttacaaaaatttttgagcaaattttgctgtttgtcatccggtttaaattcaaatttggcattacacaaaatgccaaacgattggttcaacaatttgggtacttccgggttttgccacccccccccccccctg

SEQ ID NO: 4880 - DNA, 3916 bp, Heterodera glycines
  unsure (1)..(3916): unsure at all n locations
tctcttcacacatttgcaagaagtattcacgtcctcaattatataaatgttttttatttctattcttaaaacttctgagttcttaaatattgtattaagttaattcctaatgatcgcttcatcaattatgacatgagccagagttcgttctcagtatctgtagtaaatttttaaaatattttcaaattcactttatttctaaatagtaattttctttgtgtataatcgttgaattaactcataaacaatttataatttgataagtgttgtttaaatgtcttgataatattaattttatttaattatattaataataaataattttttatttgattcatgagctgttatgtttttaatctcattgcgtttaatacattttttatttggtttaaaaatattaaattattataattcaaataaaaaaattaattcattttattgatttaaatgaaaaaattgcatgtccttttctggagaaatcaaaaaaatttccttcataatagttagcagcaattaatattcaataacttatcttctaaacattttttgtttaagtaagacagaagaaattttattttcttttggaaattattttgctttctttttatccattaaattatattaacttgctaacaatacagctattgttatgtaagaaattaactccatatttttaatatgcaatatgttgcctaatattcttgttctttggactcagaaatggagtcccacaatcagtgacgactatttttggtaaaccgaataagcacatgaatttatcaacaaagcaactgtgacggtggttgcagattgttcctgcaatataatggctgttgtgtctttgtccgagtgaataagaccaacaaatatttatttacgaagagacaataataataaataataaaaatggcgaatggtcggtggagagaataatgaataaaaataataaattgaagacaggagaagaagtgcacatgngggaagagtccacgcctttaaatagacaatgtgagggggaaggaacggtcgagagaatggacaaatgtaaagatcaataatcgataattgaacatgagcaaagtacatttgctttttctcaaacacctcccttttcgagattgaaacatcctcgtttcaacctggcgtgaagcgtttgaccggcttcggcacgcgctgggaacgtcggacgccaattgggcttttagccttttgcctagcctgatcaacaacaggtggagttcgctgatcgatggctgcgtgttggcgtggcggtgtcctttgatttggctcaatggccatttgttcctgaatggggggttcccaatttgaattgtcctcaaaatccaatcggcaccgaagctggttggcatgccgatggacaattcggccgagagttgggacgtggacacggtatgttggcgaattgttgagcctttttacaattgtgccctgtagccaatggctttttccaaggcgataattcaagagcaggacggaatccgttgggaggaactcaatagcttttgtgccattgttccgatcgaattgctgtgccattttggttgaatagtccttttggtgctgtttgaacttacatttttcaaatttctccgactgatcaatttgtccttttgggtggacgagtgccaatttggtgcgcagtttccgtccaaggaacaattgatctggcgaatatccggttgatctgtaggagagcagcactttttcaaggctgttcttctcgcctttgcacttcgtcatcgcccttttgaaagtgtcaacgaaacgttcgacttgtccgttggattgaggatggaatggcggcgtaaaagtgtgctttattccgaactccttacagagtgccgcaaattctgacgaatgaaattgagttccgttatccgaaacaatttcttcaggaataccgagtcggtggatgattgaacggagtgtgaagacggttgccgcggccgtcattgaattcatttggtagacctccggccatttggagaatgagtccaccaaaatgaaatagacgtgaccgtcgtagcgccggacaaatagtgaacgcgtttcggcatataatcctttcagcttggtgatcgagtccacccaagtgactttgtcgggctgggtcggactgatgctgtcgcggtatttgccgtactcctcgtcgccgagtttgccgaggagtagtctgacttttgtcgactcggggaggtccttaccatcttcctcaatcaaaactccaaaccgtttgaaccactgttcgaaagtgtttccggtttcggcgtcgtaattgaattttgaaattcggccgtcgatggaacttgccaaatttgcatggttcagactcgctgacgcggcgttttgcggtgtttggcccattagctgttggatcgcatccgattgcacacgcatggcctcaaggagttgcttaagttggtccgcgctcatgccgaaatgtttgccggcgccgaatttgagaatccacagttgaaaaaccgcttattgcggaaccgcaacctttcttaggtctgttggtttttcggcgaattaactgcaatatatgcagacctcacccgcctagggactattggttttgttgatggcgaaaaactgcagtatttgcagacctcacccgcctagggactattggttttgtggtgtgcagtccgggtgtcttcttgttggttgaagacgactgctgactgcgccaaatttgttgtgtctttgtccgagtgaataagaccaacaaatatttatttacgaagagacaataataataaataataaaaatggcgaatggtcggtggagagaataatgaataaaaataaaaattgaagacaggagaagaagtgaacattggggaagagtccagcctttaaatagatgtgagggggaaggaacggacgagagaatggacaaatgtaaagatcaataatcgataattgaacatgagcaaagtacatttgctttttctccaacaagtttcgtttttttgaacattttctcataactttcttgaaacttaatgaaattttgtgaaattttccaggttaagcctagaaataagcactaataacgcgaaaagtagcttaacaacaacagaaattaacatgtttttcgtgccactgggagctcaggaaaaaaggcaaaaacctaaaaatcgtagccttatgatgtgcttattttggtaaactttcgaaggtaccacccctgtttctttcctcattttcatttccattatttatattgttatttttgagcagtgaaatcctgaatacagttacatgcccagtactgaattattcgaatcacccgggattaatcctccaatagatttttatatactattttttcgtgctggcgcgtttcttaaaaactgccagcgcgtttcttaaaactgccaaccatgcgcgtttcttaaaactgccaaccatgcgcgtttcttaaaactgccaaccatgcgcgtttcttaaaactgccaaccatgcgcgtttcttaaaactgccaaccatgcgcgtttcttaaaactgccagcgcatttcttaaacctgccaggcgtttcttaaaactgccaaaaaagatgctaacatattatttcctattttttaatttaaatataaataaataatttatgttttcgtggtaatcgataatataaattaaattttttgtttaagttaatacgtaacagccgtggctttcatatgttagttaaaattatggaaaattgttgggcagccttaaattatagacaactacaaatatatttgccaacattaattatatatttataaaatcgaaaacgtatatacatccattataaaaaatatattaacaatttttttttaaaatgaaaataaaaatatatagttgtaatattatattatgttcttgcttaaaatttataaa

SEQ ID NO: 4881 - DNA, 1660 bp, Heterodera glycines
cttatataataaagttgattgtttgtatgtgtcactgtttgaattagtgtggcgttttgtttgagttttgcgttaaaaatgaatttgaaaaaagtagagcgagggaaaggtgggaaaatagtgcactgtctgattgtctgtctacgcgggcagcggcgggtgagaggggcatacagagaacagacgcgtgctactgtgcagcagcagtctgttggacgcgtgcgtgtgtgtgggagagggaaggagtgggaaaaaaaagagagtaaattgcaatggaaaagaaaagagagtaaaagaaaggaaagggagagataatgagaaatttctctcgcatcccttccttatttataacccatcttttattatataaaataattaataaaataatgagcacatttttgtttttgtttgagtggaaaatccggtatatgaaggttctgtttttgtgtgtaagaaaaaatttatggtttgtttatcattattttttttgtctaaattttgtttttgttaattgatttgattttgatgtgaaagcttttgttttgcttatgtaaacgataatggagaattgtttggttaaaaaaatgcattagaattcgcttgaatgaaaaaggtttgttacttaaaaacgttttttgtacttttccttgcttataatatgaaaagaatctgatttggtttttgatatttgttttgaataaaaagcatgttatgatagtaataaaaaatgaaagaaaaagcctttgatggatagaaaaagcaatataaatgctaatctcatgttttgcctgtgctcgagtggaatatttatatgcaattgggatattgacgtgccacttgcgggatcaaatttaggtggaaagttttaaacaggtcagttttaatttgaatttatggggtgggggcaataattatacaccatagtgttttgatttattatgggttatatttcaatttctggattccttttaaatagttctgtattccgttgctgaggttgagttccggtgattgaaatgtcggagaactgagtcccggtaattgtgttgatgaaggattgatgagattgagtccagtgatttgaattcgggagaatggattgagtcccagtgattgaaatgatggagggttgagtcccgttgaatggaatgttggtgggttgagtcccagtgattgaaatgctggagggttgagtcccagtgattgaatgctggagggttgagtcctgttgattggaatgttggtggattgagtcccagtgattgaaatgctggagggttgagtcccagtgattgaaacgcaggagaatagagtctcagtgattgaaatgcagaagaattgagtcccagtgattggaatgttggtgggttgagtcccactgattggaatgttggtgggttgagtcccagtgattaaatgatggtggattagcgcagaaaattgtgggggggccgaaggccccagtacgaggccgcgaagcggccgagccctccccaactgttcaacacccaaggcacacaaaaagttaaattgaaattctggtggattgagtcccggcgattgaaatgttggatgttaaggtcccactgattggaatgttggtgggttgagtcctattgtagagaaatgctggagggttgagtcccagatgattggaatg

SEQ ID NO: 4882 - DNA, 874 bp, Heterodera glycines
agggttgagtcccggtaattgaaatttgggtggattgagtcccgttgattggaatgttggtgggttgagtcccagcgattggaaagtctgatatttgagtcccggcgattgaaatgttggagggttgagtcccggtaattgaaattttggtggattgagtcccgttgattggaatgttggtgggttgagtcccagtgattgaaatactggtggattgagtcccgttgattggaatgttggtggattgagtcccagtgattgaaatgctggtggattgagtcccgttgaagttggtgggttgagtcccagtgtttagaatgccggagatttgagtccattgtttggaatgccggagatttgagtcccagtgattgaaatgcagaagaattgagtcccagtgattgaatgctggtgggttgagtcccattgattggaatgttggtgggttgagtcccagtgattgaaatgcagaagaattgagtcccagtgattgaaatgctggtgggttgagtcccactgattggaatgttggtgggttgagtcctgttgattggaatgttggtgggttgagtcccactgattgtaatgttggtgggttgagtcctgttgattggaatgttggtggattgagtcccactgattggaatgttggtgggttgagtcccagtgattgaaatgcagaagaattgagtcccattgattggaatgttggtgggttgagtcccagtgattgaaatgctggtgggttgagtcccactgattggaatgttggtgggttgagtcctgttgattggaatgttggtgggttgagtcctgttgattggaatgttggtgggttgagtcccagtgattgaaatgcagaagaattgagtcc

SEQ ID NO: 4883 - DNA, 3274 bp, Heterodera glycines
ctgactccgtgcattttccatgcctctaagtttggtcagcggggccgaaattctcaatcattccgtttccgtcagtgtcccaatgttccaacccttcagccaccataatttggacttgcggccacacctcaatgtattcatcgtcacttcatttgttcgccaaaaatggaattgcgagacttgcgcaaggaattggcgatctctcccgaggactgtgcaaaaggttcgataggaacaaagcacgaacttaagattcaaatccttccattcgctggtgtcgtgcattcggtagacatttgttttaagccatggctcttccgctgtaaaagagcaattaattaatggggcaattgggtgggggagtgcctgggttgccaaggtcatgcggcactctgttcttcgttttcaccggcgaatggactccactcatgtgatatttcactgttttggggtcgaaatggcagatctgatcatcttaaatgaggacatccgcgaagaaaaagcggactcactgaagtccgtctgaagagagtgttccaattgggggaacaaatggccaagcgcaaacgaagcgtaaaagtgaacgtcgtaagtgttgagcatgcgatattcccaagctgaagaagagtttgtgcggaatgcgctcgccctttgcccttcccttctcacattccaaatagccaaagcgaccaaaacgacggaaatgggcggccgagtaatcggacagttgcgtttcctgctgacgccattcggaatcgtaacacatccaaacggtgccccccgcggtgagaaagtacagctcgttgaacagcgcggatttgaaccaattgggaagggcactgacaatgggcgaccaatcaaattggtcggataaaataaatacgaatggaaatgctcacggattgctcagaattgggccctgccatttgtcaatctccgcctcccattggacgtaattggcgagagcgtattcacacaatgcgacagcgccgctttgctggtcggattgatcgaaaaattgggaataccatctgagaaaagggacaaaataaagcagacatttaacaaaaaataaatggcaaagtgttgcttcgcagtttcagtctctgagatcaaagaccaatgaaaggaatcgctttgtttcgcattcgtcccttcagcaactcgccatcggagcattgggacgagttgagtacacaattgaatgcaattcaacccagaaacccttttcttcccaactcatttcgtaccttcgaaaagtgcgtttgccaccgccaaattgaacaaagggccttaaaaatgaaaagcaaattaatccacaaattcttcgccctttcccaaacatatgccaaatgagtgcaaatgccatctcctggtcacaatcagtcgcactgtttgctgccactttcgtacgctgtgacaaggcaactccgaaagcgccgttcttttttggctgatctactaaaattaaaaaagtacacactttgaaaattgtgaattgataaaccaatttcagcgagtgtttctccggatgccattgaattccacaagcaaaagccatccccggagggatcgaaagagcgagtggcggacatcgccgtagttggacgagggagggcacccaaggcgaaggtgcagggcattccgaacaccgactggtggagaaggacaccttccgctgacattggcaaatggcatttacgaagggggaagccaatggaatttgagccgacctttgctcgttttgaagagatttgaattgcattccgtggcgggtgtgacgtcattgacgtcaattgcattacgaaaggtaaaagtgacggaaacattcagcggataatcggagttattgacaatgcgaaaagtgaacaaagtgcaaggcaacgaggaattctgaaggaaaagctgaaacgatgaagggaaaagcgaagggaaacgcgccatgtaatcaccgggcaaaacgggcgaaagttgacgcatcaaaacgaccactttttgttcgggcaattcgaatttcatccacgcgcgcggataaagagcactggaaaaaagaaaacaaaatgaattttgcgcattagggaaggcaaatttaaaattcaaaattaacgctaattgaccgataagtgacatcatttggagaaagggaaaactcccaggaagacaactcatcagaggcagcaaaagaagggaccgcactgagcgcagtctgacggatgagagagccatcggcggaagacaaagtgaggacgaattggtcagcctaacaaagggacgacaaagcgaaggtcagacagtcacagtctttgtttgccttaatcggctcgttgtgttgctggacgaggccaggcctcaagttgaagcgacaaaaggcgccacgaaagtcccgactgattgagcccgaaccaatcgcaccgcaggggagcgcggtgtaagggaaatgacggaaagggcggaaaatatcgatgaaaagacgctcccgactgaaaacattgcgaagccaaaagaacgcgtaacgacacaaaaaagggatcagttggagaacctaagggagaagaaaacgcattcccaacggatattaataaaaaaaagccaattcttatttttaacacctgagaaaattttggacgatcgaacggcgtccgctcctccgccgcctcactgtccgcccgtacaaaccatccgaaacgcccacccaatgcgccaaaatcgaactcctcttcctccattccattctccattcgagacttagggcgttaagccaaaagaacttttgaaggcttgttagtgttaccaactcttattgtgattctttgaaattatatgtaattaataccagtcgaaattgactgttagattatttgcaattatagggaaaagtaaacactcatttcctcctttaaacaatgaactaagttacaaagaatgatttacattgttactataaattaattaaaagtggactaatgacagaatgaacaaatggaatgtcacagatcattagagtgggaagggactgttgttaggaggcgaggcaggcgatgctcgtcacttcagcgtcaattgtattcaaggcacccgccaaccgataactgattctgagtcgtagacgaggctaaagaaaaaccggtcaaagtacttacgcaaaaaattaaacaaataaatgctaccgctttcgaatttgccagccgccgcaaattcgccttttggcttatcgtggacaaagcattggcttaaaggctcgtcgaattcgccggaagcaattcaatttgataag

SEQ ID NO: 4884 - DNA, 1170 bp, Heterodera glycines
aaaagaaaacaaaaagaattttgcgcattagggaaggcaaatttaaaattcaaaataacgctattgaccgataagtgacatcattggagaaagggaaaactcccaggaagacaactcatcagaggcagcaaaagaagggaccgcactgagcgcagtctgacggatgagagagccatcggcggaagacaaagtgaggacgaattggtcagcctaacaaagggacgacaaagcgaaggtcagacagtcacagtctttgtttgccttaatcggctcgttgtgttgctggacgaggccaggcctcaagttgaagcgacaaaaggcgccacgaaagtcccgactgattgagcccgaaccaatcgcaccgcaggggagcgcggtgtaagggaaatgacggaaagggcggaaaatatcgatgaaaagacgctcccgactgaaaacattgcgaagccaaaagaacgcgtaacgacacaaaaaagggatcagttggagaacctaagggagaagaaaacgcattcccaacggatattaataaaaaaagccaattcttatttttaacacctgagaaaattttggacgatcgaacggcgtccgctcctccgccgcctcactgtccgcccgtacaaaccatccgaaacgcccacccaatgcgccaaaatcgaactcctcttcctccattccattctccattcgagacttagggcgttaagccagaagaacttttgaaggcttgttagtgttaccaactcttattgtgattctttgaaattatatgtaattaataccagtcgacaatgactgttagattatttgcaattatagggaaaagtaaacaatcatttcctcctttaaacaatgaactaagttacaaagaatgatttacattgttactataaattaattaaaagtggactaatgacagaatgaacaaatggaatgtcacagatcattagagtgggaagggactgttgttaggaggcgaggcaggcgatgctcgtcacttcagcgtcaattgtattcaaggcacccgccaaccgataactgattctgagtcgtagacgaggctaaagaaaaaccggccaaagtacttaggcaaaaaattaaacaaataaatgctaccgctttcgaatttgccagccgccgcaaattcgccttttggcttatcgtggacaa

SEQ ID NO: 4885 - DNA, 4712 bp, Heterodera glycines
tgcaggtcagcttgaatttcaaaaaggtaacaaaaagatgtctgactgttagagcacctccaaattcatgtgtgccgaatattgtcgtattaacgcatgaatttgttcggcgtgcgagtcgaatcgcgtgctaagtttggcaagtgcagttagtccatactcacgggttggcacagtgagctgtggatgaggcatcaaaagttcgaacaattccaccacttcatcctcgctcacctaacataacgaattaaaaccaaatacaaaataaaatcgtacttttatatttgcctcctccgtatttcccggagtgacaagcaaatcaccgaattcgccaatgctccaaaatgcgatttgcattaagggctgagcatttactatgtgttcccgtttggaggcatgaaacaattggacggttgcgtaatgctgcagttcctgctgggaagagatgagctgaatcatcgcactgacaacttcatcaggtacatggttagctgcctaaaaaaacaaaaagtaggaagcaaaaggaatgtccgatcataccaattgcagcacgtttatcattgtgtccaaatgccaaacaagactcggggagaagcgctccgtcgcaacgtacattttagaagaacactcagctttgaaatcggagtcggcagtttcgaggaaaattataatctgaatccgatatgaaagaatgaatagaaaaataggaattagtaaacaaaaaaggacctccttggacatgctcgcgatgttcgtttggttcataagggcaaagcaaagttcaagagccctcctaaaaagtctgcttattccaactacttttatcagttactttttgatggaaatgtcggcatccttcagacattccaccacagtggtgcgatgcctttgcactgcttggaaatcaattgcaacagttttgagcagagtgttaagtgcaacatatcgaatgtttttgtcggtgttaagcaaaaaacgacccaaaatgttcacggccaaaactcgcaagccgctttcactgaatttggtcatttttacgtactgttagccttgctatttcatgcccacctttttgtttccattatagtcaatactgtttcatataaaatggcattgccaacatttttcgtcgtttccgtattcgtcgccacctgtgccaaaatgtcattcatctcttcactgacccgtgggtcatctctgcccaaaatcctcaatagcctgagaattttgaccttaaattcaaaattagctaattgtaagaaatctatgtgaaaagaaagacctgcaaaaatgggtcacttataccagcgacgtcatgctcagcagaatactcattcatcagcaagtttttgagtatgcgcaccaaattaggcaccatccaaaatgtaaaaccgaatttatttggttgttaaatcaataaagaacctttttgaagtgaatgcgtacatcggcactcaaatcgcacatttccgagacgagtgtaatgcccgccattagtacacctttaaaccctcaaaaatgcaaaagcctatggtaaaagtggcatttaccgtggtgtttttcgttgagcaatgagcgtgtgctggagataaacatttcaataaggtcggggacctttcggacgatacgaaacgcacacagagcggcctcaataccagcaaatagaggaaatgtccaaacatttcctacctttttcttgaggtaggtgttagtcgacttcaataaaagcttctcaacttcgcttgccaaatctcgacacatttccgccgaacaaattgagccaagagtacataaagccaaaccggcgacgaattgttccggatcatttaaatggctatgaaaagatataacgaagaaaaaagaaatatttaaaacccctttaagcaatttgtaacaagtaaatgaatttcggaacgctcatccaacaaaagcatggcgcccaaataaccaattcgaacgtcagtgaatcgtttatccttgctgcccaccaatttaacacattcaacctttcgatttggaaggattgaaacggatttcgtcttaaaaatgaatgtttacttgtccgaaatgtgcaggataaccaagcatgtgaatatagagaagtttagccatattccttaatttaattttcgatcgaatgcgaaactccgtgcaattgcctgcatttgtatttgttgtcgtcgtccctgaaggaatctctgatgtttgcactttctttctccaccactgcccgttcctcggccgctgttcgtgccgctcggacttgacgaatcaaatcacgcaagcgcatcgacgcacccaatgtccttaaaatgttaaagtcatgcctatcaattataggtttgtgacaattaattcacaccttcctagtcttgatttgacttcatcaattttctcaattgtcatttcaacaacatttgccattttgttgcactgattattctaaatttcgataattagtgatgcaaataaaaaaaattattttgcttccgaaaatgtttaaaaattcgaaaacacttgcctataaaatttataaataaatttggtttaatgtcccttcccgtcaaaccaatgtttgctcaattttgttcctactgtagttcaaaaaaattcaaaattttatttgtctatcggatacacagtaaggccttttgaaaattcaactgcataaattatgaagtttaatatgactcaatggataattattcaaatataaaataacagcgccttgggggcgccgctttgcggcgccaaccgctctgttttattctcaaataaattaaaatcttgataaaatttttggtgtgcggacatttcgcctactggacatctcgcctactgacatttcgcctattcgacatttcgtctactaacccaaaatcggacgtttgcctactggacatttcgactactgaatatctcgcctactaacctaaaatggatctttcgacaatgaatttcatcaaatatatattctaaattaatttatatttagctatttataatgctaatgaaatttagcctaaaaaagcaaagaaatatttataaaagtccaaagaaacatagaaagtgaagtataaaatcatagttcagtttttaatctgtatcattagcttcttaatcactctccatttccacggatgtgaagccccaccacaaagccctgcaaacgagtccgaccagggtttgccaatccttcgtccgattcataggcggcctcgtcaaggattcgcaccacattttgttccttgatgtaccgttgtcattgtttagtcgtttgtggaagtgttaagcatatccgagacccaattgtttggaaaagctctccttttttacatcatcactttgtctaagttcaaatcgttgttgtatgaacatttcggcgctagttgcaaagaggaaacttttgaaattttttttcactttttttggtcaaattttttttttgttttttttacacataatgatgaatattaagtattaacagcacaattatggtgaataaaatgtatattcacgatttttatccaaaaaaaatttacaaaacaaaagggtcccccctatggtttttgataaaattcaaaatctatcactttataactagcgccaaatttgcttaataggcccaaataattgtcatattcttgatcagctacctttaaaacccccgggtacttggtttcaggactttttaaacaaaaaaaaaatttgaccaaaaaaaaagttgaaaaaaatttcaaaagtttcctctttgcaactagcgccaacatttccatttgaggctctgtggctgcactctcaaaattcagtacgctgtcttcatttgtatgaatgcggggctttttattgtttttgaagactcgcaagtatttatgaacaacaataaaataattcagaaaagcaagcaaaatatgaagtttcaaacaaatttattcaataacgactataataaagaaggttgagcaacaacgtatttaagacaatcggaggatttcgcgcaactctcttctgctgtctcgatcacacaaattccagacggtgaccaaacccagtccggccaatgcaccaacaccgccagcacgcagcccatgaggcaatccgcggaaaagtccgccagcgattggtccggcgataaaagaattaagcaagtcatcggctcgtgacagcttcagccccaactcagtgaccgaatagagaaacatggcagtcccagcagtttgtgcgtatccgctgccatgcttagtggcggcattcagcatccgagtgtaccacggattccaagccttgaaattatttttttcatttttatataataactcacaatcagtccacaaaccaaagttctgttctgtggatttcctaactcgccgaacattccacgaacacttccaactccgaatcctccgataaccgaacaaccgatgtaaccgagagcgaactcaaattttccccgaccagactcataaccttcaggcatgatgatttgtggttggctctccttgaaaattgacggatccaactggaaaaatacggatccttctgggaatatcatttttcgtaaagctacttaaataaaacaaaaatcaacattgattacagtatacacattagaaaaacggtaatttgttaaaaaatcattaaaaaggttattcttttcatagacacggcggcacccccacaaagtgtccagcccatcgaatgtccaaaagagt

SEQ ID NO: 4886 - DNA, 5160 bp, Heterodera glycines
ttacttttgtatgttttttaatttactttataaatttaatattttaaaacaatttattgtttttttttttgtaatttatatttcaaatttttatagatatttgaggtgttgtataagttttgttatttaaaaattcttaacaattcaagtaataaagcaaatttacgaataattgcttaggaccaatgtcatggaaattcgtacaataggcagtcgtactatgggcaggttagttcgtacaaatcttttttttgcactttcaataaagctagtattttctctcaaaaaaaaaatcagaatcgattttcaagcctagaaaaaaagttttttaaattttttttgcttttttcaaaattttttcacttttttttcttcacttgtaaattcattctgtttttttttactgcattctaatgcaatttaaaatgaggtggtttttgtttgggttttttgtcaagaaaaaaattgaaaaatatttttaaatgagcaattagcagtttaactcagggttgcgatctcaaaattttgaaagtcctcaattcagagataaaaaatactcatttgccactaaaatacctgaaaaaaatcctcattttttaaagcataaaaaatgcaaataaaatcaattaagagtcatatttttcatttgaaacaatcaatgtcatcaatttcttgtcatttataagcattttacggaagtctgagcacgaaaaatcgaagttgcacttcactcgggccaacgctttcaccgtgcatccgttaaatttttcgcttttagatttgctcttttcgtggcgcggttttccaaaaaacttttcggaaacatcgggagggggggtccggcagtgccgataggcgctgccggaaaaaatttggaattttgagtgcgattgttaacaaattttgtcaaaaaaatgattttgactgaggatttttcgaaaaaatgtttaaaatttgaagaaaaagttcgaacattttgccaaatatacctaatttttaaaaaaatcatgcggttttgtcacttgtttaacaaaagaccacaaaaatcctcaaatttctcaaaaggtcacaaaaatatgcaaatcctcatttttcaaaaaaatcctctttgaccctctaaaagaccacaaaatgagtaaaaatactcagatatcgcatctctggtttaactcatttaacaaatgaatttcttgatgctaatacaaacatcagcagacatataaatcaggagatggagttccgaggcactaaaaattttcggaagtcggaactcggaattccgaggccccaaaaattttcggaagtcggaactcggaattccgaggccccaaaaattttcggaagtcggaactcggaattccgatgccccaaaaattttcggaagtcggaactccgacccaaaaaaggtcggaagtcggaactcggaatttttgaaaaattttacagaaattttaaaatatttcataagttaactttaaagttataaatcaaaattactaaatataaatgtatttatgtattaaaaaattaatattaaaaattaataatcaaattcaacaattgataaattggactgcaaaaaaatcaatttcctaacattgtctcccttaatccggtttcgcaaatccgtacaaatgagcccggctttagaaaacaatctttcgctttcaactgatccacaaggtgcgctcagaaattttgggcaacacgacaaagaagaggccattttccatgttcttctttcaacttccagtaatagaaaatacaaacagaaattaaaaacagaaattaaaaattctcaagaaaattaagtttttttgagtccggcggtgccgataggtgccgtcggaaaaaaattgaaaatttctatgcaatttattaacataaattgtacaaaaattgctaattttttgaaaaaaaaactcaaaaaaagaggcgagtttaattaaaaataaaaatttaattttatttttcaattgcaatttcattaattatccacgttttttaaaggttttgccagcacatcagcttattttgaagagcgcttgagtgaaaatttaaatttgtgattggcgtcgacccagcggggtgccgaaaagcaatttaaattaatggggaataataaaaaattaattagaaattatttcttatttataataaattacagcgttccaaatttatatttcttcacggatttgcaattcgtctcgttcccaaaatttgacacaacaaattctgatcaatttgcaaaaatgcctccgatttaagcaaatcgtccttttcgtcatttttccaacaagaaggtgcattggcgcctttggcgaaaaaacttaccttggaatacaaaaccaaaaaaaagcaaacaaaattttaaaaaaaaatttgttttaattaaaaaaataaaaaaagatttaaaaaaatttacggtgctcacaatcagcaaaatttaaatccgatccgtcaagagaattgaattttcttaccaaaatattaaactttaattcgtgactaatattaatcaaaaataatatttaattaatttatatatgatttccgcccgattagttattgtgaattcatcagctgtcaaaaaccatttaggaattaatcatctattttctgaattttttgagtttaattttctgcaaaagttgggcgaaaagtagaaaatttaaaaattgaaaataatttatgaaaatggaatttaagaaagtttataaattatgtgtgaaatttacatttataatgaccgatttccaaatctcactatttttaattaaataattaataataaaatttatttttcaacttgaacactcgcctctttttcatctccgtttttgtccataaaatgaaggttggaggtttaaccagtagactaaatgtttctaatagatcaaattatttttctcacgagaatacgagaacacgagacgagcaacatccctgatgtttagaaagaaaaatcaatgcggttatttaaaaaaatctaagtttggtgtcgtattttctcaaaatgtttcgagttttcagtaaaaattttggcatttaagcatgctctaaattattttggaatatctaatcagaatatttcttatagaaattaatataatattttttgaaattgatttgcctttctcttcagaaactaatttgtacgctgatgagaacttttttcgggtctgccgtaaatggctctttctattttcaatttttaaataaaaatggggccgtttatgaaattcatttgatttatagcataaattcctcattagtttatatttatcctccgtttttgcttttttcaccaccaaatcaatgaccaatttcactttgtccccgcttttgtcgtacaatccattggcagggtccatcaatttcttaattacatatgatgagtgggaagcaaattttgaacagtgctgttcgagaacgggacgacgattttctgctgaacacaatgccattttgatagatttcgcgccagcccaacggagtgccaaaaaaataacttaaatttaatgtagaataattatttattatttgttgggtcagggtcgttttcgtacggtccgttttcgtacgagaacaagtttttggctatacttttttatttatcaatcaaatccaacgctgttgtttattcgatagccttaagtgtcctctattagcctgtaaaatttcgaataatttcgttaaggttcaaaaaaagttatgatcagaagaattcaaaaaaccagattttccaacttttttggctcgaactttttttaaactaaacgaaattttttggaattttgcaggctaattggcatctgaagtgctctcgaatgacaccaagaatattgaatttggttgacaaagaaaaaagttatagtccaaaaacatgtgctcgtacgaaaacggcccgtatgaaacggcctggcccgttatttgtttgtcaaattcctgtgttctaaattgaaatttgtcacgttccaaaatttcgcataacattttttgatcggtttgcaaaaatgccttcaatttggtcaaattttcgtatttttattaatttacatcaaacacttgtacaaaatactaaaaaatcaaaaattttactcgtttcaactttaaaccgattcaaaattaaaaaatgaacaaaatggggctctcctaaccttttataaggatgaaatccgtacaaaattggtatcattcgacagctcttgacgagtcacattttttagccttgaatagtgaataatgcgctaaaagccagcgcacactcgactacggcggccaacagtaggtggggcgccgctcaatcgggtgcccaccagggatggatggagttccgaggcactaaaaattttcggaagtcggaactcggaattccgaggccccaaaaattttcggaagtcggaactcggaattccgaggccccaaaaattttcggaatcggaactccgacccaaaaaaggtcggaagtcggaactcggaatttttgaaaaattttacagaaattttaaaatatttcataagttaactttaaagttataaatcaaaattactaaatataaatgtatttatgtattaaaaaattaatattaaaaattaataatcaaattcaacaattgataaattggactgcaaaaaaatcaatttcctaacattgtctcccttaatccggtttcgcaaatccgtacaaatgagcccggctttagaaaacaatctttcgctttcaactgatccacaaggtgcgctcagaaattttgggcaacacgacaaagaagaggccattttccatgttcttctttcaacttccagtaatagaaaatacaaacagaaattaaaaacagaaattaaaaattctcaagaaaattaagtttttttgagtccggcggtgccgataggtgccgtcggaaaaaaattgaaaatttctatgcaatttattaacataaattgtacaaaaattgctaattttttgaaaaaaaaaactcaaaaaaagaggcgagtttaattaaaaataaaaatttaattttatttttcaattgcaatttcattaattatccacgttttttaaaggttttgccagcacatcagcttattttgaagagcgcttccgatgtttttgaaaattagggtccgttttgacgccaaaaaagaaagaccggaaaa

SEQ ID NO: 4887 - DNA, 4581 bp, Heterodera glycines
atgaacagtagagaaagaattatcttgggttctttcttctccaacccgaacaaatatagaaaagaaaattcagggtcgggtagcaaaaccctacaagatttgtctgtatggctagagaaatttaaaaaaggtcggtggaaaaaccctcgttcaatgaaattaatttcttagaaatgtaaaaagataggccttaaacccaaaaaaaaacaaagttttatttagttttgcagtctccattccatattttcagagtttttaaaaaatttttactaatttttttaattttttcccgaaatcgcaaatatcccactgcgaattatacataatttcactgaactttccccccccccccccattagtccaattctacggcacaattgctgctcggaggctcttttcagcttaaagtccattcggagggatcggacattgacacgctttgcattgcgccgcaacagttcggacacgacgacttttttggcacacaaagcgaatgcgaagggccggaaaagggagggagaagcaacgaacaaacgggcggaaaatcgctgttttgtctgttttccaaggcgagaaacgcaaaaaaaattattgtcggatggcatcagcccaattaaatttaatttactttaattaggcactaattgattgcccgtttatgccaacttttcgccgcttccaacttcccttttcagctccccgccgtgcgttcgttgcgtcgcattccctccgcgcgcgtgccaacccttcgcctcgtcctacgttccgacttcgaatttgacatagtttttgcctcaatccctggcgtccagacaatttccatagaagaaaagggcgaacactccgcgcacattgccaaattaatcgaaagattggcggacaaaatcaaaacggacggaccaccggccgaagacggcgaagtcgcgagacgaatgttgcgctcattggccggtaaatgaagcgaatgaaaggccatggccgaccaaagactgatcagcaaaaacaacagaatgatcagccatttatctgatcactcttaattggcgctgaatgccaacaattagtgagtgttccttccatgatttaggcttccactccaacctgaaactgctcgaaatggcgccaaatgttgacatgttccgcaaatttgtgctgctgcttaagcgatgggcgaaaagttcgttcggatttatgccaaaaactgaaattaatccgataaatgaatccgaccctttcgtttgttgttgcaggcaatttcatttatggcaatgcgttgggctttctgaatggcatttcgctgtgtgtgatggcaatgaaagtgctttttctgtttccgtccgcttcgcttccgttccttttggaacgctttttcctcatttattccctttggtagcatttcgcttttccgcattaattgcccacttttaatttgaaaggccttttccgctgccaattcaactcggaaaattcagtccggatttgctcaattggagcccggaggaggagcttcgtcaacttatgccacactttggcttcggcttcaggtccaagctgagcatgcccatcataacgccaggatatcctgaacagaatgccacgttcaatgtcaatttcaaaacagcgcaaataatcaaaacagcgatcaaaaatagtaaatttattcaatttattttttatattttactaaatatgaattagcactgattgaattgaacaagtcgaccaacaaatcggcagaagaaaaatggagggatattcttcataagcagcgaaaattcagcgaaatgatccgtttttcataatcaaatttcaatttaatttttttattgttttttagtactcagaattcttttcggttgtttgctttgcgtcggattgggatttaagtgaagaattctgtggctttgtgagcactcgtcttcgcaatcagttgctgatcagcagtcccaatctgtgccacgtgcggactctgagggaatgcccggaaggaattgtgcaaaattacggagaaaaaatgtactttaaaatatgggattaaaactaaatatttaatattaattatttgcaataaggccatagaaaattttattttttgactattttttcattttttttaccaatttagcagttattctgtttaagcacttattttgcacttttagatatcaattttgagattttaagcacctaaaaatccgggccctagtaattaatattaaaataatactttttttgctatgatttaaagaccaaaacaatcgatttgcaaaagttggctgatcggaatggacggacaaaataatttgggaaacgaatcgaaggaaatgcgaaatcgaaacttggaaaaagagttggacgaacaaattgtgaatggatacaaaaaaatgttgaagaaaaattctgagaaagcccaactaaattcagcagaaataaaattgagaatttttttccaaaaaattgaaaatgaaaaaaaaaaattaaaagaaatggacgaatttatttatttggaagcgaaatttgtgagcaaagaacagctgaagaaggaaaactgggaaagagaagagaatgaataattactgctgatcatttgagcatattttgctgatgtgttgtcattatgatctatgcttaattaaaggattaattaattaattgaacggaaaagctgattataaaaaggaaaacgtggaaaaatcaaaaagtgaaatgaaactttaaaaaatatttgaataaatttcttaattgaggtaaaaaatattatgcttttttattaaaaactcgaaaaggctaataataacaataaaatcattttgaagaaaaataatatttatggattcccacttttaaataatcgcgaaatataaaaaaagacatcaaaattccccccaaaaattaccaatttcgtgggttttctatctttaagttggattatataatggagaagaatattttaggtactttcccattcttctgtgaccacagaatgagatgaaataaaaagtgagcaaaagggggaagagcattttaccttttgcaaattgatatttattatgtggcattttatttttccatcctttatggttaattctgcggtcacagaaggggaaagtaccgaatatttattagaatagacaaccaattattagttaattaatcactttgttcaactgtgcattaatatttatgtttaattgctctaaatttgcttcatttttttacaattttctgtatttgaaacatttgaatctttttgttctttggtgtgttttctcctctaagaaactcaatcaatcccaaaatcagatcagaacagtccgtcttcttctccttctctgccgcctcaagggctcttccaacgaattatcatttgaatctcagcagcctaaaattgttttgaaaatgccaacgttgggttggatcaaatgccaattttgcactgaccagccacttccagtcgtccatgtcgattggtcgctgggatttgaaccagtcgttcacgtcgtcaatgtatcggtccactttggtgatcgcttcctccatgcattgcttcattagcgtgttgccctgcgggtctttcgggcatccccccaggctgttaattgccttccgaatttgccaatgggtgtcctttctcatcagattgtcccaattcgattgaagagaactgaaataaccatccatccatttaattaccaactctttgtttttaatccctttatccccccaattagtcccttagcctaattaattaagattgcccacctcagtgtgctcatgtccattgttcccattcctcgtgacgcatttctcagctgtgccatcactttggccattgcccccgtcaccatttcgtcggtcgctcgagctcttttgaccacattcagttgctcttccactacgtcaagtgcctgaatgcgtcggtcgacttccgtcgatagttcggcaggctttggcttcagtccttccaaaactttgggcaaaagcttcagcagtcgtccgatcacttcttctttgacgtcctccaactcctccgccgccaccattcgctcggccttaagcttcaacagcaaatcttttggtgaattgggccaattcgtaaatcaaagccaagtcgaaggcacaggcgttgcttttttcaactgaataattaatcataaaaatgccaatgtttttgctgctgaccaagtcgcagttcgggctgtgagttcagtcccacgtcgttcagtgcctttttgtattcgacgaaagcattggccaccgacggagtggcgagcaccgaattcagtctttcgtgcctcgggtcaaatgccttcagtacgtagcacaatcgctgcacactcctttcgtctttcctggcagtgttcagacttccaaagtaagccaacgatttgtccaaaaaaacggaggcatcgatgaaatcaattcgcagaattagggtatctgtgagggtaaatggataaacatttctttgatcatttgttgtcattccctcccctcccagtgccgttccttagcctattacctcccccccccccctcacactatctatgcccattcccccttgtgctattaccattctat

SEQ ID NO: 4888 - DNA, 1870 bp, Heterodera glycines
tcgtcgtccaaaatgttcactcgactccttcgccgcgagcgcaacacggaagtgggctgtccaagtccgagtcggtgtccgactcgagccaacttctttcccgcacgtcttttcgggagaaagtcatcggttggcgccaccggtcatcttcttgaatccaaatcctgggcgtcgactggagtcgcgtcggactgggaaaatgtacaaattgatcagtcagctcaaatttgattgcctctttggaatgtcctctaattaccccttctgataattaattacctctggttgttgccttgaggcaaatggcccctttctaatgccaatccgtcctccttcggccacgtcctgcgttttgcaatcgcttgtgggtcttgccttggtggcatcatcgccgcccttcgcgccgcctcatccgctctttttttgtcgtatttgtcgatcttttggcgcatttttgggtccgtaaccagcacattgcccagcttttccatcagttccatcagtttactcggtgccaacactctttctctggctggcatattagtaacataattaggtttccgttttaattgtttccaattatccgtcccgtaattttaaactttgtcaggttggcatacctttgttcaccccaaggtaatcctctctgagaggctccactctgtacgatctgagcagcttttccaacccctgccccgccggcaacggcactctgaatctgttcttcattctgtccaggccgtccaagctgatcttgtaacggtcctcgccctgcttagtcccggctccgaaaattgacatgtcccaagtgttgacggaattaaaaaatgccctggccacttcattggccaattgcgaaccggtgaacggcaaagttcggccggacaaaacaaacgcaattggcaaagaaaggaaaaagagggggagaaaaggggaggaaaatgaagaaaaacgcatggaaaaggaacgaactgtgggaaataaaaatattaattataaataataaaataataataataataaattaaggaatgtttgttattcgaattggcaaatgaatgaatgttatttattgctttcattcattatatgcatcattaagccaacaattttttgttggtttacgtggattttggcaggaaaagccatgggaggggcgcgcggaagtaaagcgaaaggcacggcatttcatttgccaacgcacagccaaacgaagacgcgccaaaattgtttaattaaaaattaaaacaaatttcgctcttttttaatgatgacatcttttggcaaattatcctcttccgtctttatcattaattaactaataaataataataaattgcaattcgtccgttcttttctcaatgctaatggtgtcgcgtgcgtcgcagtgccgtggcatgtgccaattttctatacgcactttggccaattgccgtctctggcgtttcggccaccggcggtttccggcggtccttcgtccggcggaagtccattgaaacgttccgagcacagacaatactccgtgggagcgcataaaaagcgctcaaatgcaaaaattcctggtttttgtttacctggagggcctggagggcccgtgctgcccgaatttccgatttggccttgaagtccgggtgggccttgcagccccatggggccagagattcctgaaactggccatcgtgaaaacgccgcggttttctccctcgtggccctcatctcctgaaagtcaaattcaaaatgaaatttcactgattgtccgcgagccttggagtccgtcacggccgggcatcccttcctctcctgaaatattgtggttttatgttcaaagaacgagtctgaccttttggtcccttctctccgcggttccgcg

SEQ ID NO: 4889 - DNA, 925 bp, Heterodera glycines
tctctctcggtctctctgtctctctctctctcactctctctctctcgcactctctatctctctttctctctctctctctttctctctctctctctcgctctctctctttctcgctctctctctctctctctctcgctctctctcgctctctctctctctctcgctctctttctctctctctctctctctctttctcgctctctctctctctcgtctcgctctctctctttctctctctctctgtctctctctctctctctctctctctctctctgtctctctctctctcgctctctctctctctgtctctctctctctctcgatctctctctctctctctctgtctctctctctctctctctgtatctctctctctctctctctttctctctctctctctctctctctctttctgttcttagcttttcccttttatagcatttttggtgatgaaattaaaaaaacgaacgacaacgaagtgaatgaatgctgcgcattccgaacaacagcagcaggagagaaaaagcggattgattataaaactgctgagggagtgaacatgttgaggaaaaaacaaaaaacaacggcaatttgcgggaggaagggaaggaatggtcggattttgggactgactgatgagacgaacgctgaagcgaaagcagataagctttattcttattagcccatttcaatcggagacgaatttgagagaacgtgggaagagggagaatgaagcggggacaaaagagcaaataatcgggagggagataaagcatcttttggaggctgacgaattgttattttctggaggataaaaaatgggagccaagcaagtaaccgatgatgagttcataatggactggccaatttgatttcacagtggggatagtcaaataactaaagagtttatttactaacaccaata

SEQ ID NO: 4890 - DNA, 6752 bp, Heterodera glycines
ctatggataaaattgattcacccaaatgaatataaaaattgatcaatgcagaaattatagaaaaaagtaaatatcgaataaaattatataaaaaagtaatgtaataactgcaaaaatttatattatatagcatacattggataccagaaaaatggaaaccgcccaaaaattggatactataggggataaaaacaatttaataataataaccaaagatcgccagtagttagtatccagatatcgtcgtcatgattaattgctttttggtgacagctgccctttgaggcgtgccgccgcgcgcgggtttaccgcacgaacgcgtgcctgtggcacgggttcgcgcgggagggggaggggtgcgagagtgaggcggcgcgcggttttaccgcgcgtgtggcacacgggcggggggaaggcggcgtcgcttttgaagtgctggtggagtggaaactttttttgacaaggagggtggcaaaaaaaaaaaaaaaaaacttttgatgtatggggagggggctcaaactttttgtggaaaaaaattttaccaatggaatgtgttgcggggaaggggtgggtgattaatgatttgttgtatggaagggggggggtgctgatggtcagcggcgcagcagcgatgaacggcgcggggaattagagaaagagaagagagtgcatgcaaaagtgagagagtgaaacggtgagaggtagggagagatagagagagaagaaacaaacagtgggtgagagagtagagagacagacagtcagagaaaaattttgtgcacaaagtgagtgcatagaataaaaatggcgacatggcttactaatgaagaaggggggggggcgctgaccaatgcattgacatattgattcgatactccaaataaattgggctcattttagcataattataccattaaatttataatggaattgttttatttatttatttattgttagataatacagtattactttcatggcaccacgacgcaagagaaaggcggctcaattggtcgggcaggacgaagcggtggtgagcggaccgagcgcacaggtgaattgtgttcaccatcaaattttcacatttaaatttcatatgctttttatttcacagttgccaacgaatgacggacaacaattggcatcagcagcaccagtgacaaacaatggcaccgtccaacaagcggaaaacgacggaactgacgcggtggcggcagcagcagcagcaattgatggcaccggcggacaagtacaatttttgtcttttcgttagctaagggggggggggcttttggtttacaaaattcaccggatggtatatgaaaaaaaaaaacttgttaatttggaaaaaatttgggtcagtgttgcttaataaattctcattatatttaaatcttttcagcaattggcggcaaacaacaatggcggacaacacgcggaagcagcagtaatcgatggcactgggatgcccaacggacaacaaattgaggcggcagcggatgaaaatgacgacacaattgggcaagcggtaatttttcacaagcttttccaaaaaaattattcctttaatttgaaggggaacaaattgttgcggcgggcggtggccaatcaatgcatttcatcgtccggctcgcgcagcacagtctcgcgcacggcgtcgcccgcactttcttcgacttcgtccaatgcctcccgaagacagaggaagaattacaacaaaagtggacgcgtaccggtaagaaaaaatttgcaaattcaagccaaacacacacacacacacattcacttcctagataaatgtgaatgccgattgccccaatgttccgcccggtgtactgccgaacccaaaaactcgccagtaccaggtcaagagcgttttggcgcaattcactcatgcatcggggaggaaatgctatttcttggagtggctcggtgagtttgatgatgaaattgaaagaaaaaatgtgtgaatgaaaaggtggacggatggataaggaaattgaaaatttattgtaaaattccaaacgtgtgccgagttaacctggtttagcttcgccacttttggaacggaataatttgagggtgtgggccgagttaacacagtttagcttcgctacctctcttgctatttcactttaaattttctttttctttttccattaaccaatccattttcttctctcatttttttctcgcaattataggctttcgcggtcgcaactcatggtgtttgtcggaggacaccgactgtacagagtacattgaaagatttgggacagtggcaacagtcgacgcggtactctctgcgctattgggtgaaagcgtcccagcttcgatagctgatgagctccaggccaatcctaaatttggacaaggtgtggagagtgaggggaattaaaaattgcataattttttgtcagtgttggcaaagttggatgacattgaagatgaattcatattgaggacaactcagtataatattttgttcgcaaaagggcttatggaaagccccgagggcaaaaccataattgaggatgtaagcacacaaatgcacttttttaatttaaattatatatttcctaaggcgaagagtaaactgggacgcttcgtggcaaaatgtatgagctgatgagtgaactggccggccgaattgaacattttcaccatttaaatttcaccatttaatttcaccaataaaatttcaccatttctcatcatttaaatttcaccatttaattttaccatttatttcaccatttattttcatcatttaaaaataaattttttcgtacatttaatcaaaatataatatggcaaaaagaactgacaaatatttaatgctgcatgtaaaatgtggtgcacactcgacaatagggacatttatcaggactgggtgaaatttttaagtgaataagcaaacactgacggcacagtcccacatgcccacaggccccaaagaattgagccatccccacaatacacaaacacatccccccaatattcgggtacaacaatgtgtcggggaaatggacaggtgccaaagggttcccccaacgaaacactgccttcgtttcgctgccagtttgaagtgcggcttccatcgggttgcgcgctgccgttgcattgagctgctgttctctggtcggcggaccaaattcgcggctgatgcgaccgtagggttgtcccatgcgcatcctttcacaattccgttccctcagttttttcgcacaccctgcaccgggccgaatggcactcgccgcatccttcaacagaacaatttggttcaaaaatttttttgacaaaactatattacttgctattccaaacaacgaaggtgcaattgtagatttgcggcgcgacattttatatttttagagggtttgtgtaataagacaatgaatggtccttccactcgctttgtccctatccatgtgccccccccccctcagtgtctttgccagattcaaattcggcaagccaattaatcatttcatcttaaccaacacacaaaaaaggaaattgagggactgtctcaaaaaaatatatgtttattatgcagaataaatatcaaaattatggattgcatcatcaaaatccattattgtcttttggtcaaagttcactttttcttcattggcgccaaaaggtcggttgcgcggcagttggcccacacgcattcctcacacatctcaaagccgaaggcaaaacggtccccctccaggcgcttcactttctgctggttgttgtacagacgattccaatcatctcaaaattttaattaaaatttaatgaaattgttagtaaatattaccatggcacaaataggtggtcagcaaaaatttgccttttgccaatttccacaactctcggtcgtccactttgcgtttcttcgttgccaactcatccttcggctcaacatttttgggcgtctcttcatgtggcttgggcgactcgggaccaattattttatgttgctcagcagaaacagcagcagcagtagtaagaggagcaacgcgtcttttcattttgacaaaaattgttaaaatgattttgtgtttttggcagacaaactgttttggcttttagtgggcgtgtctaaaaccgtgactcttttcaaatggtgtaggcgtggccacacttttacgcatataaaagtgaaattcttcaacctcatcccactttcattctcctgccatggttcttgtaagcacattttgcgctcagcttctcaactgccctgtcaagtcattgcgcgaccggctcaaccacccagaggatcgggcgcttgtgctgaaacacatcattggacgcaaagcgcgcaccacctacaacgaccgtaatgggatgaccaaaactttcttcgtcactggaatttcggcacaaggcgccgcatttcttcctgcatatgggcaattgcgcaacccgttcaacatcaatgtggcggcacatttttatacacggcaccgcataaagcttcacttcccgtatgcaccgtgcataattgaacgcttttcggggggaggggaggatcggcactacccaatggaacttcttgagctgattgatgacaacatggacatggacatcaacaacaacaacgagcattggctgggccgtcttttcactgaaattgacgacaaacaatcgtcgtcaaactcatccgacacaacaatgcgcctagtatttgagggagacatggatgaagacagcggacgcaatgaatgctcacagagtactgtaccgttatattagttttgtttttgctcactaattatgcatttttcttccttaaaatgaccacttccatctattaatttgaaattgcattttccattccttaatttttcaaaaattgtgtcttctttagcttaattatgcacttttttacctaaaaatgacatcttctaatgcttaattatttcataattgcatcttccattcattaataatgcacaaatttttattaaaaactaataaaatggcataaaatgtacacaatttgaggtacaaaagaaacagtcatatgtgtgtgtgtgtgtgtgtgtgagagagagagagagagataatgtacaaattacaatgtgtgtccaaaattcagcacattgaaatcggccccgatgattccctttcccacaaatgggcgatagcatttttgcataggcatggaaaccacccgacccccctccctgatgtttggacgaaggaagttggggtatgtgatgattatcggctcgtattcaccacttgtcgcgtaccggaccacctcctctttgaagttttcatagcgcatcccctggttgttgatcacatcataatttagcgtcagcccgcgcacttttagcacatgttccaattgggctcccgtctccgcgcccttgcgtcgcagacaaagaccgtactaaaaggtggtaaaattgaaaagtaaacaaaaatgaactgaaaatgcacttgttttgctccgccactgcaaaattccacaatgtcgtggtcggggtattcgtcggtgaactggcccaagtgggggccagttttcagcgggcaccgctcctccgggtggacgaggatgaggctgtcagtgtctaaaataaatgtttgtgcacaaaatttttttttttgtagtttgacttaccagtgtacaacagatccgagcccggtgatctgaccaccttctgcattgccttgagcagaacgaggcgcgctgctgaggtggtccatagagagatgactgaagtactttaacaatttattgtgagtgtgtgtgtctcaccaatgtttgagcatgagtgctcatccacccagtccttcttctgcagataggtgatgagtatgtgctgctcatccaactcgtcgattgatgtcacttcgatggatttgttgtccaggtactccgccaaagtcgctgggtcgtcagtgatgagtgtttgagcgagcccaaagttgcgaagcgaaaatcgaccccctaattttttaaaaatatataataataatggacgacagtactcacataagttgttcaaacacaacttggccagggaccgcttccctttgttgaccgccattttggttgggtcgatggtgatgtcgaactgctctgcgcactctcggacaaactgttgttccttctccgcatcgcctctgatgctgttgtcaaatccactggcctggatcttctgggccataaactcagcaatgtacgggcggaagagcttgtcgtcactttgctcatactcgaggacacggaagacctttgtgacgaggtaaccctcgtccaacgcctcgttgagctcaatcgaggtgcacgtgctcacccacccccgctgtctgtcattgtgctcgcagtggtagtcgttgtgcactcctcctgtcgggtgctctttggcgcaagtgatgcacagggggaagcaaagccgctctccaactttcactggcagaacggggacgtcgacgcgtcggggcggcacaacccacactttgagcagtgccaaagggtaggggttgtccgctgcactgcgccaatccacttcctggttcaacacatgcacgtttggctgtccgatggggtaacgggttgtgaagctgtgaaggaaacaatgttaatttgttacaactttaactgtgctcactttatgtacgggtagagcgatgtgaagtcataataggagattttctctcccggtccagccttgcgcagcagcttcagtggtccagttcgccctcccataaacgcgtcgcggatcaccagcggcccatca

SEQ ID NO: 4891 - DNA, 2566 bp, Heterodera glycines
aaatttcaaacaaggaaatctggcaaaaatcgtattgctagaaaaacaatttttaccatttcaaaaattcgctagaaaaaatttcaaaatgtttttccaaagtattcgtggtgggaaacgttgtgggggaggacgagctgctccaaacagaaacggagttgcgcttcattctttttggttcatttaagcaaagcggattttgctcggatgcgtctgatcggccagttcaacaacgcgtttctcattgtccgtcttcgatcggacgtgttcatcattgatcaacatgcggcggatgagaaatacaattttgagcgtttgttggcacacaatgtgatcaaatcgcaaacactgatccgcccgaaacgcctacgccttggcaatgtcaacgcggcactgatgcgcgacaatttgcacgtgttccatgccaacggattcgattttcaattttacaacggagcgacaagcgaaaatgccaaatggtgctgggaaaacggagcggcggcggccggcaacaaagacgatgccattgtcattgaagacactgagaacaatgatggtgtgcgattattgatggcttttgcgtcatagaaaattggggcgttaaaagatacgaaaatgggagcagttcgttccccctccggccggttcctacccctcttccccctggatcagcccccccccctcccccgaaaaatgtattaaaatttttaatgattttttcaaaagtttgagtttttttttataagaattttaatataaaattttttggaagtttctaagatattcgggcggatagcgcacaccaaggcaaaatataatgacaaaaaatgcggctctaatatactgccaactttttctgtattgtcttacaattagtgccattttgtgatgtccgctcatacacaaaaatgcttgaacgattcatatataaatgttcgaaatcaacactaatcattttttcagttgaacccatccttcttaatgacgatgattatgatgacaatgacgaacaggagaggggtgaggacgagttggacaaacttggcactgttttgttgactgccgtgccggtgctccatggctggcagttggaccgtgatggtcagtcagagatcagaagcaatgattttttggaatttggaatgccgattttggacatttttgcagacattgaccaattgttgtcaatgctctctgaactgcccggcattgtgcaccgtccaagcaaagtgcgcaaaatttttgcttccaaggcatgtcggcactcggttatgtttggaaaggcattgacacaacgtgaaatggaaacggtggggagacagactcattttttgatcatttaaaaaagccgcttaatttttcagataattttcaacatgggctccatggaccagccatgggtaaaacaattgaaattgaaataataatttaaaataattgcatttctaaattttcccaaagaattgtccgcacggcaggcccaccatccgccatttttgtacggttgagagaattatgagttgaatgatttttctcgagtaatctttgcttttattctcgattacatgttttaattgttaccatattctttttttttgtttatacttttcaacttaaaattttgacaattgtacaatttggtgcatttgcataataattttgcaacattttctcctttttttaatgtgtgggcttcgtttatttatgcttatccttcaaaaatatagatatatataatgtttaatgttttcgtactcaattgtttaaaaatacgaattaaaaaacaaaacaaaaattttattcactttttaactaaaataaatcggccaacaaaactaatacatatgtacattaagtataataatattctgaacatatattcatttgtgctctgattatgtgcaaacaaagaatacacataatacataatatctgacaaaggaaatgagggcggggggaggctcatcaatttacggccatttcacgtcattatgcgcggctttcttccctttgtttgcccacaataaacaaaatggccatccatcactttttggacatgtcgagagtgattgagtcttgtggcccctgaatcattctcatctctttgtgtcttaaaagtgttcagccgaaatgcattttgatccaatttagccccactacgaaattagggaagatatcgaaatctttttcaggaatggaaacatccggatttatccacctctcaatgaagcaccccttcgccccctcccccatcgctccttctatttcgagaatttgatttaaaaaacaaataaacgaaatgggccaatttttcgcgcattcgaataaaaaaaaaccacgaaaaaaagcaaattaattttaagaaatttaattcttcttttcaattatttttggacggactcaattagttgtaaaaaaaaagaatttttttttctcaaaaaataagactgaatttttttttttctctagaaaaacctaaaaaaattttgctatttttttccaagtttattccaaattttttgaaagaaaaaatttagtaattttttaggtttttctcgagaaggaa

SEQ ID NO: 4892 - DNA, 1754 bp, Heterodera glycines
atttttggtcgaaaattgcttccacccacttccccttgcttctgctgctgctatgttcacattcccaccaccttcgccctcccttatcttttgttcctcattcactcattcattcattaattgaatgaatgaatgaatgaattgcaccccccacctcatatgatgtccccgctttttgttttttctacgaattccattccattcaaatcatttttgattggggcaatgtgataattgtgatcaatgattgtaagaaacagtccgagtacagcgagattttcagttttgtaaaaaaatcttgaatttctgctgttcccactgtgcttcaatgtcgggatcggaactgctggtcgtaatgacatatgtatacctgaaaacttgaagtttcccaatcccgccggtcccgcaaaatttaagtgaaaaccaatgaaaaataaggccgaactatttattgggtacactaataattaatcatttaaaaatgttttcaacttctaataaccccttttaagcattggaattctaaaatttgcctaaattccagtattggtttaaaaaattatggctttttagttccattctctttttctactgtccattcatcggttgactgactgtccaaccttccaccatccggccttcagattacgatatcttcagttcattactgtacattagagatcgatcttgacctggatccaggcctggatttttcctggaaaactgggtccaggccatttttcggcaaatggatttttcctggacctagtttttctattgccccttttttggttttagtccaatcaatgtcttcatcatcttcctctaaaagcactgtccaattgtcggcatgggaacaattcaaccaccaaaagcagctccaacaacgaccttcgaccaccgttggcaatgtgttcataatgccatcgtcgtcgtcccccaattttgcacgcacacaacggcatcgctttgtgccgttggcgctgcccgggatacgctatgcgcagctggtgcttggcactttgtacctgtcgatcatcctcggctggtcagtgattgcattgctcattgattcaacagcactgtttgttgataaatagttttcaaaatgcacttgtaaggaattgtcgaattctcatgacccacgcgccaccggaatgtttggaatttttaattaatctattaagaaattgaatagaatttttaatcgaaagcgaaatcaagggctaacagcgagaacagagactgctttaggcagatgtgattgcttttgtgatctggttttttcgtaaattttttaaaatttgtatctaaggccttgaaaatctgagtgtttctctccctggtacgacccaagacaagacacctaaattcaagatcactcgaaccataaggggttcaaaatagcccagtattgacagtcgtttttttaatcggggcacagcttttttggaaacaattcccttcgttcgagaccaaaggtttgacacgaaaaatctcgaacaaaattttgcaacccagaaaatattcccactgaacagcgttgtaattctgtctattgttagtgtgatctgcttcaacccggccatcactgtgatgatggacatttccacttcaccgttgttcaacaacggctctttgaccaatcaatcagcgcaagattttgctccatcgtttttgccgttggctgatcggcgtttcattacacaaatttgcagaaagctttctgttggccgggtgggttttaattcaag

SEQ ID NO: 4893 - DNA, 3762 bp, Heterodera glycines
ttcaacccggccatccctgggaggatgacatttccactccccgttgtcaacaacggctctttgacaatcaatcagcgcaagattttctccatcgtttttgccgttgcctgatcggcgttcaaattacacaaatttgcagaaaagctttctgttgcccggttggtttttaattcaagtcatattgtaaaatggaaataaatagtcaaccaaaacttactgtatccgctctctctctctctttctctacttaacacatagtcaagccttttctatgttttctctttcgctctcgctttctaacgcaccttttaactctagtcaaagcttactgtatccactctctacagtatctgctctaatgatcaatttattttcaggaacatttggggcgtgccttcttcaaattttgcccgttggctatgccatgcaaatttttggtagaaaaaaaattttatttcttacatatttattcatcttttctttttaaggtgctaaacgcacacaactttttattggcattgcagtttcacttgccacgggattggtgggctattaatattatttgttggccgagaaacgcgcatagaatttttggctctattccaatttatttgtcagatcagtcactcagtttcatttggccataacttttttttctgacttaatcctgtttatacattcttggtatcaaacgaaagtttaaattgtctacaaaagagcaaataccgtattttctctaattatatgcctgtctccattaatctacccgtctacaattatccccacctttcgaagtaggtttaaaaataatatacccctggccttgaccaggaaaaaaaaattatggccaaagaaactgagtggcttaaactgaataaagccatggtttatcatgttgcgataccgtagccttgtagaaactaatgatggtcttgaagcacgaatctcgggctcaactcttttgtcttaaatctctggaatttttttcgattttcggtacattttttgcatttttttgctcttatgcagatgccgcttgccgcttcaacgaacttttatgcattattcgttgctcggatggtcaacgggttggccatcaccaaccttttcccggtggttggcgcaatttgcacaaattgggcaccgctcaaggaacgaggtgatgagcagtgcaatactgtgtttccgttacagtatctatcaacgtattagaggcgcggacggcatcgggatcccgacggggactttcccgggattctaattacgatctatcacaactcaatttgaaaaaatgttaggatcagattcccgataaaatgtggacccggcaaaaaccgggagttgggtttcactccggttatcttatcctagccggattctcaatccttgtcccaactttttcaaaagtacgtgcctaactaaatgttcgtggatttattgtccatgaagctgtgcgcaataattaaacattcaaatctcaggcgtttttttggccattttgtccggctacattcaattgtcggtgatcatttccatgccaatttccgggtttttggtcgataaatgtatactcatttgtttatttttttaatctaattttaattatataattagttggatggccatccgtgttttatgtccatgcattcatcggtctttcactgtccctttggtgggcactcttttaccgcgacgacccaatggcacacccactgattgggcacgcggaattggcactgatccgacatgggaaacggccggcaacagtggccaaagacggcacttctaaacatagccaagtagatttgatttgaagtactcggcacttttgagaattggccaaatgttcgcttatttggagtccagttttgaagtgggtgtctcataaggaaagtgccgttgggttttgccaaaattgacaaaaaaaaacaaatttttagccgccctatcgtcaaattttctcatctgcttcaatttgggccattttttgcgctgtgtttggcaattttctcattgtccaagtgatctgaaaaatattgtaagtggaaataataccattccatttttttaagtttttcaacactttccttccgatgtttctcgtctcatcattgcattattcacatgctgagactggtctgctttcagctttgccactcattttacaagtaaaaatatacaatagtttcacaaatttatagttggtgtaattattttttgatttaatttaaaaaattattttgtagtataacgaatatatttaattaatttaagaacgattgggaattcacaaaattacagaattgtaaaaataattaattttacgagcgtttagagggttaaaacctaatcgggccaaaatcctttccccgatttcctaatttaattaaattttgatttcaaattgaaataaattaagttttttgtcaaatggttgactggcttcatcactgatcatttgccatctgttaaggacattaacaaggtggaattgaaaataaacagctaatattatatggatatggccccttttaaaatcagagattttgaagtgctaataataaataattattgaaaaaatgcgtattcgaccttaaaatatcggtttttacgggttaatgaattgtggattttgcaaattttaatgagatttataaaatataaattttcaaaaaatttaccaatgctttgttctttttcggtccgtttctgcaattcggctgcattttttgggtaatatttttttttacttttttaaaatttaataatctttaagttctgcactcttttttctgcttgcctcactcttttctccagatatgtttccccgttggaccgtcgttctttgtttaacattggccattggtaattagtaattactaattacaatggaattgctactacatagagaccagaaatttcaaatgtgcgggtcccgctgcgggattgggattaaaattttgcggacggtcggacagaatcccgcgggattaatccagcaatcccaaatctcgtattttttcctaaaaatacgggattgcggactgggatcccgaaaatctcgcgccggtctctaattgtgcctactcatgactcattagcccatgtcaggggctaatgtcgaaaaaagtgccataaaagtcgcaaaaatttgtggcactagggctgcacatagacttatgtaatttccacctcgaaaagcattgcttggcatgaacagcggcggcttcttcaaatcggtggtgctcgtgtcggcacagttcagccccactgttatggccgctgttcaattcactctctgtgccaccattttcattttttcatttgttgtgccggcaatgaccaaaaatggtggtcattttgaggtaaaagcgggagaaatgattggctccttctttggatgctcacttcctcaaaaattttccaagggggctaatttttgatgattttaagtaattttcgcaaataaattatattaaaatttccaaaaaatttcctcggcaatgcccaacggcaacatcggaccccaattataccatgtttttgatatttggccccaaaatgcaaaacttggtaatttcttggcgaaaacggctacaatttcctcctttttttccccacggctgaaaattttaaaataacactggagaaattttttttcttggaatttttccccaaagagcaaataaaaaagtcttcggatttctccaatcggaaaatagaaattttgtctatcggcctgagcgaaatgataaatcaaat

SEQ ID NO: 4894 - DNA, 2414 bp, Heterodera glycines
  unsure (1)..(2414): unsure at all n locations
acacaaatgccatcgaaaaaactgctcacagatccgtcctctctcggaaccgtcggcgcaaaagtgtcaaccnnagcggagtctttttccaaaaattgagtgcctcaaaaattgagcagaagaacagcagagtgcgggacggcacacgcagatgccgaccacaaaccggcaaatccgcagaagacagacgcaaatcaacgcaaattgacatttgtccagaaaaaattgggaaaatgggtgtttttataccgtctaggccccacaaatttccataaaaaaatttcggtttataggtgattttgagtggttgttggtcacgaattcggcacctgttgcgacccatttttggtcatttaaatgattataaatacttgataattttttttcgaataaggaaaatttttaaacctaaaattttttagcacaaaaaaattaaatgttagcgatcaattttgagaaaatttttcaattcttaggggatgttttttctaaattttttcgggtaatttcttagggatgtattttcccgattttattgttttttgagatgcgaagatggccaagcgaaaaattaaattcatttcttatcctttattcatcaaccgtcgaattaagtttttttataagtcatttttttatagtttttttttaaaaatttttttaggccaaaaagtaaataaatttattaaaaagaaaatttaatctaattgtttctgaaaaaagttatttagactagcccgggcaaatttcgttcttctttttttttttgcatttttaaaatccctttagcttttcgctagcccggacaaatgttctcacctcttttctcttcgtctttaatgtccctttagttttcgactagcccggacagattttctcacctcttctctttttaaagtccctttagtcttcgactagcccggacagaaatttaaaatgtcagacttctttacttgcgtgtacacgtctttgtttctagccctcaggccagggagatctcccacaaacttctgccggcttacccaattctcagcttcgtcgtcaatgatgggtcgtttcccaaaatgggaaccatccggtgctaccagtgagggatgcgcactgtgccccagaccaactatgcaccgtttatcccggatggagtttgggagggaatggggaaaagccaaggcgcctttgaccaagccccgaacccccaaacgactcattgactgttaaagatgtgtttattcattcgatgttggatttaaacgaagtgagaaatcggaataataattgaagtctcttccatcaccactgactgactgattgatcactggggaaagagaaatgcgaagagaatgggcggagaaacattacaatgagaaaaggaaaaacgtgtgaaaatggataaatgtgattgaattgataatggccaataaggaataattaaatgagggaaatgcgtcgaataatccttacaatgctgtgcttttctcaattgttatataaaattggtgcacattatacatacataatacatactttagaaagaattgttatatggagagaaataaattctgtttttctctgttaaaagagatattgaaatagtacgccgaaatgagaggtgtatttttctctgcactctctatttattgcttcattttcggcactatctatttattggtttcatctctcatttttgggacggagtaaacaggggacggcacgcggaatttgtttcaccgacacggcacagccgcaccttcgaatgccaacagatgagcatttgaccaccgcaattgccatttttttatgcttttctcgtatttgaaaattttgttcaaccaatttttcgtttgattgcccttttcttaatgagcataattaatttttttttttgttagccccgtcccctccgaattttcttcgccttcgccactcccgcgctttcctttgctggtaattgcagtacggccacaattccgcgacacaaccgcactccaattgaaggaccaactccggcacaactgcagaggtgcacagatcaaaggctatggtctaataaataattgagaaataattaggccgccggatcgaagccgcgaagtgcgcactgatcaaaaaagtacgagtttgggtgtgcgagagttttgggtttcgagggtcaatgttcggtttttatattcttgattgatgtgtgaacctccaaatctccaaaatcaattaaaatagtaatattatacaaaatgggtgttattgaagcaatatttttagggaaatggcgcatttcttcgctttcggtcccattgaggaattcggcttcagtttgcatgccgaaaggggcaaagccacttcttcagtgccgttgacaaaggcagcatcgccgatgagtccgtccgattgaccgattccattctttgcatttcatt

SEQ ID NO: 4895 - DNA, 3406 bp, Heterodera glycines
  unsure (1)..(3406): unsure at all n locations
cagaggtcgcccagatcaaagggtatgttctaatttatattggagaaattattaggcccctggatcgaagtcgcgaagtgcgcggtgatcaaaaaaagtacgagtttgggtctgcgagagttttgggtttcgggggggggggggggggcaatgttcggtttttatattcttgattaatgtgtgaacctccaaaatcaattaaaacagtaatattatacaaaatgggtgctactgaagcaataatttttaggggaatggcgcatttcttcgctttcggtcccattgaggaattcggcttcgatttgcatgccgaaaggggcaaaagccacttcatcggtgccgttgacaaaggcggcatcgccgatgagtccgtccgattgaccgtttccattctttgcatttcattcggtttgtttagtgccggcctcgaaacatggcaaagaattgtcggcgataacggttgtttggtctccgtacaagcaaaaaatcgtcgctaaacttggccccactccttttgtaaaattgctgcctcgaaatttgtggtcaaacttttgctgcaatcagcaataaaagatattagcggcccaattttttcgacaccaatcaaaatataaacctcaaaatttttgtccaattcaatataagcgaattttatgttttttttttgataagcggattcaaattacaatactttctcgaatccattttaactggatctaccaagtataaaaactgaaaaaaggaaagtataattgtggagaaatgtcagatcgatcagatcaaaaatctattgtcttgaacaaactcagtttttgaaaacaatactaagttgaaaaagtccggcgtaatttgaagaaaaaaaagtatttttaatgttctattttgattggggtagaaaaaatcgggccgtcaatgctcaaaaatggccttagaaatggccgcaaatgtgaagcaaaagtcggaccgcaaaattagtgacacgataaaattaagggaaccaaaaggcgcgaacgaatgcaaacgatcatttcggtggatgaaagtcgcgagccggcgacccctcagcagaaaaagcgcaaacaaaagcagcaagcggtagaacaattgcttgtggaagtgccggaagaagagcatcagcaaagcggaagaaagccggcgggagggaaaggcgaaattggcgaagaaacggaggggacgggcggaaaggaggggacggggcagcacttggaggaagaggcacaacttcggcaaattggcccaacaaccgacacaacgccaagagatgccgaacagacggggatgagttttgttggcaaagtgaacacattggaccagaagattgggccggaggcgaagcggctgcaaattctgttggaactcacgcacaaccggcacaacagggcgaatctgaacgcaaaacagctgcacgtggtcaatgaaatgttcaacttgttcatgtacaatcacacatttgttgtttacctttcattcattcgttattatctttggcaggtcgcgctggtccaaaattgtggccacaaacagccaatttctgaacacactgaccaacccggaaccgttgctgtcaaagaggaaggccaaccaacagggcacggaaaaggagggcaccgttgctagaatggcccaacaattgtccgtttggctaagagtgtctgccaaatacgtcgacgaattgccccctcaacgccgccaagaggaaaagctgaggaaaaccgcacaaattgcacggcaattcagcgaacagcaaaaccaaatgagccaaataaaacgaatggtaaggcaaaaggaggaaaagcggacaaaaggaaaaaacgaaacaatgtcaggcgaaattaactgggaaagaggaaggccaattggaagcattggagggacaaatggtcgaactgttgggccgaattgacacggagagacgcgaagcagagcagagtgaaaggcaaagtgccactagcagacgggtaaaagattaaagcgatgaaaatgaaaaagaggggaaggattggcaaaaaaaaagtggaaaatcaggcacaatttgtgagaaaataaggccaaaacggaagaaataagaggacacagctgactcagtgatgatgttggaagatgcgcatttgaaattcacattcttatcagccaaccaccactgttcaaaatgggaaaaaatgactcgccccccgacgaattggcaaatttcccgcgtgccctcgtcgcttcaaacatttcgcctccgccaatggatgaagcggaatgcttaaggcaattgttttgctttttgaaatgttatttgaaagtctttggcaattaaggcaatcatttgttctcatggaagaagcggaattggccaaaagagaaaatgagaaaagtgagaggggggaatgggagcaatggctgagggagaaggagagtcagctgccgggggatttggacagtttgtcggcgcaattggaaaactgtgacaagtgatcgaatgccaaatttggccatttcaaaacaaaaatttgacagaatgttcgcccaactcggaagaagactcaccgaatcggacgccgaaatggtcgaaccgattaagaaattgcagagaacggcggagacaaagcgcacccattgcatggacaacataaacaaaacgcaggcaaacagaaaacattggcataaaactgacaaatgagagcaaatggattaagttggccatacacaaagcagtggaagaggaggagacgggggacaaattcaggcgagaaatggtctttgaaaagacgaaattcggaagagacattggcgagggacacggaagaaaaggtaaaggcatgaaacagcggcagggagaagcaaagggaggggaagggtggacagcagtgaattgacagaaaaagccaaaccaagaaatgacaccgacgagagtctcgaacccgagaaaccctcgagaaagtcaatccttccatattatcttttccggtgatctgatcctttatttcctccgtttttgngctgtccttcgatctctttggacgcttattccccttccgtcgcaatattccttttctgctgctcattccgcatcctaatagctttgcttttattcagctgcccttagctaatttcttcgcacctttggggcaatgaaatgcatttcgctgttctcccgtcccatcagaggcccaagttacgaaataaaaaaatggcaaatcaaggagaggagagatgaaaaagtgtaaatctctgaagaaagaatcgttcaccgtacaataaatgatcaaaagggtacagtggagagtaacaaaaataggtgccaggggggggcaaaaaatatgggtgccagggggggcaaaaatagagtgccaatggggcgggagggaaacaaaaaaaaggggccagggggggggggggg

SEQ ID NO: 4896 - DNA, 574 bp, Heterodera glycines
taaaactgacgaaaggagaaagacggcaaaagggggaggagaaaaagatggaaagtgtgaagaagagagaagtggaaaatgggagagagagaggtgaaggtagagagacggcaaaaggtggaggagaaagtgatggaaagtgtgaagaagagagaagtggcaaatgggagagggagctgaggagaggaaaggagatagacgacaaaagggggaggggaaagtgatggaaaatgggaggatgagagatgtaccaaatgggagagggatgcggagaagaaatgagagagacggcaaaagggagaggagaaagtgatgtaaaggtgtctaaaatcgggttaaaatctcagttttttcaattcctgatcgcctaaacagcattatacatgtgatagaagtgattgtacctgataatttgattgtctgtaactttttgaaaaaaccattaattattcaaaaaacataagtaatgtcctaatatactagtagattactatttcttaattttaatgctgtttaggctagcagggctttaaaaaattcaacttaaaatccgattttttacataggcgcattt

SEQ ID NO: 4897 - DNA, 678 bp, Heterodera glycines
tttccgttttcattttgaaagaaaattattttttcttttcttctactcttggaaagaatagcaaatcgaagatcaatcagccataagcccaaaggaacagaagaagccgagggcaaatgttctccttttttgttcaatttgttcgcttaataaattcgtttttcataatccaaaaataatttgcaaaggcaattccatcgtaaacaaaggacagctggccaaacgaacaaacgcgacaaatggccaaacattttctgcagagagtgagggcggggggcacttcgcacttggcaattttcagggggcggcacgaacgcatttcacaattattctaatggcatttgcttaatccattgcaggaaagcgtcccattatgaagagacactcttttttattatgcttctttaatttgtgggggcggaatgtccggtggttataagaatcaatcaccaccaccaatgattcttaaggaattttaaaatgggattaagaaacggaaatgattattcatttgccatttaattcagcagatattggcaatttgaccgaagatccaaccccattacgacagaaaccaacggcggaagagattaatgaccaaatagggagggggggggggggacggaaggaccaaaggggggggggagagggaggggagataattatgagaacaaacca

SEQ ID NO: 4898 - DNA, 2630 bp, Heterodera glycines
cgccgttttaggcaatttttctttctttctcttcggccttctccacgtgatgctcttctgctccctttaccaagtgatcagccaacccgcaattaggagctctatttccgcgttaagtcgtggattgtgactacattaatcagcggacagcgactcattcccttccaaagtctcgaggaactcatccctttgctggagagcgggcggtacaaattcgccgctcttccaacaaatcattggttttgtcttcgctttgcttttttcgaaaaccgatccaaagccccccccccccacgcccgactcaaaaggttttttgaaacggtcgaaagttccaacgacccgcggcacattcgaattcgaaatgcgatgcgcaaatatccgcttgaggtttacgaggacgagtcgcaagtgatggagctcgttcaggtcttactgttggccttcaaacatgcgatgcccatttctgttttagtccggcactcacgtggccatcgtccaaggcggcaataccctcgaatgggtggccaattcgttttgtgaggtcgttttcgtgaggggcggaatgccggaaaaggccatccatttcgcattcgcaaagggctcaccgtttgtaaaaatgttcaacgaagttccaaacatttggccaaattggacaaatcaccaacagcgattaaggcaattggacatgaggcggtgtttatgcacagaaagcgatggaaatacgaatattacacggagaagcagagagagcgcttttgtttggagagcgacagagagagaaagcgcttcaaacctttgggtgggtggcgaagactaaatcctcctaacgcaacaaaacggcctactcagaattggccactcataagcgtaccaagcgtgactttccttgtggcttaatccctttttggtattccgtccatggcttgtttgtcggcctcccttaccaagcgtgactttcctttaggcttaatccctttccttggtccttgcgttgtgcttctcttcggcaatgtcatcgctttggttgcgttttctatggaaacaatcgttcacttttttacgcgccacaacataaggaaatcggaagaatgtccgagaaaacaaatggaagaagcaatccgtgccgaaaacctttgcactgacaacgaactctttgaaatgcaacgaagaaaagaaaaatgaacgcaaagattgtatgattatctgattatgtacattgataactgccatttaagagggattaagtttcaaaattgccgctgacaataaaagtccataaatttaagtcaattaattggttttactttcgccaatttggcaagaccattttgaagaataaaaggcaaaaattcttgagaatgagcgagtatttgaagaggatcctgtccatgtccatctgctgttggttgctcagatatgaatctttttccgctttcgccattctccgctctctccgattgattcttcccctctctctcccccccccccactttttctaattgctttattcactcataattttccctcatttattctcttatattttcccaatttccccctcccctttttcttttatttaaatcgttctgagaatgcgccgtcgtaatctgttcaagatgttcttcaacaagtatttgtttctgtttgccgctttccttgcctctgattatgtgctctattcgaaattgtcaaaatttttgttggatgaaaatttggatttggaggaattaaacgcgaagacattccatcgggtgaccattgaccaactaattgccaatgtcagccgcagcactccgttggatttgctgaccaaaattccgagtcggaacgacatcgacccggaggagaaaagcgcgttcgcatatcagaaggtgaagcaacaaaaaggtggggttgctgatcagagtgatcagaggcgagttgagctgatcagtagtgatcagaataaaaaaatgtgtgtaaaatgggagtgtcaatggaggaacggtaattagtgtaactttatctgctgcaggcagtgtgcaattcgttgacgcggattcgaggagatcgcaacaatttccaaatttgttatcctcctaaaagaaatctcaccggacaattggcaagtgaatgaagcaaccgaaaatcaaagtgcggagaatgttttaggcgtatttcataaatgggaaaagggacattccatttgagaggaatttcaaaacgatgctgaaccaagggacgaagctgaaagtgttcacgaaggtgtgctcagaggtcggaacacacattgacaaaacttttttgaacagaagaaccaatggacgacggaagacggacaatgggaggagggggcggacgttgtggaggatgtgaacgtgaagatttacacggaggaggaggaggacgagcacggacagagccagacgggcatcaaggacctgatcgactcgcaggacgattaccatctgatggaattcctcaaattcgaaatgagcagtcagttgagggagggggaagggcgggtgctaaacgttcgttaaaccaccaattgagccatttttgaacttaaatccgtcataacgtaattctactcgaagagcgcccgggtgaacggatttttggtgtgtgttagagagcttcagagtgtt

SEQ ID NO: 4899 - DNA, 4802 bp, Heterodera glycines
taataaaatgatgtgatgaatgaagactgaatgtggaccagcaaaagtgagtgacaaaatgatggctatttatggacgatgctgagagatggtattgacacgaattgggtacagtaaatggcgtacatttgaatattgagtgatatacacaacatttacaaaaatttttttataagattttacaagttaaataagaacccatcattttgtctcagttttgattctccccccccccgcaaagacttgaccgatcccatcgttttctccataaatatccccgtgttcgcctcccatatgctcatccgtctcgatcacttctcctacaacgaatttcgatatctgatcaaaagactcgcctatgccctttattttccgtattcagtgagcacaatcgaaattcaagctgataaaacgcatttctttcctcagattgaaagtgatcggaaacttcgagtgcatttcgtgtcgctaatgcacaaatattccatggacagatataatgtcattggattaatggaaactaaatgggccgaaaaagcaatgagtgaatgaaagagagaggaaagaaaagttcaaccgaattaaaagattcgatttatccaattgtttgttgaacattgattatgcaaaaatatgctatttcattagtaaatgggctgtgggtgagggggtgccatcagtggagaagccgaattggggccaagactgattcgtccggcctgttgctgcatcagctggggcggaaggggcgcggattggtcggacacaaatggcgggggttgggcagcggccccattgaaaaacacctgttgggacagggagcggatcagatcgatcaaaatgggaaacataataaatgaaaaagtgccaaaataggaaaaaggaaacggcaccaaaatcgggtaaaatgaatatagaaaggttaatcacccacctgctgttgctgccgatttggcaattccattggagggaatcggtcccatggaaagttaaagtcgagctcgtggaactctgcgggaagggggggggggagattcgttgagggttcgctaacgcagcggctgaacccaccgtccaaactcagcttttggttgttgtcccggtcgaactgccgaaacacttccggcagttgtgccacactccgctgcaatgttccattgatgtaagtgcttagttcgtccacgctgagttcaccgtctcggttttcgtcgttcttctgaaatgccattttgcttgggggcattgcccctgaggcgatcgctttgcctgcagcgtgaacttcgatgcctccagcatggccgtcttccgctgctcgtccaaacggcggacaaacgcgtcgaattccgccttggtcactttcccatcgcctgtttttctaacattttctccttatggcttttcctccctacgatttgtgtcaatgtcgttgaattcagtccgcaccgattccacgtaaaagcgatcgcgtttcatgtaatcgtccagcgaaatttcgttgtcccgatcggtgtcaatgcgacggaacatttcatctgatcattggatcactcactcaattcccttctcttcgctgtgcttcctcggcttacctttgctttcgggctttatcccaacgaattgcgaattgccttcgcttgccaccgcttcttccgtcggcgttggcggcgattgtctggccacttttgtggttggcctcgtcccttccggcgtcgttgcctcgggggggcgaattatttgcgattgggcggtgggggacgactgagttgtggcgagggatgaggacggatttggggagggaattgaagcattttgcgcgaaacattcaaatggcaaaattgcaataagcaaaaggaccgaaagaaacatctgccgaaaaaggaattttgggaaaaaagggaaaaatacgaaaggaaatcgggggggggggggatttggcaattgataaataattaagtaattattacattataaaataatcatttgcgaaaagtgaacgcttcgaatatgctgtaaattgcttttaactgtgcttataagcgcacttttgctaccgtaccgtgttttgttttgctacggtatttgtgcttaattttgcattcgctcgccgtcggcgacggattattcccacggaaatttatccgatcagagagaatacacacaaaaactcgtcggaacattggagggaaacaaagccaccaattcgaatattttgcccaccgatgggtcccccaaaatcggatcaatccgaaggatcaatcggcggaacgaatccgaccaatgccttcgtctttttgcggctctgtctcaatgaatggatacattttaattcaaatcgaaattggcagtcgtttttttcccttggccaaatgtattgttttatttttccatgccttcgccccaatgcgtccgccactccttccgtttgttttttcgcttcctttgctttttttcctctttccccgtctttcgtccggttgggcacctctcgacgtgatcaatccccagcccatacaaacaaacaattaaccggacagaagaaagggaagcgaatggatgaataatgcttttgtgtccctaaagactccccgaaggaacttctgttagtgtttgtttttgtattcccgaacaaaaaggcaaaagaagtcattgttttatgataataaaaccgtaatgaataaacaaattcttaaatataacaaaaaatataaggcgaaggcattctgaatattcttaaaataatttggatatgtttaagttgggaatggattataaaggcattattggaataattagctaattaatgttgccaaaggcaatcaacgcggtgtcatcagcgcttttccgccatcgattttcagcagctgtcccgtggtgaaggtggcatcccgtgccaagaacagaatgctgctggccacctcctccggcgttccgactcggccgagtgcgtgagtttgggcaccgcgacgaacaaactgaaagtcgaagaaaaaagaataattgaagggcattttgagcaagactcacatcactgtactgctcctcgggcattcccgaacgcaaatgcaattcggtgacgattagtgcagggcttaaataagacaaacactggtcattgacccgttgggtccctcgcccacttgacggcattgactcggatgcctttcggtgccaattccatggaaaggcattccgtaaatttgtcaacggcagcttttgaaatgcaatagtaagtcacagcaggaaactgaacgaggaaaaataaacgctaatttttacaaataaatgaccaattttgaataaattaaaaagcaaaaggggggacactttcggtttccaaatttttttgtaggaaaatggtctaatcgtgaaacttgcttctggaggttttcaggttgctaatcacgaaaatgacataaatccctgacattttaacaaaaaaaaatttggataaagaattagtcaaaattgatgttagattcgtggtcaacaaccccgaaaaactaccggagcaaattaaaaaatgaattggcaatagaatttaaatataaaacggcaaattgaaaggaatggctaacgaaccgcgcaaatgccagcgatgctactcactaaaccaaataattaggcaattgcaattaatgcaaaagaaacaaccgttcacaatgcttcctttcgtcttctccaaatacggaacaaccaattgacttagtctgatcatactgaagagggaaatgagtgaaattgaagccaaaatattaagtaactgacaaatgagtaattcaaaaatggatggtctgatttttgattttattgctcaaaaatagagatcgacattttgaaaaatgcctggacctggacctggattccatgttggacctggatttcctggacaaaaatccaggaaaatccaggtccaggaaaaatccaggctcctcgagacctggatccaggcctggacctggatttttttaaactcattttaaaaatcaaaaaaatgtttgaaaaattcaattaattgcttgggaacatctaaaaatatctaatttacaataataatttgtttttaaatatatttaatcattttttgaaaacttgaaaaaatatcggtcacttgaaataataaattctaaaattttgtccaggaaaatccaggttttttcctgttttgcctggacctggattttttttcacatttgacctggaccctggatttcctggacaaaaatccaggaaaatccaggtccaggaaaaatccaggttgtcaaaaaatgacctggacctggatccaggaaaaatccaggcctggatccaggtccaggtcgaactctactcaaaaacataattagcaataaaatcaaattttcaaaaataaatttttgtttctttttcatgaaatctgcaggattattcattcattcgctcgttttgccttaccttttcacattcacattcatcaaaccatccaaaactgaagtcggagtgttttcggctcctccggacgcaataacaccggcacaattaaccttcaattagtaaagaacatccttttctaattaggtatttatttattcaaaggtctgaccaaaacatcgattcgtccaaagctttcatccgttcgtttcacaatgttttgaagcgttttctcctcacaaacgtcgccaattattgtcagaacctaagagagagagaagtgtgcccagttttcagcgtttacttccttttttcgacctgttctcgggtcagtccgccctctgccaaacaattcgaggccactccctccaacgctttttcattacggccacaaa

SEQ ID NO: 4900 - DNA, 1057 bp, Heterodera glycines
  unsure (1)..(1057): unsure at all n locations
atagattagaaacaaattaaataatattantgtaaaattaaaaaattaaatattcaaatttcgtaaagaatnttatttagattttttaaaataattattttcataatgaaaaggtgatntaaaattgaaaaaatttctttaatgaatttttgaattaaatatattttagacaaatttgttaacagagtttgaaccaaaaagggttaaaaaaaccgaattttgggtaataatggtttaaattttgaaaattggaattattctataaaaaaattatgaaactttatttttatttaaaattttttaaagtttatgttctcaatgaaaaaattatatttatcaaactctgaattttttcctttctctcaacttttgatctcgaatttttatttttgctctcgcatcccgcttcaagatgtgatcaaaataattttatacgaattgtacacaatgtttgtttaaattaacgatgataattcttcgaccataaattctgaattgtatttttattttattttttttgcgcgccaaaactgaatagaatgtaattaagaaattaattaaatggcctttttaaaattttattgcctcttcgctagtttgggtttttttcaaaaatgtttactaatcatcttttgggattgtctttcttttcgcttattcctaagtgagtgtcgtcagcctctgtttttcgtccgcgttgtccacgtcttccaaaaataacttgtcgtccccccctccgacttcttccatttggcccaatggttctcttggcgattgtgtccgtgccatttcctccttcagaaacatgtgccataattggaaaacaatgtctgtggtgatcaaatcgcccgcattggacgcttaacaaataaaaaatgggaggtaaacaatttataataattattaaattaattaccaattaaacggagcagaaaaacaccatcggaacgtaaaaaactgttgacgaactttccaattgcacgcttttctgagggattggaagtgattgtgtcgtttttgggagtaaaatttacgatgaatttgaattacccattgg

SEQ ID NO: 4901 - DNA, 4205 bp, Heterodera glycines
ttttcttctccattgttcaaggccgtccctccctattatgaattttgtatttaattgggggctccttccccaacttttccaaaatttgatctgctgatccgttcagcgactaatttggtgtccctccgttcattaaataatttctccaaaatttactcgccatttccccgattcttcattctctccctccctttttaaacttttctacccacaattcccagaaggtccctttacaaaacaaaaacagctaaagacgggaaagaatgcgtaaaaattggagagaaacaaaaaaacacaaaacgcctccagcaaggcaacagatcagaggaaaagggaggaaagaacgaaaaagtgatcggagggggggggggggagagtttcatcgaagtaagttaagtgcatgttctccctttcgcatttccaattaactccccaaaatgtcccaattcttctcgaatgactccccccccaaatcaccctcaggtcttctcaaccattaacaataatatacattattagtatgagatcaaaagaagcgcaaccccacccctttaagataatgcgactctcgccctctctgtcactaccttttataatagatttatttaagaggatatgtattttaaatatcatcttctatttttttttttttgattttgtgaaattctctaaatttaaaacaacttttgaaaatatttaaaactaaccaaaattggtatatcgtaaaattgatgtacataaaaataaaaacatataacaaaaatcaaaaaattcaaaatgaaaaataatctgataaaaagattaaatattgtctgaataagatataaagaaaaatttaattaaatggaaaattcattggcaccaaaccagagttgccacccgaatcccgaaactcgaattccgacatttttctcgacccgaaacccgaatcctaaccagatgcttctgctgggtcgtgattcgggacaaaataagaatgtatattaaaatttttgtgaaacaattgtgttcaagtaaatcaattattatctgggctcgtaatgtgatttagttttattatcatgttgtctcgtcttttattcatttctttgtgctttaaaaattattttttagatcacatagaaattttaataataatttatgaatttctttaattgaaattttttcaaataaatacttagttttatttacacaaaaattagaattaattcattatatatattcgaaaaaaatcattcaattttttaagtcaatgttatgtattttataatattatattatgtatatattgtattttttattaataaattcactaatattatggagttgctttaaaactaataaatgaaatattaattattgtccaatattattttaaaaatcaattgtttatattacaatattacatatacaaattgtatttataattttctgttggtttaaatatatttttgattactttccagtttcaattagcttcatggaaaagtatgttattttaatttgattaagtataattatgacttttgttatttcgaaacaaattatttattcaacaaaccaatataaatatgtaattgaatcaaaattaaaaaacataaaaccaaatttgttagaaaaaagcgtctagaaatatttgttttccattatagtatgctagatgtaaaacaaaaattctgtttattcattaatttaacttagtaataaatgcccgaaatagtggcaaaataaaacttttttaattcaaaaattaaaatattggcatagttacatattttacagccgtaattcgaataaatattttttcaaagccaataaataagaatttataatcaataatcaaatcggatttatttattttttttgtattttataattatagctaaagtaataaaattttctttttgcattaatttttaatgaattaatttaaattttataaagttatacatcttaatgaagtcaataatacttttaaaaaatacttgatatggtccaatatttcttataaatattaatatttacagaaaaaataatacttaaatttgtttagaatttctttatttttgtatttaggttccatttctaaaattttttacaaataaaggtacttagggtgtaacataagtttccgcacaactttttttaaagaatttttttatgaatataaatttaaaaaaccacaatcatgatccgaaatatctgacattattattgagaatgagtttgctatttatcgggcaagggataaatcccattagaaaagtatttaaggagttagagttgataatgtaaaaatggtcattttcgaggtatgtatttttgatggctgatttaaagaaaatgaaaagagatacagaggcagagaaaacgtgagtaaatagagcaaagttaggactataaaaaattataagaaaaaaattttattacttcaaaaatgaattattggagggcggaatctaaaaatggtctccaaaaacggcatttttcaagaccatcaaataacaaaatgttttaaaagtggttttggaaattccgaatttaattaaactatataaattgaccacgctgagtccgaatatggctttagatttggtctctgggttctcaacaaacctgtacagctccaacttcatgcatggagttggagcagtacaagctcagagttaaaagataggtcagatttaaggccatattcggattctactggtctaatttgtacagaaaaccttcttttttgttatatcaggttacttttttgaccataaaaaatcgagaaaaattagtgggccaattttcaatttttgcatggtcgggaaaaaatactaaaaaaattgaataagcaaataaaaaatgaaacaatggcatgaaatgaaagaagactttctgacgaacaaaataaaaaaagaattattaaaataactgcagaaattacggagttatgaatttttgaatttgtcaaaaaaaaattgtgcggaaacttatgttacaccctaagtatttagaaaatcccgaattttctaaatttttttaaaacaatcataaaatttgtacaatttgaactcgtactcctagaggtttttggccttttaagatggaaggaatcatgttaggtagtttggttttttgttcgggttttttggaaagaagaaaatgtctttgccaaatatataacactacatatcttcatatttcctttctctgttatgagtagagacaaaatgctgaaataggtactaaaatgggtgctgaaaaagtgcaaataggtggtaaaaacgcccaaaatactcaaaataggtgttaaaaattggaaaaatccagtgtttttatgcactaaaattcaaaaagtgactcatttttgatcaatttcgcccgcacagttgcaacttgtcaagaaaacaaataaataaattttggagacgcatttttgggaaaattttttatttcttatggtttattttctgaaaatttggtcaaattttagggggtatatttttctgaaatttttgggatcgattcttatgggtgtatttttcgttttggctcttgtggagtttaggtcacatacacattttttttaattaatagcgaatgaaaagaaaaaaacagcaagcagattttgaaacggagaggcaatgaagccatacaaaatagccatttcatgcatttgaattgatttggaataaatgttaatttagttgaaaatatttgactttttgtttgaattcgggtcaggggttcgaaatgagtcgaaatggatgccggattcgtgatcattagggctataaattatatgcactaaaaaatgccaaatatgcgcataaaatatgcactaaaaatccttcaacctaaaaacccgaaaaatgcccaaatatgcactaaaatatgccttaaaactgccaaaaatggcttttaaccatcaaaaaatgccaaaaattgtgtaaaaattcagaattgactttaaaaactccaaaacaatggctaatgagcttttttttagacaattgcaaaaaattttaatttcaaaatttatatatgcaattttgaatttttttttttaaattttattttatgctcaaattaaattacttttttttgtatcttgtatcaaaattttttttccaaagttcttacaaaaagttcaaaattttttcgattttcaggggtatattttttaaaattcacaaaaagtcgatccttaaggg

SEQ ID NO: 4902 - DNA, 5764 bp, Heterodera glycines
tagaaacacaaaaatggcaaaatatgcatttcttctcctcacactagaaaatatgcttttatatgcactaaaaggcttcacctaaccaaaaaaatttaacgtagaaaggctattttgagcccctttcttcatagcatatgcgcagaaaaaatatgcaaaagcatataatttatagccctagtgatcattgaccgcaaaaacctcaagtcgcttcttttattctgaaacgtaaaaatgtgtaaaagtattgcaccaaatattttcttcaaaaatccaattttcaaaaataaatggttgcaaaaatgttttgcttatgctaaacgaagcgtcaattagtgcactataattttattggtcttcgagaaaattggtcatgacccaaacaaacccctctatggcggtgcaaaagtaatgcaccaaaatctttaacagaccaaaactcaattttatatagagacaaaaatctgacgaaattcattctaaaacgaaaagcagtaaaacattgaaatttttgaaaattgttcagtcccgatttttttctcggtgtccaaatttccagccacgacattttattaaaaatattttaattttttttagtatccatcatttgtctaaaacattcgctttttcagcctctttctcccctttccctccctcatttttaatttctttaaagttttcggccatttggtgcgactactccaacgggctcccggacatttggacagggacattacgacagtgaatgcaaattttttactgataacaacttttgcaaacatatgctaattccaataacttaatttcccaccgatttttttggttcttgataagaatatttgtaaaacatcgcttatattctctcccgttaatgcctatgggtcattcattcttaccgaaatgcattcctcctcatctctgaagagggggaaatccacgaaccccagcaaaatattcaggctcaagagcaaaatcccgaccctgacaattatgaaaaacgtttcttttttggtgaaactatccgtcaaaaacttgtactcaaggcagatggctttgaatacagctatgaagctgacagtcgcattgctgatggtttgaagtccattatctttttctttgctatctcgacttaggcattgagatttaccgttgcattcaacgacgcccgtattgtcctggtcgaaggcaattcgcgccatttaccttgaccgtgttaatcgcccttttttggcgtacttgcgcgcaattgcatatagaatgcctgatccaattgaaaaatttaatcatctattaataggatcaaaattgtatattttacgtattttatccttttttaagatttgcattcactgtccaaatgtccactgtccaaatgtccggtcaccctccaacgcctaacttcgtcccaagaacgttcagttccgtctcatctgatgccgagagttcttccaacagtgcgtcctccacctccaacaatcggacttggccaaaatgaatcggtgggcactgccgaattaggcaggggtagactatttttaacgcccaaattttaaatgtatataattttcaaactaaaaaagcgggatacacccaaaacgcgtcgccgccgaaaagtcgccagaaaaaaatccgaaaatcacgggacataacattgccgcaaaaaaatacagaaaataattttagtttttgtgaaaagccaggtattactgaaataattttctgaatttccagaaaaaccaaaaacatgaaattttttcaaattaggctagatagctaaaaaaatttggtacttatgtattaaagggtgcagattttcaaaaaaaatctgataataaaattttttggggttttagggtcggggaaaccgattctggcatccattttggcccaatctgaaccccgaacccggatttgaacaaaatgcgaaaaagccgaaaattcaaatttttcgatttatgattttttcaaaagattaaaattcgcgggaaccggaatctcgagggaaaaaccgggaatcccgttaccgttttccgtcttttttccgggacaggatttttacgtgaacgggaaaagaggtaatctctgggaatcccgtcccgctttttttcattttcccattcctgttcccggaatttttttacccattttgtgttaaaatcaggactcccaactccgctgattatcatcatttttctgcttttcatgaggtcaatgatgatttttttgagataatgattttttctgatttttgagaaatttgctgatatcgcaaattggtgactttggtggaaatctgttaaaaattcacccaatttttgaagaaattttcccagtggcgcccaccggcgccatcggcccaaggttccttcctaaagtctttttttaagaaatttaaaaatatgaaaaacacacgacagaatcatataacaattacaagaattaaactcccaaataatatgcgctttgcttgttctacactttgtttgaagcttctaacatgcttgactttttttgttaggaatcgaaatgggtctaactggacgactgattcatgatcggcggccctgaaaatctatgcattttgaactttaaaaacgaaaaaatagaataatttacagggatccgtcaactgatgggataattcataccaaattcgtcatcacgagaatttaaatttattttcgataattcttagtgggggacatttcgacgcagggacattttcagcacgacattgcaacatgtcaaccacaagtaccacttcatggcacaaagcggacaagtgacaccacactcagcatactgccgaacaatccaggccaatttacggggcccagattaaccgaccaccccatcaagcaccaaagcatggtaaacccttttctgagcgaataaaacgaaacatatgtccgtgggttttatgtgtggacagagtatctctgattttaaaaatttatttgcaaaataagcacaagtgccgtgttaaaaaatgtcaaagtttttaataagcaaattaaggaatactttttcctcgtagtgtccggtggcgtagccgattcatttttagatattataaaaaattaaattcaacaaaaacctttgtattacacaaattttttaaactttcgtttgtataagaattgtaaaatggatttgcctatagacgatcctaagtcgtgagcatttggtctcatacgcgcttaatcttaattttgattttattattgaattatagagttcaaaattgggtatttgcattttgtttgaatccgaattccgagttcattaagcccggaacggttgtcaattcgaaaggccccggctggacctggtcaccagccacattgggcggaatgcaaaccaacaccacacactttcggcatactgcccaacaccactggccagtgttgcggggctcagctcaacaggccgcccctgccattggcagaaactggtaaatcatttcctgattgagattaattaatgaaatctgatattataatattttcttagcaaaaattggtatttttaaaccaaaattttgtctcaaaaatttttgggtgaacattttccatttttaatggtatatttttaattagaaatgcttttttcatgcttattagcacgcacaatttagctaaaaaatcagcaaaatccggtctctattcattaatgtgtaatttgcaattttattttgtttgagtccgggttcgaattttcagaataggataaaatcgatatcagattcggatcctaacacgaaaatccttaaaaatctcacgaaaattttttaatttttttcagtccagcagcttgttttatcctctgaaaaacacccaaatatcggttaatttcgtttgaagcgaataactcaaagctaggtttatatgcgtttaacgttgtcttgaatttgaggcgaaaagtttctagccgttgcgaaggtgtcgtccaattatgacgacatcaccattgtccccgtgggtcgtcggtacgacgaggaggcgtgggatggcgttttctgcgcgtacatgcacgccacatggctcgccgaagtcgccggcagcgacttttttgaccacaataaggtcacggtccagatcgtgccgcgagaccaccgcccgatcagcggaccatccggcgcagctgccatgctgtgcgcattgatgtcgctagcgactgcacgcttgtgccgtgccgacggctgtcactgctgtgcgcgacgactagtggcacggctcgtgatggcggaggcgaacgccaactagtggcatgcgttgccggcggatgtgaagggtgcggtgcagtcggtgttcgtggccgacattcagggcctgctggcagaagtgctcgtttgatgggcgggatgcttttttgttttacttatcgggcgacccgggattggcgggttttaaacagagctgtgcagccctggttattttgcatacatattcattcacccatatttaaaaaaaacattataagaacgattttagctttagttggttacggtctgcactctgtgtcgtactgtaccaactaatagcatgttttaaattcaggatatgcgttttatgcattttgtagtgaaaaaatttatttcataattttgggcttatttcggtgacgaattttaagtgttagggtgaatgaataggcatgcctaacttgcgttatcacattttttgttttgttacaatttggataaaaaaaaaactcaaaatgaaaagttaaagcaaaacattaaaaaacataatccttcgttggcttttgcaattcaattttgaaatgaaagcaaacaaaaaaatatcaaaatgaaaaaaaaattcgccatccgccgttttgccatccgatttgtgacaattcgtctgcactaaaaatttcaaaatacaaaagagtaaataaatccacaattaaaacaatatggaaacatattttccggggggtcacaaggcaaggaggggtcaaaagttttggaaatttaagcttttggttatttttttcaagaaataaaggttataaaatatactccttctggcaatttataaaaaatccatgttttattttcgttgttttttctaaatttgtataatctcactgacctacacataacattggtcaccagcgtctccagctcacggcgcaacaccaacgcggaaatgtaggggacggtgaaggactggacaatctgtacgaagaaaaattcagacagtttaaaagagaattttaaaaaacattgttagtgaattttttttgccaccgctcggccgagaatttaattatttgttgtcgtaattggtttatatgtttgaccaaaaaaagcatggttcaattccctgcattttaatttatttttatttttaaacctaaaaataagcattcacgagcaaaacaaatttcataatagggttgcacccccgaacgtcggggttagaaaagtcggggttcggggttgtcggggtcagcaagtttggggtcggggttaacaaaatcgttcggggtcggggtcgacgaaattgttcgggtcggggttcggggtttttaaatttttaccttatgccatatagtcaacattttttataatttccataataaagttttatttgtttatatttatttattttttatcataaatatttttgtatgctttaatatcttgaaaattttaaaattttttattttgtcggcaacattatgtctttttggcggcgacatttctggtgcatcgaatttctatattaataaatgaaattttgcccggttttta

SEQ ID NO: 4903 - DNA, 2732 bp, Heterodera glycines
gactcgatgcgcgagaaggcggaggagacgcgtacgccatgcgaatgcgtccaatgcgaagacactcaccaaacagaggcggagaattggcattttggtgctttttggcaacctcaaaaaaaccaaatttcggaggcttcgacttttttaaagatatgaatggctgagaattggtggagtccgctttaattttaattgttaaccattccattcttgggaaagatgtcgtcggtggagcaaaaacggccagtgggaaaacgctcgcgcttattctgccagtttgtccagcaaatatttcgtgtcgctaaattatttttaacttctcgaatgtctctggcgaaatcggtggaccaaaatgcacggtgttggtgctttgatcatcactccaacgcgggaattggccgaccaaatttacaaagtgttgaacaatgtcggccaatatcaagaattttcggttgctcttctaattggcggtatgttttaacgaattacaaattctgaatgtgcaaataccattaaaaggcaaagagagggaggcttatttgttgccataattacatttctcccctctctccctccattatcaaatcgtcccattttcggcactgacgtcgactttgaaaagcagcggttgtcttccgtcaacataatcatctgtacgcccggccgtcttttacaacacatggacgagaatgaacatttcagttgtgatcagctgcaaatgttggtgatcgacgaggctgaccgaattttggacatgggatttagacatcaggtgactaaattataagtcgctgatcagcgaacattaatatcctaattctgatttttatttccgattgacgccatcattgaaaagttgccgaaagaacgccaaactctgttgttctcggccacccaaacgcgacggacggaggatttggtccgagtttcgcttcgtgaccccgtcttcgtggcggcccacgaacactccggcagtgcgacgcccgatcaattggtgcaggtgaagcggaccaaacctgaaattctgaaatgttgttttttattttcaatccattcttttttgcagagttatttcgtgtgcatggaagaagaaaaactgacatgctttggtagcctttgttatttcgataatatccgtctaaacttattgttagttaatctcctctttaatcctttcaggtcatttctgaagaacaatcggacgaagaaaacattggtttttgtcacttgctgtaaacaggtgatgaaccatcccatccgaattcttttgatttagtttttaagtgcttttcctttttaaggctcgtttcatcactgaaacattcactcatttgcggcccggcctttacttcaccggcctttggggcgacctgaaacagagcaaacgcattgaacgctttaacaagttcaacgctgtcgatggtggtgcggcgatggtgtgcacggacgtggccagccgcggcttggacttccggggcatggattgggtgctgcagatggactgtccttccacggtcgacgattacattcacaggtaatcacccttttatggtgttttttttctcttacgaagtggattttgtggaatacatttttagagttgggagaacggcacggatgaaccgaaaaggagaagcgatgcttatgcttacgccgttccaagaaccttttgttaccttttgttgctttgctcaggcaaaggaatgtccccgtcacagaagtgacgtgagttctctttaaatagattttgttattttttttccatttttaccttggttaatttcagagttgactccaacaaagtgtttgatgttcgtaataaaacaccaatttgatggttcctttcccatcggtgaagcaatttgctcagcaggtggtttatatttaaaacaaaaaatgacattttgtttttaagagtttaatcgcttatgcaaaagctctctatttttcggaattgaaggtaagcgctgaatacttaaaagttttcgttttatttattttaaaagtttttactttttgttatatcccaattaaatgcacagcagcacttttattaattctaggaagtgtttgatgtgcaaagcattgatttcgatgcactttctcaaaacgaaatggaggaggaagaaccatttctgaaggtgtcgcgaagggacgtgttcaattccatcactgaagtcgatatgaaggtaagcatttcgctgatatatagtcaagggaaaattgagaattttcaggaagaaattttggcgagaatttcttcaaagaaaccaaatggccaggacagccacgggtatggacatcgtgcattttcgacttcaggtttgtgtttggagctcgaattgggttgaaattaatttcaaattctttaaaatcggcagtgaaaaacaaaacctcaaaaaagaatattcaaataagaaatagaattttttaggtgctgcacaagaactgagcagcgcattggacgaggagatcaaagcggagaaggaactcgttcaggacaaattgggtggcacttccgcgccttcagtgcccggcttcaaaatcaccacgaaaggggccgaagtgcgactgagcaaaacgcacggaaacgaaaagtgcgcattgttttacatctcaaaattctttactattttggaatttaaaataactcggtaaaaaactcaaaatttcctggctctaatgcagtttatgagtccaatcgacttttatgagtccaaaagtatttt

SEQ ID NO: 4904 - DNA, 1494 bp, Heterodera glycines
tagtgaaattcgatcactcatatttttgctagtgagcagaagcgtaccaaactttgcagggatactcgccggtaaatgactaacttacactgaaatgagcgccgagctagctggctcaaaaaaattttcgaaaatctgagtctttcgtttttatttattttttgcaaaattaattcttaaatattttttcagaaagggttctgaaacgcaccaaattttatttacatgttagtttaggcactctgatgctttttctatcaaaaagggagatgaataaaatttttaaaaatttttaattcctttttaaacaggccaaaaagtttaggcttaacttttttttcagaaactgatcagaagcgcaccaaactttgcagggatactgaaaggaagagaaataacctattttaaatattatctagtcagttcatttaaataatttttatccaaaaaatttttttttgggttttcggggcagtccccctgaaccgatgcgcactggattctataagatcattagagccaatttcttattttcaggattgaagtcattctgatcgtgaatcattcggtcgacatcgaagaggacgaggagtacgaagacgacccacaagcagaaatggagaccagaggtttctattcattttttgttttgcttgggtctaagtttcatgtttgatttgacctgaattttctaggaaaatcctcaagtgttgcctgtatagtccaattttgggctgagtgtttgaatttgtttaaaagaagctacttacaattagtacttaaaaaatctaattgataataaacccaggcataagtctaactctgattttcaatatgatcaatcattttcagtctgtgcccgtctcgttgccacacttcaccattaggtgttttttcaattccgtttttacaaaacaaatgcattatttttagcatcacaaagaacaaccagagtatgttcgaagacaatgatggctatgaaaatgatcaaacgaatgggcgttgttgggaagcgaaagcgattcgaaactgagagagaaagcgacgaagaagaggacacgaaacagcagcagaagaagggggacgcaatttgttgttgatttttaaatgctaaataaaaaaagttagtttttcgaccgggactgcaaaaaaaccgtgaccgtgaccaatttcgagttttgaaccggttcaaaagtcgtttttttggcatttccgcaactgtaaacctattttttcgtgcttaggtatctcctcgagacgaatatttgcctattttcgttgtgttccaaatcactgaaaaacgaatgcacacaattgggtcatcatcatttttgaaattcttctgctgttcgttcctccctcttttcttcccccttttcatcctcaattttttttgtcgtcaaaatttgtacaatacgcactttgctccaaagcatcaagaaaattgttcactgatgaaacctaaaggaaagaaatgacggaaatataagagaa

SEQ ID NO: 4905 - DNA, 4820 bp, Heterodera glycines
  unsure (1)..(4820): unsure at all n locations
ttaattaaattttaaaaagtcgtaaaaaaactcaaaatttgtttctcctgatatttaataactcattcgaaaactcttttttggcagagttttttacgatcgaaaaactatgtaccattgccaaaaacagaaaaatttcaaacatttttaaggttttgctcagcgccattcgtttgagtctcaattcggtccatttgattttgaattttgacgagattttgttcagaatttgccattattccatcaacagaagtgaaatttcgaatcgaagtaatcagtaaatctgtagaacctgccaaagggaaattcggataaaggataaagccaattgtaaaaatgtaaaagacgacccgaagtttgttgaatgcttgtcatggcattgccaatgtcgatcacgagttccttaaaagaaagaaaatcatcacgtgggatttaatttttgtaaattcgagttgacctgcactctctgcgggagtcgagttctgccctccagcgttacttttttagttgatttttgagtggacatttcttaattcaaaaaacacatttttgcagtttaggtagtttcctttttttctttgaaaaaagctgggggaactctttcatttttttgaatattaaaaaaaaatttgtaattgaccaaaatttaaaaaattgtaaaccattagggccccctatggcttttcattgtcaccaccaaggtacctaaactaaaatgccaaaaaaggtagtaactccgttgggtatttctgcagtttagatagtgattgttatttttctgtcttttattatattcgagtttttggggaaaaaaatcgagaagactggttttgagtataccaatatatatatgtatatgaaggatctacatataattgtgacagataaaaacattctacaattttaaaattttgttttcccattagataaataaatggcaaattctgtgggtgcgcaaacaaatggcactaaaattgcttctccgtccaaatcgacaagccaagcggtgcttctcgcgcaggcaatccgcgcgaatgacaccgaactttttgcatcgatggtcaaccgattgggcaataattggcagacaattagcacaacaattaaggtacaaaacggaaagggatgcttctacaatataatacttcagtttggagccgctatttttggcaacagttctctttttttttttaccaatgctcacaaaaattttaaccattataaattatcattaaaattccaatttttggccacataatcagatttttagaaaaacgggccattttttaaatttactttaaattgtaaagctgctcatttgatgaatcagaagacccttggaattatttttgcaaattttaggagttgcccacgtccgaagtgttgccccttttgcggatgatcgacaagcatttgcaacaacacggaagagagataaaaaagtataacccaaaaagcaatgacaaataaatcccattatttttcccattttcattcagtctcgaattgtggctttcatgggtcaacaaaatcttgcgcattcacagcacacatttggccacggtatctctttttaaaagtaaattgacaatttgtaccggttaaatagctcaaaagttcaagcaaaaccaaatgggaatagaatgtgcccctaaaatatgcaaatttccaaaatccgatcgtttttcttaaattcccatttcacacgatttcaaaattctctcgggcaaatttgatcacgttttgatcaaaattccatttaacacaactgctaaaatgctattttgtattcccccgcttcgcataattttgaaacaaaacttgttggaccgggttagcccaaattacgccccagacttgcgcctatgtctaaattcgggttctaaattaagtttttcaatctctgatagcctaaacagcatttcaactgattgaaaatgattatgtctgataatttgataattaattaacttttgaaaaatctttagtttgaattcaaagacattgtgcaaatgtttagtcccggctcggtgcctttcgccaccgccagcagagccattgtgccattctttattagcaaaaattataatttttggcgcaaaccgctacaaattctatttgcgcattttcgccacggtgttgaaaattgccaaacctcacaccaacattttcattttcaggtgcccaatttgaccgatcattttgcaacgatcacccaatggatggaaaaccgcgtgcggcacattgacaaactgctccaactccagggcaaactcagcttcatgatcagcgcaatgccgcaacagagtgacctgtggagagcgcgggacgagcagccgatgatcgtttttgcagccgatgaatgccaagttgaagaggagcaacaggaagacatggacgactgactgatcagcctttttttttgtttacacatttttcatcaaaaaatttaaattgttacaacaaatgcttgcttttaattttagcatttgccgagagagtttttgaaatggcgaaaacatttcctcccataggtattattttgcctcggaaacgcggcattttgccggttatggggaaggggggggggggggaagtccatgccgcatttttgccgtttttattaacaaagcgaaaaattttttgtagccaagattcttggtcatcatgaaatgagccaaattaagtcaaaatcattctttaggattgataacgaaattaaatcatttggacacaaaaaccaaaaaaaaaaaaattttctaattttactgtcaaaatcaactactggcaggcggtgccaaagacgccgccagctaaatttttgaaatttcatcctaattccttagttgattttccaaaaaaaaaaaaccaaatttcgctgttttgtttcaatctttggcaatcctgaagaataggtcgcagggttcggttgaaattttcaaaaacaaccgctttcccggttttccctccaaaaccgggcccggcccggctcggtctctaataaatacactatttgattctttttataggtttttttatcttgaaaactgcttaaaagttgccatggcttttgccgcctttttgaactcgtgcgccgactcacacacacacacaacatgcttctcccccccccccccatccgaaaaaaattaataataaaatgaataattcaaaaggctttccattgcgattgtcccgtccgtcccttactctccctcagctgctgctgctgctgcttacgacagacttatttagataaaaactcgaaaaaaaacatataacggtctgttttttacaataatagacaaaaaagaaaaattgtccgagccgatcgctccattattagcccccccccggcgacattctctgccgaattaatgctaatgctcttttccgcctccgccccctctctctgctcttttagcgcttcccggcctattttaaaggagaagcatctgttgtttgtttgaccaccacaacagcaaagcgaaaagtccacaaaaccgggccaatcgatgctgtttatttttttattctttttttttgtcaatttcataaaaaaaaattggcaatcgcttaattgcggtccatccgctcatttgccattaattggggtttttcgattaatttaaatgaatcataaaatttgactaatatgaaaaaaaaattaatatttaatatttaccaaaatataatttggatttttgttcattaggcttttcccttggcacaaatctttcgcgttccgtggtgcctaatttaatttaagccatcgatggcatttcggccgcaacctttcaaaattccttacaatcggcggcggattcttttctctatttttggtctttgccttcaatacaaaaacaaaaacattgaaaaaacaatcatttgtttaatttgatttattcaacaatatgtaaatccgcactttcattgggcctttacactgtgtaacgttagaataaagaggtgctatgtcgaagcgacaaaaatatgggtgtttgtaataattaaatttaattattattttaattttattttccaagtaattaatcataacttagcttattaagcttagtcaaattaataaaattaagtatttagcgacagctcgaagcatcctctactatttatgaaattttcaaaaaattagtaaaaatttacaaaaagttgtgactaaaaaagtgcgaaaaatttttactcaacaattttgaccctaactttcttgaaattcaataaaattttttgaaatttagcagaacaatagaaggacatttaaaaattttattatatgcaattaaaaatggttaatatttattcaaatggcttgtatttttcaccggaatggattttttcaaacattttttgttttcactgatcattttcctcatttcaccgcatatgcctcttttacggcgcactttttccaaaaaatttccagagaacagggggaggtccggcggtgcctcaaaatctgtgaaatttgaccaattttgaaaatcgcccgaaattttgtaaaataaaaataattttaatagcaatcaatcacatctgaaagagaggattctgttgactatattataaggttttatttaaatataaaccattattacttttgtaaattaatgcccgaaaaaatattttcaagttgcgtgctggaggggtatcaccccatttcatagacccataacttttttcgtatacatcgtgataaaagtggcttttacttatctaataaaggaataatccaagttaattttgattaatccattttcattttgattcggtgcgctaattttttcngtganattaacgattct

SEQ ID NO: 4906 - DNA, 6212 bp, Heterodera glycines
ttaaatctgtaaaaggggatgttaaagcgtgtcgatggattaaaaattgaaaatagtttcagatctgttcggccataaacaattttatgcgccatgaacagatcaaatagctttcgcctattctcaagtgtcggcagttgcaggtattttaatcgattttggtatggaattggcggaaggctgcatttaaaaaatacccgtttggtgaaatatttttgacacttttctatttttttaatatttttttgaagagacggattccaaacctccggagcgtattccaataaaggcctaatataagttttatataacgtaatccaaatcttagatgatttggatttaattattcgaaacaaggaacgcatacgtaaatacgcattccttgttattttgtttacatgatcggaaaattgtaatttattatcaatgtttactcctaaatccctaattgtatccacagcatttattgtatttccatcaaatttatatgtttcttttgggttttttgaacccaaatataatacaaaagttttttgaactgaaacttttatttgccatttatttgcccattctgataaattatgcaatgctttatgcataatttctgtatctgctcttgctttatagcatatatacaatttaacatcatcagcatataattttattttcactcctgatggcaaagcatcaggaagatcgttaatataaatcaaaaatagtaaagggcccaggacagagccctgggggacaccagagccaacttttttatttgaggataaagcatccccaattttaacacgaaaagtcctattactcaaaaagctttttatccacattaaaagtttgccccgtataccaattttttccaatttgtataaaagtaagttatggggcactgagtcaaaagctttctcgaaaatcaatataaatacagtccgcattttttccattaataattgcatcataccaatcttccacaactgttattaattgatgtcgttttgctgagcggcgcaagtgtcgcggcgcaaatagtgcggcgcaaatgtccgcggcgcaaaagtcggctaaccgaccctactctgatgatgatgcagggctggatggagtcggagatgacgacgaattgttcatttattagcccctcttactgttgaattgagtttaatttttttttggaaaatgtgccaaataaattattaaaaaattatattttcccccctggcagattaatggagactggcatataaaaagagtatatacggtatataaaaatgctaaacactgccggaccaccctgttctgaaaaagcgtgccacaaaaatgatatgaaaagcaaatttaaatatctatttttttcgcaattctcaaaatctgcgtgtgatcctacaaatttaaatgcatttacaatttaaagtgcttttcatttatttaatatactttattaaaaatttattacattttaattatagctctttcaattttgtttttatttgacttcaaaaatggaccttacgcctattcatcgcatccatgtcgcatacgtgtggctgaatcacttccatgtgcagctcgttgctctggacgtttcacgtgtcgatacacgcgccgtcttttcaactcattgctcggcacttttggctggtttaagtaagtcgcaatgtctgaagtcacttctttcattttttaaaaatgctttaacatgttaaggtggcacaagtgggcctcaattgtcgttggatggacaattgctggccctcagaacgttattgcagaacgttgacgacgcaaggtcgcaagcggacgtctttcgctttcaggttggggctgcattaaatcagtgtgtgcatttagcagcaacaaattgtttttgttaagggaatgctcactgggattagccgccagttgccgctgctgcttggacttttggacaagtttgaaaaggacaccaagttaaaaaaaaaccacccgataaatttgattataaatttttaaaatttttcagtttgacgagtcaagttgggctgcagatccacatcgacaacatccgactcaacgtctttgagctctacattgatttgaagttgttgtacgaccaattgcaccttttttttgacatgcaacagtatatcccaattgtgcgctctcgtagcgctgttgacctctctcgtaacgcgcgcccgtagcgtgaaaaaaaaatattgttgtatttagccgtttgctttgttttgttgttttctatgtgtattaaagcgttttgataattcgattttgtttattgcattggatttaaggttttagccaatttaataatgtttctgtttcctatcgttttcctcaaaagagtttgttttgagtagggaatattcgcagccttttattatggatgaagcgaaaatgaataaaatttcaaattaaattttgcacacacatgaatagggatcggatttttagtgataaaaaatcccaaaataattaactaaatagtgagaaaaaaattccaaaatagtggcaaaaatagtggcgaaaaagttccaaatttaggggtgtaattttttaaatagctgttttttaatttgaaaataatttaaaattaaggaaaaagattttattcactgattgcagttacaaaatattttcttagaaaatattgaacaagaaaaaaaaatttgggggaagaatttttgtgaaatttttccaattcttagggatgtatttttgaaaatttttaggtcgattcttaggggtgtatttttgaaaattttttaggtcgattcttggggtgtatttttcgtttttattgcattttttgggaaattttacaaaaaatgccaaaatagtggcaaaaataatgacgaaacgccaaaatagtggcaaaaaattattttagtggctaacttccgaaatagttttttttagtggcgaagctccaaaatagtgattcctagtgatgaatagtgtctacgccatattttttgattatttaaaaaacaaaataaaacaaactaaaaacaaataatttgcaaaacaataaaaataacttttcacattaataactttttgggtcggggattagtaacttttgccaatgggccaatttgttgagttccaaataaaccactaatctgtaatcagggcctacggcccccaacccccccccccccttttgttaatcccctaaagtgaagtggtgaatttggggcgctgaggaatttggacgctcgcgctgatgctatcggggccaattctgtgcgatggcgtgcctttctgctgttagtctccccattggctgatcatcccctccggcactgttctcgcctaaacaatttgcccaccaaacgacgccctgccccctcgacaatccgcccaaaacgacgccctgccctcccgacgatccgcccacccaacgatgccctgccctcccgagcgagtataaaagaaatgatgagccaagacttgggacttgctttttcttcttcatttccgtctcctacctatcacttttttgtgcttcgacgaccttttcctctgctttacaaaacccaaaaaccacttatttttcattgcttttccattcgttttttcgttaataaaccctttttttgtggttaagtcttgcctctaggctttttcgctttcgttggctttaccatttccccctcgttcccattgcttctcgccccccccccgtttgctttacccatttttcacccttttgctccattggcttacagggactcagtcccattttgaacttggctttacaatttgttggcttgtcgggacccaaatcggaacccccggcccattttctccttttcctggttggcaaggcatttacccccttgtccaacacagtgggattaagagtctggtgctctcaccagactgagttctaaccgggcatagtccttttttcgtcctttcttttggctttacccccccccccccctttttttttgcttacactttgcggaaatgtccgccattatccgacaacagcttttccctttactgtcggctatttcctctgaaacaaatcggggagttaacctcgaggccttaccaaacgattcttcatctttagaggccatcagcatcacagctgaaaagctgtctcgcctaattctcctggcccagggccttttgagggaatggtccgtcatcttgggctccccggaaaaggaaataagagacggggaaaataagcttttttcccaatttctggtgggaggggcatgcccaggcgacatcattgcaaatgggtgtgaaatgcagaccaaattggatgtgaaaattgacgggatacgcgctttgtcttcgagagcgccccatcctgctgctccagcctcccctcccccgattcggccccttattaatttgccctctcttcaacttcccgatttcgatgggaatgacgggaattggccctcattttgggcagccttttcccacaccatacatgacaatacttcgttgaccgggtcccaaaaactgacttatttggtgggtcgcctcaggggcagtgcccggactttggtggatgggttttctctcactgaccataattatcccatcgtcgtagaccttttgaagggtcgttacggcgatgaggtcaagcgggccgaccggctccggagcgagctgtttcatttggtcaagcccacgggtaattccgcctcactaagggccttttccgaaaatgtcgaccgaatttgtcggcagttagaaagtttggggactaatttggacgataatccttttcttaccgtagcaattaaggaaaaactccccacagaaatcaaggcccaactttacgacaaagaaatggaggagggggcgccatggtcctcaaaacagtggagggagaggcttgcaaaagtcgtacggcttaaggaagccgtacatgctccctgggacatcccgcatagtccggcaccccaacaaatccataaacctcccccgcgcccgcctgagccaattcggcgcgccttccccgtagtgtctgaaggcccaaaaagggttaacaagcccgagtgctctttgtgcctgagagatggccataaaccatcaaactgtgtggtttatcgtactgtggagcagaggagggcgagactgtccgagcaaggacggtgttctctctgcgcccgggaggggcacaatcagaaattctgcccaggggcagccaattgtttccgatgcgggggaaggcaccatgttttggtctgtcccggcccggaccggcccccggcaaggggtagcaattcaattcctttgggtccgcgaatccctaacgaagggcataatggcaggggaacccctcacgtgactccccctcaagggaatcagccggaatcgcgtcaaattatttcggcggtcgctgaaagtggccattttccacccgtcacggagttcggtgttgaggggcaaaaccgcccgaccgcatatttaatgattaaggaaattgagatttttaacaataatggtccaactccggcttcggcccccgtcttttttgaccccgggtcccaaccaggtttcattgccaccgacctcgtctccatggtcggtccacaatgtgtacaaaacgagaatatggcagttggggggtttttgggcaattcgccaaatgaaattatgcgatttccctccccccgattttcggttcgccttcgtcgaagagacggtgcgtgggaaacggtggaacttaaccaaaccaccaaaattgttccacctgttgagtttttgaaggaagtgagttggaacccacccgcggcgaacaaattggggattacggtgaaggaacccaaaattctattgggcataagggaattttggcggtttttcctgggaaaacgggaaatttacccaggcctttttcgaattgacactgtttttggccctatttttgggggcgaaatcgaccattactccctgccgctggcccgtcccatcccagaaattccccctcttttctgtggcgcagttgcgaaacctgtaaagtcagatgagttggtgaagcaactgtggaacctagaatcgataggaatccgggatcccttggaccccaatgacgattctttggccatggctctctttaaaggttcggtcgaattcaaagaggggaggtacgaagtcggctggccgtggcgcccgggggggaaagaccgtttgtctaataatttctctcttgcttattcccgtctggcggc

SEQ ID NO: 4907 - DNA, 2037 bp, Heterodera glycines
tttttttaattttttgaaatataatcagcaaatatcatgaccatgctaaaacgataaatgggttactacgatcttggcaaactatcgttcgcaattttctcttatagggtccccccaaaaaaaaataataaaaccgtaccgatagtgaaatttcaagggcacgtcgtgcaaattttggtggctcaagatcatgctcgggaatgcgctgtccggccgcgttgagcaaattgttcggcggcactggtcgcttggtacgctttgtgtagctttcttgttctgtgaaacaatgtttttcttatgtttgactgctttttaagaatgccccccccaaaaaaatgttttaaaaaataaattggaaaatatcaggcattgggagaaaactcacatttttttgcataattttttggctctatgaccgatatttacccaaaaattttttcattgggtagaaaaaaacaccaccaaatttttcatcgagaccccaaaacttccccccccccccaaaaaaaatttgtttttttttctttaccaaacaattgacggccaacagttcgggccaaaaacagcaacagatgttcaccactgtgggagggaaaatattattattttattttaattatagcaacaaaaattaccgcgcgttcaatttgtcaaccaatttgccgttttgcagaaacaaattcagcaactgctctcgcttgaccaaattgccggtgatcagtgcacggcaaccaaacttctcccaacaatcacagtacgcagtggggctggtctttttgattctaaaatgtttaattttaaaaaaaaaaatgtaaaggggcgaaattttttggaggcacacaatgactttgtgctttggacagaatgtcatgtgttcaatacttgatcctccagccacccttcccgggaattttctaaaaattctctcggaaaatcaaatttttggtaaaatcaaaaaaaaaactaaaatcgttttaaaaaatttctagctccactccaccacccccttaatgaatggaacacaaacaaattaggtaccactcacttgcaatcatggtttcggtgacaagtgtatgcgcattcctaaaaaatataacaattatataaatagtaaatttttacaaaatttattaaaaaacaaaaaatttaaaaatttctcataccgtacaacaacacagcgtttcgaccagtccgcatgcgtagcactcaaaaatgtcctgcggtgtgtgctcctcaccggtccatgtgtatgagcaggtgtcattggcacacagcgcgaacagtgccgattcgtccgaattttccaccccaattggtgccacaatgtcaacaacatcttcaaaaaacaaaaatattttcccgctatgtgtggaatttttagtttaatttctattaaataaatcttttggtgaacaaaatgttaatttttttaagttcatatatttgtaaaaactgcgatttatttttctcaattgaaaatatttttgcattttttcctgaatttttcattaatttttgcggcgactttttgtcccggaaacattgttttttttttgtcatttcttcgttaaccttggctccagtcgcgcagctcaaccgcagtctcccacagcagcagggcggcggtgtaggcacgaaaattgatggcacattggaaggcggtttggccgtgcacgtcccgctgttgcatcaacagcacaagatgttcctgcaccgccccacttcggcacagctcacgcacaatgtcaatggcactcgctaaacaaaaaaaaatggaaattcggcaatttttcgaaatttcaaatagggaaaatatttaaaaacaaaattttttttttttaccttggcgttctttcgttgttgttggaatgaccttttttgctggtgatgatgtagcggaaagagaagccgaagcagctgcagcagcagaattgtcctcatcacccttcgaaattgcagcatccccaaggtctaaaaaaataaaaatatttattgcaaatgtaaataaaaagggttggagaacccaaacacatcact

SEQ ID NO: 4908 - DNA, 1055 bp, Heterodera glycines
  unsure (1)..(1055): unsure at all n locations
taattanttgttcttaaaaaaaaagaatttacatgtaaaatattgcggttgccttcaatccgttcacatgcaatccgtttgcgctcctcagaattgacatcctcctccgacaacttttgcagaatgttacggaccgatggcaaatcgctggaaacaaaatataaggaatcaaacaaagtgacattatggcatcaaatttttccattgttaaaaaacattttgaaaaaaagaaacaaataattttggttggaaacaattaaaaaaagtcattccgaaaacaccgagcattggtatggatgagttggacatggattatttgggaatggatgacaatgagttgaatttattccaaaaattttccgtaaaattttgggattttcattttttaaatagaaaattaggcaaaaaccaccacacacaaaaacaacgcaccaattgagaatggcctgcatcagtgactcaatcattggcttcgttgtgtgccgtgtcggcgcaatcagtgccgcaaccagcatcattcggttgacatttttggcacccgcttgccccggtggcaccacagcctttgcagcacctttgctggcattggcagtaccattgttgctaatcgcggaggcaggttcttgaagaaaaacaagttcgaataatttttacaaaaaaaaaaaaaattttttttaccagtgccaatggacaacaaattcacatccgacgacgatttcagataccttaaaaattctttgtagcacattgtttcggacacataatcattacttaattttgattgtcttcaaaatttttttccttttttcatggccatatcgtcaattaattcattaccgaattcccatgccgaacagatagaagtggccaagcgcggtgtacgacagttcttggaagccgcccaccgagttgcgcaacagtggctggaaggcaccggtggagtcgcgaatcagcaacatgttctccttgagaaaatggataaagaaatttttgcaaaaaaaaacccctaataaactaaaaaacgcaattttgaaaaattaatttcccattaaaaa

SEQ ID NO: 4909 - DNA, 3260 bp, Heterodera glycines
agaatgcggaagcctgaaaagatttttttttttttttgaaatgtaaaatagaaggtactactagtaaattcacgagaaaaataaattcaattagtgagtggggcggagggttagaaaattttgcgatttttaaaataaactaaaaaaaaggcggatgggctcattggcattgaaacgtcctttttctctaattgaaaatttgattaatttcatattgaacaagtttgaaaaaattcataaaaatttggaatgccattgccggcgggcgctttccttcaagttaaatagtaaagccaggcacggaaaaatttgtaaatttttcgagagtactcacccgtcccatcaacagcaagtgaaatgatgcgccgcacgctggacggcaggcggaccggcctgaactgggcctggaaattctctggcgagcgggcggcagcggcacgcgacgcgctcgtcaccggcaacaggtcatccttgcgcatcagccgaatgtgcagtttggacaggtcaaacggagcggcggcgccagaagtgccaccaccaccaccctcgacagcagccgcttcctgttccaggcggtccagcgtggacttgaaagtgacaccgcaatacgcaccatccacctattggagggaaggataaagtgatttgattgcatattgagattggaggcaaaaaaaaataatcattttttctttcaagtatgggggttttttgggaaatttttttggcaaaaaatttgaatggcaagtttttattgaaagcggtaaaaggatttttttaagaccagcaaacggcgccataaatcctcctcaaaaatgcacatttaaaaggaataaagaacgatgtataggttaaaaaatttagttctccattgagttcgagtcaggggttcgaaatgagtgtcagaatcggtttccatgatcctgaaaaccacgtaagtccgtctcgaaaaaaaatcgtatttttttccttcaaaaaactgggtccaaccatcgataatattaccaaaattttctggtaacctaaattcttttgggtggacaccaaaaaaagcaaaaccatcatacatcattcattacaaattgtaataccatccctcaaatttagttttgtatcaaaaaaacgtacaattttcaccacgctgacatcgttcaccgactcttcatggatgaacaccacatcacggattgcccatgctgactcctttgaggttggttgctgttgttgttgttgtgaggaagaagatgcattattaactcctccacttccacttccacctcccacaccaccaccactccattactcccctcctcatccatcatcatcatcatctgctgatctgaagctgttggggcggctctttttcgattgccaactgctactaaaaaaggttgggcacccaatttgctgactgatacaattttttttttttttttgtataaatgtgtgttggtgcatccgtggcatggaagcagtgtgatcaatcaggcccgtagccagaaaaaaaaattgaagccgaagattaaaaagcagaaacttataaccgtttttcgccaaaaaacaacaacaaacaaacaaaaaatttgcctttttggattcaatttttcaataaaacatggacccagcggtaagtaaatttttgatatttttaatgcaatttgttgagaaaattgctattaaaaacttttcaaaattggaattttttttattcggggtaagggtgtaattccccctggctacgggcctgtggttaatttatgttttgcgtgtaattttttaatggggggggggggtggattttttttttgatcatttgggttttttggtcaaatgggtgaattgcaatggcaaaaagtcaaccaatttcattcacccaactatggcatgggaccgaacacaagtgggcccggacaatttcattttacaattttcttaaaaaaaggttttgaggaaatggcgggggaaattgatcgaaatcataccaaaaaaaaataaaaaaatgaaagttttttcacaaaatgtccgggacccagttggttcggccagaggtccccagctaggcccttccatttcatccaaaagaccacaaaaaagaacagtccagcatttttggtcaaaagtaattcataaaatgaatgtaaagtgtgccaaaaaaaaaaattagtgccaaggaaaatgacaacaaaaaaaaaaaaaattaacttacggctgaatgatacgcgcttttcccgatgctgctgctgttgttgctgcttgtccttgtcgtttccgattggaattgcatcgtaattgtccggtgtttgcacacggaaacggcatgtctcgttgagtgtccacgcgtcctcgtaaagtgtgccaatctgtgaaaaaaaaaattagttttttgaaagatgagaattttttttaagtaaatttctgtccgtgtatcatggcaccaaggtcagcaatcagatagagattatcataacattgccatgtaaaatattggcgaatgaaaaactaaagaaaaaattttttgtttaccattggaagaccgccggcaaagttgacagcaacggagccaaccgaataaatgggcgacgactttgtgcgcacttcagagcccaccacaatgtcattgctgctggcactggtcacctgcttcttcttcatgcgtgccttctcccacaatttgcgccgctcggtgaacggaaaaatgcctctgaaattttaaaataaccgtagaaaaaaaaaattttttttttttgtatccaaaatggaatggggagtgatggtgcatctgtattcattttttgcattattaaaaggaacacaaaccattgaataaaaaacggaaaaaaacgagaattcgatggcccatggtaaaaaaatatatatgtgattctataaaaaaaaactaattcatgaaatccctcccatggataaactgacaagtaagtaagtacccccaccacacaatcaaaattaaaaaaaaaacttatttctactaaaaatttaaaaaaattttcgaaagtttaattgtaaaatttaaaaaatttttagcgtacctccagtacagtgtgccgccctttgacagaatggccgagaaaagcgtgcagcaaaacatgcgttccactggctccggcacgtccatcaacggctcgaaaaatgtgtcggccaatttgcggccacaggaagtgtccataaatgagccaacctgacatgaggggaggtgttaaaataaataagcaaatttataattgtatttaataaatacagaa

SEQ ID NO: 4910 - DNA, 2163 bp, Heterodera glycines
caacctgtggttgcaaattggctgttgacaatatgcggaacatttgacggcacactgccctttgtccatgcccacgcgtacagttggccgttgtccgccagtgccaccaattcagcattcattgaggcaattttggtaaatttgtccactccgtccggcattgggaaattctgtttcaaaattggtgtgataaaaattttgccctgggataaccaagaggttgagggttaaaagaaatttcaaaaaatagacggttcccaataatttcgagacaacgctaatgtgccaatttggactgatttaggtgggagtggctcatttcacggggaccaatcgccccccgtatcgttgaagccgaaaaagtttaaaagaatcttcaaagtaagaattttcattaaaaaactatggatttttttttaaatttcaaataaaaattttttaatttttcgaaaatttctggaaaagaaaattaccgtctccgttttgttgccccagtattccaaggtgtcgccgaatgcaaaatgttcctgcaccgtctgcccgttgctctccccgtccttgccaccttctttgcctttttggtctataaaagtgggggaatgggtgaactaaaaacgaaatttaaaaaaaaatggcaaatttcttatcagacacatccccaaatttttcgttgaaattttcctaaattggtccccaattttttttcttattggtccaaccatcacgacgtcgggccatgtcacgggagatcacatactcgtagccatctgaaggcggcaaattttcgaatatttcttggtaataatttgatggtacccctccccactttttcgaaaatttattttaaagttttaaaaacccatttttagggggatttcggggtcgctgaacacgaatttgacatccaattccgccaagtctgcactttcaacccggattcgaacaaaagttgaaaattcaaagttgattcgttttcagatttatactctttgaatttttcgactttttgttcgaatccaaactggcgtgctgcagaattgcaaattgaatgtcatattcgtgttcacccacccccgccaaaaattatgtgaaattttttttattcaaaaaatgcacgtaaaatgcacccgtatcaccatcagaacgcaacccggcgtccaacaaggacaacaattcctcgtgcaggtacgcctcgcccgtctcgtccaagtcttccatttcgtcgtcgtcccggctcaacaagttgttcaccgcctcgttgacattcaaattggtgcgttgcaactcacgcacaatcacatcccgtgacttgccttgcaaaaccacctaaaattgacattaaaaaaaatgaggaatcacaaaattctataaatgaacccaaattttttttttaaatcgaaagcctatcgaacccaggctagaataataagaatgggttgtttttttaaattttaattttctcacaaaaacccatttaggtatgttcaaaccaaggaaaatctcaattttgcgagatgggggggggagggtgttgtgttagcggattggattgattggtaattgcggaaaaaattttttgacaccccctccgaacctggcattgcacaatgagctcctcgggcacagacgatgccgggatcattggccgattggaccggttccggtcaatgataaccccagtgcgacagaagccaccggaccggacaccaggcctggtcatcatgatacgctgaatttgacaaaaaagttataattcgctatttgtcaaacattttgatggaaaaacggaattttgaatgctagaaaaatccaggaaattttcagagtcgcaggaatgttgtccaagcaagacacagggacggtaccaggatttagacatggatgggtctactttccccggcggacacttttttttttggtccgtgccgtggaaaatttttgattttttttttaccatttttaacagattttcaccaaaaatgatacaccgtcgagaagataccggtcgcgtggacaccgaaaaggatgtttaagaacgccgaattaaatttttaaaagtaggattaaaaaccactgattttcgcggtccgatttgccgcgttcaccgccgcctgtggagagcagaacacaggatcggttgacgaagcgcccgaatttcgcgct

SEQ ID NO: 4911 - DNA, 5414 bp, Heterodera glycines
tgcagaattaaatattaattcaaataatggattccatcatcaaaatccattactgtcatatcgtcaaagttcactttttattcattggagccaaaaggtcggatatgcggcagttgttcctcacgcattcctcacacatctcaaagcagaaggcaaaccggtctcccttcaggcgcttcactttttcctggttgttgtacatacgattccaatcatttcaaaatgtatggattcaaattaaaatttgatgaaatcgttattagttattaccaaggcacaaatagctggtcagcaatacgggtcggggaataggcagcggggtcggggctcacaagggaacttcgcgaactgttagtcggaaaatgcatatgtattatataccattggatagaggagggttgacttctattttgaattttgccgatagcgaaaaacaaaagttatggggcctcaaaaatcgaaatttttggctgtgttttcacttaaaattggtggctcagttggttaaattcgcatttttggagctcggattcaaatccaacacaaaaatcaataaattttaattaatgtataatataactaaattattttaaaaattattttttaggcgaaaaaaagtcaactgtttgttgctcgtaagaaggtatatgaaaatttgtattttctaaaaatgaaattttatttccaaaaaattgacgctggaatttctgaaaatcagcaaagcagaaaatacaccccaaaactcgtgattacgaaccggaaaaactcatccagtcccggatccgaaacactaatgtcgtctcgagtggatgtgagaacaaatccacccgatcaaaacaggtcagccatcagcactaatcggtcagtcattcgtccgtcaattatttaatgggaaatgcgtgaccgatcgcccgccgccgacagtcagaagagggcggacaaggaactgctgacgacggggggtgcgcgacaattgaaactgcagcgcactctctccgtgtcccaattttttagggggggggggagagcgaaatgtgaattgtcggtttgggtagaataaattatttaacaaatttgttattaaaaaaataattcttaaactgtcacagtaaagcaaagcttttaagcgcagaaattttgaagattatacaaaaaagtgtgaatttttaaaactttaacaataaaggatagagaagccttaattagaaattagaagcggtcaatattaacaggataaaatctatcatgtgagagctgcacattctccttatccaagcaatatcttggcaaaaaatcttagacccaattgataaatcagggttttttcaaaaaatctgatcaggaattcatttggtaaagaatgtgaggtgggaagtttcgttatcaattgttaattttctttgttgaaaataaatttaaaattgctttaattaaaaaatgattatttattggactccttttccatacgaccataccacgctgaaaacacgccatcccgtccgatctggcaagttaagcaacgttaggccttcttagtactaggaactgagacgtcctgggaatcggaggtgttgtaagctttttaaattttttcgtcttaatttttatttgtaatgaaaaataatttattttttgtttaatttatctcataacttttttcaataacttagtattttgtgaaaaatctatgcttctttattataacatttatttgttgcctctgtaagtgcgaaaaaaaattaaaaggtccattcaacgtgctgatttcttagcatttattcggtggtccctttttacctaatttttaaatgaaaaaaggaaaacaaataataagactaaaataaaacagtaaattttattcattgacaaataagcaacaaacataacataatgaaaacaaatgcaaaattaaaaataaatgaaaaaagaaataattaattaaatgattaatcgcctttccgtcgtttcttcggctttcttcaaagagtggccaaattgaatttgaaacttggcccaaagttggcctcaattttgtcgccagtccacaaagaaacgcatggaaacagagaatcggtgggagttgtagtgaaaaatgagtagtcatctgtgaaattttaatttaatttgttttttaaattttgtttggcccaccaattcgtaggccattcttcgtcaaaaagatcagtcgagtatccaaatgaacgccacacccgactacatctccggtggaaaatgatggcgattgatatgccaatgccctgtctgatggcattggcacgggcacaaaatccaatggaaatggccaattggcacttccaccgtagccgcccctctgttttccaaccgccccgttgaatggaattggcatcgtgccaaatgccattttacacggtcgactgataaaattgcagccaaatgagccattgctttggtacccgtaactgttcaaatgttgtccaattggtccgtccaatggcatttccttggtggcgaatccaatcgaagcaaaactataaaaatgtattaatatttgaaaaattattaataaatgcataaaaatagtaattttaaatagcaagttatgcaaatttgaaaatttaattacctaaatgtcattttacctttccaaattggtgactttcatttcgaagtagaaaattccgggacgacaacatttcgagacggaaaatttcgcaaacacagagtgccatcctaattaaaaaaagcattaaaattaatataattaaatttcataattatttaccaaatccgttgcccttacaattgaccgtcaattggctttccccggtgatttcaatatctttgtgacaaatggtggcatcccaacaattttgtttattcgaatttggcaaatcctgatgggaattcaatttgcatttatgaaaaaaagatttccacctttgcaattttcacaaggccaaccgccggcggcggcgaatggccggcaccctttgaagtttctaaaaaaaataaataaaataattttttaacaaattcaaatccctaacaaaacgaatatccgatgagccccaaaaatccaaatatttttttttataatcgcttaaataacttttttaaaacattttcatttaattttgcacacccgcgacattattttgtcgaacataacacattttccatccagtttctgctgaacgttctcctttttatgctgttgaccaacattttccttctgctgctttgcccatgccaaaaatatatccaataattgatgatcaacaaaaactgaaatttaattgcatttggtaaacggtcagctaaatgttaattaagaattcggaaatttttaaattttacgtccgtttttttcccatttttttaccatttctgccctcctctttcttctgctgctgattttccaattgtttgatgcgttccaccaatgtattgaacacttcgacagaaactaaaatatgaaaatttaaagaaattattttttaaatgcttatttaacagtaagtctcgggatacggtattggaaatttataattaattttcaaaattctccctaccgtattttttctcgaattgctgcttttcctgctccatgttgaagacttttgccttcaattcaatgtgttccatcatccgtttctgcttttccaactctgctttgagagccctctgaataaaaaaaaaagtgaaattttctctatttagacccctcgccctctgaaatttcattgtttttttttaataatttgtctttttcattttgctcacattctcagcattcaattccccgtttttgaacaccaatttcgtttccctcaattcggagttggcaagtttttctcggcattccttaaataaaaataataatttagtccataaataatttctaatttgtgtgttcacttcataattgaaatatttttggaaaaattccatcaaaaattgcactaaaaaggtcgacccattctcctattaattttatatcagtgcttaatttaaaaaactttaaaacgaattttaaattttgaactaaattttgcaaaaatctttttctgtttttggcacattccgtgagtccggaacggaaccggacgccctctctttgtacgttttgagatggcccaccttcagcagttgctgatcagtgacgaaaaattcggctgacaattgatcacccaaaaatccgtgccaactgaacacttcatattttcccacttcttctgctgctgctgctgctgatggtggtgataaaaaatttgattagtattttatttttcaataaaaaatattaatcattttctattttacgtcttttttcaaattttttctatgtaatatttaccttgatcatttgctgaacggaaaaaagaatctggggatccgctcgatgatgacatttattcaaattaaagaaaatgtattctgctatcgaatatatattaaaaaaaaatttatgaaattgatttatttatattaaaaatatgcaaatttaaagcaaattaaattggtcaggttgcatataaatgaatgaatatttgctgttttgagctgaaaatgttcgccttttatattggtggcattagtagacaaaaagtaattaggcaaaattatttgacctatcaatcaattaaatagtctctttcaaataaataattaatccatttttggcttaagttattgagcaaaatgatatgagtgaaagatttttaatccaagctgagaaaaaaaagtaaagctaataaatactctgattggtgcttaaaatattcattaacgaaaaatgagatggatcatttttacatttaattattttttgggtataaaaattaattgttgattttccctgaccctgacatttccgtactcgcgacccttcttcgccttttaataaaattcaaaaaagtcactttttaactaggccaaatttctatgcttttttagaatttgtatttttttaaattagggcaaatttttaatcagttgcctaaacactgtgattttgtatattttaactttgttagtctttgcgatttcaaactccaaaaagtacggtgagttcgaatatgagaaaagttttggttcaataaatcatagttgatagttgattgggctcataaagtgtaatagaaaccaattaattaattgacctctatttcttagaatttgcagaaataagcacaatattttatttaaattctttcttgctgaattccaaagttgacgtaaatgtatataaacaaacttatattaaataaaaggcattttttgtactttgaatttgcaattgaacaacattttgtttttttgcgtcatttttgtcataaatcatatttattaaattaacaacaacagaggttgaaaaagcctcacactgaataaagaaaaaaaaacagactatatgtaaataaataaataaa

SEQ ID NO: 4912 - DNA, 1892 bp, Heterodera glycines
  unsure (1)..(1892): unsure at all n locations
ttccccttttttggacaccaattttgtttcccctcaaatcggagttggcaagttttctcggcatccttaaataaaaataataattagtccataaatatttctaatttgtgtgttcacttcataattgaaatatttttggaaaaattccatcaaaaattgcactaaaaaggtcgacccgacccattgtcctattaatgttatatcagtgcttaatttaaaaaactntaaaacgaattttaaattttgaactaaattttgcaaaaatctttttctgtttttggcacattccgtgagtccggaacggaaccggacgccctctctttgtacgttttgagatggcccaccttcagcagttgctgatcagtgacgaaaaattcggctgacaattgatcacccaaaaatccgtgccaactgaacacttcatattttcccacttcttctgctgctgctgctgctgctgatggtggtgataaaaaatttgattagtattttatttttcaataaaaaatattaatcatttttctatttttcgtcttttttcaaattttttctagatattattaccttgatcatttgctgaacggaaaaaagaatctggggatccgctcgatgatgacatttattcaaattaaagaaaatgtattctgctatcgaatatatattaaaaaaaaatttatgaaattgatttatttatattaaaaatatgcaaatttaaagcaaattaaattggtcaggttgcatataaatgaatgaatatttgctgttttgagctgaaaatgttcgccttttatattggtggcattagtagacaaaaagtaattaggcaaaattatttgacctatcaatcaattaaatagtctctttcaaataaataattaatccatttttggcttaagttattgagcaaaatgatatgagtgaaagatttttaatccaagctgagaaaaaaaagtaaagctaataaatactctgattggtgcttaaaatattcattaacgaaaaatgagatggatcatttttacatttaattattttttgggtataaaaattaattgttgattttccctgaccctgacattcccgtactcgcgacccttcttcgacttttaataaaattcaaaaaagtcactttttaactagcgccaaatttctatgcttttttagaatttgtatttttttaaattagggcaaatttttaatcagttgcctaaacactgtgattttatatattttaactttgttagactttgcgatttcaaactccaaaaagtacggtgagttcgaatatgagaaaagttttggttcaataaatcatagttgatagttgattgggctcataaagtgtaatagaaaccaattaattaattgacctctattttcttagaaattgcagaaataagcacaatattttatttaaattctttcttgctgaattccaaagttgacgtaaatgtatataaacaaacttatattaaataaaaggcttttattgtactttgaatttgcaattgaacaacattttgtttttttgcgtcatttttgtcataaatcatatttattaaattaacaacaacagatgttgaaaaagcctcacactgaataaagaaaaaaaaacaacagaaatatatgtaaataaataaataaaaaaataaaagtataatttatttattcatttttgaagcatttttttgaattttccgctccttccccctgctccgctttttgcttatataacagtgaatcggcgcggtattcagtgatcaccagcggattatggccaaggatttggctgaacaatttgatgcattccgatcgctgtgcaaaatgatcagggcgactggagaggccggtggtattttttgtgaaaacgcctctanaaaaattaggaaaaa

SEQ ID NO: 4913 - DNA, 2391 bp, Heterodera glycines
taattaatttgcacctaaacgaaaattcaatggtcccatgttcaacattgaaatcatcatcaatgctcagtacggcctctgtccgtatcagtgacaatggcaagaaacggtcattgagcgaatcgcgtgaggtgttcacctgaaaagagattaatagtgttttgatgaaataattagtttaattgtttgtcaaattttgaaaaatgtttttaccaataaaaacacaaaaagatatttatcaaatcctgatctaaaggtagagaattccggaatctacttagcacaaggacagcaccaaaaactagagaccagcacaatcgatttatttaaatttattatatcttgtcgaaaaaatagacgatatcgattttttccatttttaataaaaaaaattcgatcgaatcacttgtcggtccttacaaaaagccattaatttaaaagacaaatgctatttattgctcaaacgagaatttgggaacagtaaaataaaatatgccgttgttcaatgactattcatttctttgggcaggccaaaattttgccgccaatgttaagtacgtcaaataagcgcttttttgtcggcaattttttgggatgaaccgaaattggcattcaaagattaatttatgttaataaatgtagttttttgagtttcaaaatgccaaacagatgcactgaccacaaatattggcacatgaatgtgtggccatgtgtaggcatgttcagtgattggcctcctgaaatcaccccaaatcacaatgacacggtccaaataccgtaagccatccaagcttttaagagtgtacagtaattgcgcgtcccttcgatatgcttgaagaacaactaaatgttttgtttttgtttaattatcttatcattttaaatattatttatgtatatttttatacttgtgaatttctcatcgttttgccaattttctgacaatttttgttcaaatttcgggtaaaaattggaattaatttgctgctgattaaactgtagatgagaatgtcgccaatatggttgaactttggaagttgaatccaaaaatgttgggtccatattccataaacgtttaacatcctaaaataattattaaatgcaaattttaataaaacatttattttaatttaataatttaaattatttttataattacgtcattaaaaatttgttctctttccaaattttttgtttccgtttttccattaattggcattaatttcaacaaaacatctgcggcaacaattttctccggtggtgcaacaatgagaagtcggtgccgaattgcagaaaaaattgttcgaagcaaaactttgcaaaaaaggggataaaagttcaattagataattcattaaaaattaaagtaataattaaatataattaaattaaaaaatcaatcataattgtttaattcaaaaaaacataatttttttttactttttattagatccaaaaccattttacaaaaaaaaaatttagtatttgataaaaatttttgtttaaattttaagaaataaatcaataatattaattgtccaataattaccttttgggttagcaagaaaatgcgcaaaataaaagcggcccattcttctaagctcataaattttccattcgggcacattttgaagcagagaatttaatgattgaaaatccatcgttcgatgttgaaggaaaattgcggcattgtgccattcgaataaatcaggcaaaggcaaaagcctgtagaagagatcctatggcatttaaaaaaatattaattaaatttagaaaaattataaattcattatttggcttagtaattaaattcatgctagcttttttcatctttcaatgaaaatttgatgaacattttttaatccatatgaatattgaaattatttttaaaaaggccttatttttcgtgctgagtcgatccacaaaaaaactcagtgtgggcgatccacaaaaaactcagtgattgattggtcattttccggaagcctatcgcaccactttcgggcaccaaaagtgcctgatccggaacccggaccggcccggttaagaacaattttttgttcagttttttaagggctatctcccaggccgggtccggttcttaatccattcacttggagcccgttatgggtcgggcacatctgccggaggaccctcagcctcgcccccccctgtcgatggccaacccaagctaagcttgccggtaccagcggctttttgtacatctcgatgagctctacaaaatggtatcaatggcgtcaggctatgtctactacaaatggagaaaattggcgagaagtgatgtcaaaaattgaaaaatttaaaaaatttgaaaatgacttgcgtcccgccgtacattagtattaaccggacggcaccgtgttttgtgaa

SEQ ID NO: 4914 - DNA, 1252 bp, Heterodera glycines
tggaaaaagcattggaattttttggttttctttttctcaggcaaatcaaaatgaaggggaatatcgacggaagggaaggaggcgctaaaaagtggattttaaagcagttaaaaaaatgaattcttattttcttaaataaatattaatattatttaataaaatagctaatgtgaaataattaattaatttttgtttttaaaatggaatatttgaacatttcctatttagttaatttaaatagttattaattctttttaattgatatttaaacatttttccaataaattaattgctaatgaatgaaaattataaattaattctttttaataattagtacccctcattaaaatcggatgctacaaaaatggcacgaaaattcttttttctaaactcttcagtgggtttgatgtcattcaaaaatatgatcaaactgttcattccgtcatttggaagatgctcctttaaatttataaaagtgaacgaataattattaattaattatagaattatttatttatttatttaatttaccgttaataaatttgactttttgttaatgaaatacaccaaaaaacacgctttttcaatgtccttttgccagtaattgctgcttatcatccattttgctaataattgttcttcttttggcatcaaattcgaattatttggcataaaaacgccaaattctgcgcattttctaaattaaaattattattttaataaaaaggaattgattttaaaacatacgaccaatcgaaaaagtttactgcttctttagatgcaataataaatacataattttgaactgtaaaaattttttttagaaataaaattatgattaaaaaatttacctttaaaatatttggtcgtgtaaattgttaaaaaaataattacaaaaattagcactaaagaatttaaaatcctaatttgtataagcataataaaattaaaatgttttctaaaaagtaaaatttcattaataaaaatcaatgaaaaaattaaatgattattaacaaatagttacaactgcacaaaaagtcaatttaccaaagttcattagtcttcaattaatagtaattaattatcagttacgtcatacactctaaaatagctaatgagaaaaagacacaaaaatgattttttaatatttaaaataaaaagtagttccataagtagtaaaatgaaatgtgtcagaaaatgactttcattaggaagattttagcacagaaaaggccacgtcggcgatgaaatg

SEQ ID NO: 4915 - DNA, 2338 bp, Heterodera glycines
  unsure (1)..(2338): unsure at all n locations
atatcagattggtgattgcgtccagcaaagaaatagcttcctgaagcataaaaagaaaaaacatgcatatgggaaggatatcgaacacaagtattgtgtgtcaatgaatccccaaaattattgtatccaaaggagcgagcattgattgatcaaccaaacatcagtgataaaaatggacaaatgaagagagcggatgataaaaggggttaccaacaggtgtttttgtaaacactgaacatttgtccgcccaacgaatcgcactttctcctccaccatccgattcacagctgtgttgcccttcgttcggctcgaatctttctgagaacagctttcgcctcactgtagactttctccgcggcaacaggcgaatctaattttacataaatgaatatccgaatataaaatttgactacctccgagttcctcccatgaatcaaacactggcaaagtctgctcgtctgctgcgtacatttgcgacaggagagtgggcattgagttgttacaagtcggaaccgtcggttggaattcaatcgattcactctcttccgaaacactctttgccgtttcattttcctttgtcgcttcagtgttctcttgttcaagctctgactccgtttcgtcgtcttgaagcacttggagaatgctggcattgaccaccatgctcccctcgtcatccgaaaacgactcagaagaatacaaaggctctccatcaaacagtgaagagacaacgtcatacgcgatctttacaaaaatcatataatggatgatcatagatttaaaaaaaccgatttggccgcagcatcggactcgtctgaattctgttcttcgttaaacggagagacgaaggaagagacgatgttggtctgattgttgaacggaagcagtgaaggcaaggcaaaaaaagcggccgattgttgctggaagaccgtgtcaccgaacaaacatgattcattaatcatcgcaacctagagagatgattaaaagaaaattttgattttcgggtctattgtaatttataatttagccaattagcgccatctagaagcatccaaattaaatattttttgatttcgtttttaaaacataaaataattccttcaaacttttcatgcaaatagagaaatcttattgtttgagctatcggatgataccaagaatattcaattttgatgcttcttgaaaaattgtggtgcattaaaattgtcaacatattttatgcgcatgtcttttttgggaaatttctgatgaagatgcctaaaccgtaaaaaaaatgcgcgacaaagcatttaaatggtttttgaaccggtcaaaactcgaaaaatggacaaaacattttaaaaggtaagacctaaacaaataggaggtcattcaaaagctcatgagttatgccgaaaaaagatagaaaggaatgaaccgacgccatctgaggttttagaacttgtgcaaaacccgaaaaaaggtaaaatatttgtccgtcttttcaaattggttcaaatgctttgccgcgtagtttttttaaatcattccccactgtaaatgccaaggatgcgcttaatgggtaggcacctcaaggtcattatcatccagcttctcgtcactctgaaatcctttctcggattttgaataatccgagacatttgccaacaaatgccactgatgtttgcgttttgatgatgacatccttgcaccaacttgtatgctcactctaaaacaaatgtaacaaatgaacgagacgagcattattagtgtttgtaccttaaggtttcacaggcacaatgcaatcaatcagttgaaaatgaaataggacttcaatacccgctcgcaaaaatgatgcatccaacccttgtggtgttagcgtccacaaccttcttcaaaaataaccctgaaaacacttaatttagaatactggtaaatacagtaacgcaataaagttagattatttcagtgagaattaagcgttactaatcaaaacagtgttttaggtttttataatccccttacaaaaatatacgcttaaaggcaatggtaaagattattggtcctgaatttttttttaataagttttaagaaaatattttcaagagtaatccgaggcgcttagtacgaatctgaccttatttaggctcaatctcgtaccccgaacccggattcgaacatttgagaaaatagtttggaaattttttaagaaaaatgagggctagcatcggtattatttccaaggaattgatcgaattgtacaataatatgaagaaaaaaaaaaggaattaagatatganancggaaaaagncattgcctaatggaacaagcaatgttgtaaaaaatgtgagttttaatttt

SEQ ID NO: 4916 - DNA, 4861 bp, Heterodera glycines
  unsure (1)..(4861): unsure at all n locations
tagggatcggatttttagtgataaaaaatcncaaaataattaactaaatagtgagaaaaaaattccaaaatagtggcaaaaatagtggcgaaaaagttccaaatttaggggtgtaattttttaaatagctgttttttaatttgaaaataatttaaaattaaggaaaaagattttattcactgattgcagttacaaaatattttcttagaaaatattgaacaagaaaaaaaaatttgggggaagaatttttgtgaaatttttccaattcttagggatgtatttttgaaaatttttaggtcgattcttaggggtgtatttttgaaaattttttaggtcgattcttggggtgtatttttcgtttttattgcattttttgggaaattttccaaaaaatgccaaaatagtggcaaaaataatgacgaaacgccaaaatagtggcaaaaattattttagtggctaacttccgaaatagttttttttagtggcgaagctccaaaatagtgattcctagtgatgaatagtggcactaaaaacgaaaaattttcgaaaaagaatgtgtttttcgtgcatttctcgtcgataaagccgcagaaaaaatagttaaaaaactaagaatccgatccctagtgtgaacatttgagaaaatagtttggaaatttttttcgaaaaatgagggctagcatcgctattatttccaaggaattgatcgaattgtacaataatatgaagaaaaacacaaggaattaagatatgaaaacggaaaaagacattggcctcattcaacaagcaatgtttgtaaaaaaatatgaattttaattttctgaaatattcgaatccgggttcggggtacgaaattgagcctaaagaaggccagattcgtactaagcgcctcggattacccatgaaaataattttcaaacttatttttaaaaatttttgtgggaccaataatctttaccattgccgtcattaaattatattgtagaagcaaataaataattaaatgatgtgactgggacatagataataggtaggtagaagtaagaaatgaaaaaagatatggaggagggggggatggggtcgagttggaaggcctttgggtgtgcaaatacgtgcaaaagcagagtcaactcatcagtagcagagcaccaacagacacgaagacgacgcataaagtgagaggaggggaaggaaacgcgtcaaaacagaaaacattgttcgcgctatgtgtgggggtggggaaatcaattagaagagggaagagagaaaagatggaagaaaagtgggagagtggaagagctagagaagaggacagaagacagagaacacataatccgagggataaatgcgaagtgccatcgcaagcgatgcctttttaaaacttgcaaggacagaaggaatatgtaatacataaaaggaatcgtaaaatataaatagagtttcaattttgcctcccagttaataaaagttctgtggttcagtggttttcgtaaaacaataaagggaaaaaggatggagggaggttcgagtccgtcccacggcattaatattttacttttttttgtccaattagaagatagattttagataattactatatttttgagtatttctgacaaccaaattaaatcgaaacttaatctgtccaaattaagcgggatgaactggttgtttgtaaacacaataggtagtttctttataatgtcttcttcaataaagcacaaataatttatccggtatctaataataattttagaaattttatttttggagaaaataatttaaaaatttttgtacaatttatgttaataaaatgcacttaaaattttcaaaactttcccggcgtcgctaaactgcaccgcctgaccctaaaacccttaattttcttgaaaaatttgctcaaaacacttattttcggaattttggcctcggaattccgattaacatttaaatgcttaaaaacaaagtaaatgtaaatttataatataatagtttttaacataaaatgtgcaaaatgcattgaaaataaaacccggtaaaagaaagagattacatcgaaaatatgaagaaaataagaaaggcaaataggaacgacaggctttggtattgctggctcaaagtcagtgatttgagagtattctgtgctttatgaacggataaaaggcataaattttttgaagtttgattttctatttctttgcttcgctaaatcagggggctgaagcaaagcgagttgggcaggtgtcagttggcataatgaagaagcaagcgcaatccccgaagtgccgtaaggcgtaaaaggctgaccttaaaattaaagttataacttttgtttacttaaacacacctccggtaggaagccgaacaattacagtgtaaacacccgcttggtaattcgcacatggctccaccgcacatggctcaacctgtagcttgagtttttcggattggagaaaagtgattactgtatatgctcgacaatggccgaggtctaattggactgatgaaaaaggccttgaagccatttcctcaatttcatcatgacgtcttcgaatattccgataccttttgagagagtaaaaaaattggcatcatgagaataaaataaaactgaccattcaatccgcattttgattatccaaatcaatcccgcaacaacgagaagaacaatgaaacagctgaaaataatgtaatttctaaatgtcaagtaaagcttacgctgcaaaaataacaaaaaacaaaatccaattgattggcaatgattgtgcaaatgaaatttggatctgaaaaagaattggataaaaaaattcccggtttgtttataccttaattggtgtctcgaaatcattaacccgaacgtgaaaagtcgtatttgtttctgttccgaatgcaaatccttaagcattttccaccacattaatcgccttccacccaattgatgggacaattaccgggatctgttgagctgtaagtgcgctttatccctgaagccgtgcacaactgaccggccatcaaatgctttgtgtgaggcggacggccttcgagcaactgagtggtcaggttaatggtcacttttgcgccggtgtcgccttcgcatgtgatcgagaattgaacgtccgtgtcacgctatacagtaaattaataaattatatgctttcttgagtttagcagaaggaataattgaagttcgcaaatgcattaccgaagtaaattccgacaaaattaatcggaggaccccggttttatattctgcaagaaaaaggcaaggcatactttgtaaggcacgctgaaaaagttgatctgattaacgtatttgtcccgaatgtcattgctgtccagcttaaaagtgaagatgaagtcaatggcaagttcatctaaatcataacgatgtaattcgcagaaatagaagccaagatttgtttatacatgtgcaggtgccgccgtttttcgggtctccgaaatatttaggctcgcatttgtcacaccgcggcccaattactccttttgtcgaacaaaaacagtcgccgtttagctgacaaaagaacaccaaatatggtcatttataaatctaattgttttttattaatgttactgggttgcaaagtgccgcttggccgttgcattggcattctaaaaaatgacacctaaaaacgattggaatgcgtacgaattgtaccttgacaggtcccaccattccgtgggtcgccgaagaagccgagctcacaaagttcacaatgttcacccctcgttctatgctgacatttcgtacatcgcaatcgccgataagtgacattttccgtgcaattgctgtgcccgttgcattggcattctgatgataaatcacgtttatctccctttctaaacacaattaccaataaaacttgaccgggttcgcctgtgaagtaccaacgctcagctgggcattggctcggatccaatgcgcccgaattggtcccttctacgcatttgcccaaccctgtaccagatctaataaaatggacaaatacaaaaggggaaataaaacgcggcaaaacccgtcatcgcaccagccacaacgggggccaatggactgacagtcggaacaagttttttgtaattcgcacgcgaaagggtctcaaatgtgacaaattctcctttaaaaaacaatcccaacaaatgttactcactcgtttgacatgctttgtgtgtgttcgctgccgtcacccaactttggcattgaccgtatggaaaactgaccatgtatgtgtccatcgacacacatctttgattgctcggacaccacctaaataatttcctaaaattaagcttgcgcgggatttgcgccactatacatgcactgtgagtcaatgcaggactggcaagaggacttcatgaagcaaggaaggggacaggtggcattctgttgtttgtgttggctcgaggacggcacaatgatcacgtcttggaccataatagacgaaggaacatttgaaataatcgattgtggtgaaagagtcgaggaaggattcgattgttgctgaacgttcgtagatggcgcatcgtccgccatcggcgcaagggacagccgttcggtttgcatccgattgtgctcctcgataagaatggcctcgtccgccaatgacacgcaaatgtgtttcgtgtcgatggcaaaccaagtgcagtgcggaagacgattgcatgagaagcaattggtggccaaactgcacggacgctgcacaacgacatccgtacgacgctgtttggcaccaccgaacggacagagcgaacgatcgccaagcaaaacatcagcacaattggcgtaggaaccgaggcaactcccggtggggacagagttgtcacaggacaaaagaaagctttctca

SEQ ID NO: 4917 - DNA, 2543 bp, Heterodera glycines
acctgactgctctcgcaccaaccacagcccttttgaagcagacaattgttgcagtcggtcaacaaagtgcaggtgcgcaattcgacggcatctctgaaatgatacgacttttcaagtgtgtaatcaaccagtcttgtctttacttgtctcccatggcagtccctgtacagtgttcttggtaagagaccatcgccgtttcgcccttggcaattgagagaaaggactgcctgaaggacgaattgggcagagttttggtgcacgatttgttgtggaaaacacagcgcacgccgttggacaatcgcaaacattcctccgcattggtggcctgactgtcacaattggctaaacaacgcaacagcatttacaaaagtgaatttagctgggactcacccggtgtgaacaacagcacgtcgttgagcatctccccattgaatcctccgacgatgaacatattcccaccgctcacaaacgcactgtgcccataacgtgcaattgcctcaaactctttgctgtatatttttactggccttttgcaaactgaaaatgagcaaaattttatcagcgtaatcagaggcccctccgaggggttaagcgaggtatttttttcattgtcaaccaaacccaacaatggtggtatcatgcgtaagattttcaatgttcacccactccaataaccttataaaaagaaaaaaaaattctagcaaaatgtttttagaaaaaaagatttttttcaaatttgattttttttttttgcaatttccatgttataacttttttgattaattatctgatccctgggcccgaagagcaaaaaaaaaaaaagaaagaaggaaaaggtcttcagatctcccccccccccgaaaatttttctggctacgggcttgatctgatcaccaagcaatgcttattgttagaaacagcttctaaataggctaaaataatacaaaaattgtttcagaacatcaacacaactcactcatgtcataagcataaatttgttccgagtaacagtcctttttccgagtggtcgacgactcattgtgactattcccgccgaccaaaagcataattccatccaaaataacagcagaatggcgaaacaacggtgcaccaaaactacccaaattgttcctggagaatattatacagtaaaaaaagatctttagttaacttttaattaaatggaaaccaaatttgacgcttcggttcgtaaagcaacagttcgtcgctgatagaataggagtaactgttaatcggagcattataaccgccatggattagaaccatttcctcgccattaaattcggcgaattgagctgatgcatggccaaatcggccttgaacagatgggtcaaccgcaccccaacgccaacgtccggtttctgccaaatgagcaaattgtgaaaagccataattaaaatataaaattggaatgggcacaccaaccaaatgagtaaatctgcggagtgaacatatatccttcgaaagggttatatccaaataaaatgtgcatttcgttgccgatcacatgggccgaatggccggccaaagccattggaaggtcgagcgtcgacgcattgggcgaagacagcaaattccagcggtttgtcaccatgtcgaactcccaaaattcgttggtcgtttttttctgattaatcactccgccaaaaacgtacaactttttctaaggaaatgttttcatgtatatactgatcaaagttgacaaaaccaaccttatggaggaccacggaatggtcgtaccgtggcgttggctctgtccctttcgacttaactgcgcgaaagcgccgttcgcgtacattgaagacaacaaaatcactattcatcctcgccggattgaacatgaatcctccgtggagccaaacttcgtctctgccaacaacgacggatttatgtgaagcgcgaggagggaaatgtttggcgacattttctgttagaacgaaatcccacacgggattaagcaccaattcttgacagtgttggccgtggtggtgctttgtgcagccgcattgtttgtccttgcacaacgctcggttcttaaaaaagtataatacatttggaattgcaaagtttctatttaaaaagctactaggtcgttgcataaaaaagggcgctttttgaaggaaaaaaatttatgaacaaaaaatgaaaaataacaatcataacaaagccgatcaaaaagctacttaacaaagtaattgccctgactgtctacaaccttttgccgccgagatgggagtttaacaatgccctttttgtaaaattctgtgccattctttgaacctaggtaattttcactggatccacgaccttgccatattctttaaagagcctaccctataaggaatttttgagagaaataatttagccataaattaagtctatagggtccagggaataagacgggtgacgtagcatgtcctataagttgttctcctgtcagccatgggccaatgaaatttggtgccaaaattagggacttggccataaccagaaaattgagtgtaactttattaaaagtgtaa

SEQ ID NO: 4918 - DNA, 6492 bp, Heterodera glycines
  unsure (1)..(6492): unsure at all n locations
aagatcggtaaaaagcctgtatctgtacctgtatttcccgaatgccgtacagaaaaaatccaggctcctctaggcctggatccaggcctgtgtacctgtattttttttggtttaattacccaagtttgagcacgaaatgttaacggcttacggcgaatttaatggccgaaagcgttcccgttttgacccgtcatattccccactaaataatcagcactcattggacaaaaaacaacaactgctggacggagtggcaaaattaaatttcgacaacctcgtcaacgaccaaaccatctctgaagaaagctgggcgcaaatcgcacagctcaccacccttctcaaattggcagcaaacatcattggagactcgatggcgccacaaattgacaatgccgcggaaatggaacgtcgccgctcggtggtggcaactggtattcctgaatcggtgtccgacatcccgtcagagcgcgtggcggaagatcacaacactgttactcgcctacttgaccagctcggggtcgagtgtccggtaaccagctatcggatgggcaaccaagccccaaatggtcggcccaggcctctcaaaatcgttctggccgcgtcaaagtttcagcgcatcaccatcacacattggagcaaaaaaagagccgaactgcgaaaaattccacaaatgcaacgactcaatttgcgcgaatcgttgacacccgaacaattgtcggcccgccgtgagatgcagaaagaatgcacggccaaacgagcacaaactggtcaggactggatcatctacaatgatcgtctgattctgcgggatgatatcaaaggaaaaagcactgcgatgtttccgccgactgtttctctgatcacaaatgttcatccgacaaaaaactgacttccatttgcaatgatttgaggtttgggggctttttggaacaacaacaaacaaactcaaacaaaaataatgcccccacacctcatccacttcccaaaaaaacttccaattatgttgctcatccacctgcgatacccatgacattatctacctcatatgacgatatttctttcacattatcaccatttatttgttctagggaaaaggccgtaaatactaatctcaaaataaccccaaaagtcagatctcccacaaaaccggtacatacctaattcaaatgttaattttcaaaaaaataaaacacataattttaaaggctgtttaacaaatgcccggtctattttaaaaaactgaccttcttttagcctttctcaacactgaaaaagtcaacttcctcataattaccgaatcctggcttaagaaccaaaatttagtaattttcaactcaattttaccagacaattatcaaattttttctgccataagggccgaaaaaaaaggtggaggcgtttcaattataactgaaaaaaaatatcccatttactcctcaacaacggattccaaattcggttgtgaaattgtcgtattacgttttaaaaatttgaaaaacttttcaataattggggcctacaggcccccaacaattaatctatcgaacacaaaaaactttttttcttatttggatcaaaaaatcaatggaccgaccttaatcttaggggattttaatttgaatagcaaatgtataaaatgggataatggcaaaccaaccccactttcaaaaattggacaacactttgtaaatttcttcacaaaaaattttctaagtatgcattgtaccgggcccacccgaggaaatgaaatccttgatctttgcttgacaaatgatgccaggctggtaacagaggttgaaattaaagacagtctaataaattcagaccatgaatctctcttcataaatctatctatttccttacagaaaaccaatccaccagtaataagctatagaaaatttgacccaaaaaatattcatcaaataaattccttcttaagcttccacctaaatgactcattgcaatccgagtttgacttagagcataaatataacaggttcactagagaatccattgatgtaatggatttattttcaccaaaaataaccttcaaaaaggaaccaaaaaatgtcaattatcctatttcactccaagcttctataaaggaaaaagcaaaaatctggaaaaagctcaaagaaaacccgaataaatacaaaccattatctaattcaaatagcctacacataaaaattcagattagaaaatttcaggagcgcgaagaaaaaaatttcttgacaaaaatcccaaaaatatttacaaatttatcgaaaaagattttcaaagatgggaaaccccattaattctttatgaaaacaaaactatcatagacgacggggaaaaagcagaaatttttgccaaacattttgcattgactttccaaaattccagtaattatccacaaccgcccacaactttctcaaatagttccaatttaccgactctttcgaatatacaattcaatgtattagacgttcttgaaattttaatataccttccaaataaaaataacacttcaccagataatattagtttcaaatttcttaaaacttttcacttaatcttagctaggcacctgacagatctgtttaacttatctttatgttcgggcaaccttccaaaaatctggaaaacttcattagttttgccactcttcaaaaatggagacaaaaatttagtaaacaattaccgtcctatatctattacttgttcctgttgccgaatttttgaacgcttaatagcaaaaaaactcactgaattcttacttaaaaacaatcttatctctgaacaccagttcggattcctaaaaagtagatcaacaaccctccaattaatctcctcactggaagactggtacaatgcaatacttagaaaccaaaaaattgatataatttatttagatcttcaaaaagcctttgatcaagtcccgcatgatcttttaatatacaaactcaaaaaaacggaataacgggcaacttattaaattggcttcgggattttcttcttggaagaacctttaaagtaagaataaatcaaaaattttcaaatgaatttcctgtcaaatcaggagtcccacaagggtcagttagccctaatttcagtctttaattgggctgaaacatggggcttaaatttttcagtaaaaaaatcttccgtcttatatttaggaaaaaataacaaaaaaataccgtacacaattaaaaatgcaacaattcctgaatcaaaaattattcgtgatttaggtattttaattgacaacaaactcaaattcaacggacatgtttcaataattctccaaaaagcttatctcaaaagcagaattctttttaaaaaaattaaaaccaaatcaaccaagacttggattacagtttataaaagttttatttgatcccttttagaatacgcaaccgaaatttggaatcctcaaaccaaaaaagaaataaatcgcctggaaaaatttcagaaaaactttacaaaaaatgttttcagaaaatgctgtctcccctacatctcatacagcgaaaggctaaaatttctaaaactttccaagcttgaaaccaggaggaaatatcttgatatcataacagcctttaaaactatcaaaaatactactcaccttaacccaaaaaacctttataatttttcaaataggaaaaagtcaccttttcctattttggtaaccaaacgaaaaattaccaaaacagaacactcctttactaacagaaccacaaaacatctacaagaaatctgcaaaaattcagatatttcaatatcaaattcactgcccaccttcaagaaaaaagtaaaaaacattttacaagattaattttaagttggagatctgacattatcatgtttcccggactatcattttcttccgtggtcgaaatcgcctggcacggccaaggtgtttggcaccatcttacgttaatatttatatttgtattaattactagagttcggcgcgagattttgaggggtcctagttagagaccggaaatttcaaatttgcggatcctgttgcaggattggaattcaaaattttttacaggacaggatccggcaggattaatcctgcaaatcctgcatttaaaatctgcaggatcctgcgcaggattgcggattttaggaaatttcaaaaaattctgtattaataaaaaagtctttcaaagtataaaaaagtattcaatatatttttaaaccaaaaaatgatgaagatgaaaaattaataaactccaagcaatcggctgaatcttctttaatgcgtttaaaaagaccgatttgcataattgggtggctcataataatagcttaaattaaagtaaaataatttttatttaaatttctttgcaaaaaagccaaaatccattatgtatagggatgggatttttaggcacaaaaaatcgcgaaataggcacttaaaaaggcagaaaaatcctaaaataggcacgaaaatagtaaaaaaaaattttattaacgctttttaggtcgcaaaacacataaaaaattcaattgtataaacttttttcgaataaggataagtttttaaacgaaaaatttttattaagaaaaaattttttgaaaaaagaaagtttctgaatatttggcattctattttttaaaattttcaaaaaatcaatgcaggatcctgctgaatcctgcataaaatctaatttgcgggtcctgttgtaggattggaattcaaaattttttacaggacaggatccggcaggattaatcctgcaaatcctgtattttccaaaatatgcagaattgcggactgggatcctgcaaaatcctgcgcaggatactgtcctgcgccggtctctagtcctagtctccaatcccgcattttttgtaaatttcggggttttacgggagtaatctcgtgggcttccatcgcgttgagttcaatcccataacgggatccacaatttaaatttacaaagaacagaatgccaaataaaaaggaattaaattacaagaaattcaattataattagggatgggatttttatgtgctaaaaatcctgaaatatgtaataaaatatgtgctaaaaaatgccaaaatatgtgctaaaatatgtgttaaaaattggaaaaatcaagtgtgtttttgcataaaaattcccaaaaatctcattctttatcatttttcgcccatacaacgcaaatcaaatacatttcaaagtgtttggggtaaaattgatctttttttgattaatcatttttataaattgaaagttccagcagagaactttgaaatccaatgacgaattaatgaattcgattttgttactttctacattcgaaaaaaaattttaaaaatttgaaaattctataagaattgtgaaaaaagttgatttttaggcgtgattttcttgtatttttattgcaaatttttctcaaaaatgccaaaatatgtgcaaaatatgtgccaaaaccccgaaatatgtgccatatgtttttatgtgccaaaatgccaaaatatgtgtttttatgtttttataagtcgctctaaatcgaaaattgttcggagaaaatgtaattataattaaagccatttttatggtaacatgtgatttccttcagaaaaaagttttctgtcagtgataagaattgtttttttataaaaaacattttaatatgcataaattaaaaccatatttttgtaattatttcttacatattacagggttttttttacatattttacgaattttcttaaaaaatttggatccccaatatggtatttaaaagtgatcattaatttttaatttaagatttgactagtgatcaattgggtgagaatttttattgaaaaaataacttaataatgaataaaaatggcaaaaaggacaaaaattagaacagaagatgataaatgactaaaaatcacttatgtgtgatttaataattttacagaagttctttaccaaagtgtgataaatagggatacgatttttaggtcttagcctattttttcctgagcttccagtggcctgaaacgcacgaaaaacatatttttttggtggttgttaagctcttttcgagttattagggccttttttaggtttttatattttagaaccaaaaagcctaaaaaatttcggaaaacctattttggcgtttttccaaaattattttaaaaacgaaaaatacactaagaagcgacccgaaaaatatgaaaatttggcgatttattttgaaagtgttggagatgttggctttaatcagggtagcagactgaggctttagcctcattttgtggtttttgataggtcaatgaggctaaattttcaaaatgaggctttgaggctttttgtggttttttgagaaaaaccgcaaaataaagaattttttaatgaaaatatggtcaaaattcttatttttccccccccggggcggcgcctggtcggcaccgccggaccataaaatttgctcaaatcacaaaattntggtcatttttgtggacaaatctgttaacaatcgcat

SEQ ID NO: 4919 - DNA, 1063 bp, Heterodera glycines
  unsure (1)..(1063): unsure at all n locations
tacaaaatttttcccggcggcgcctatncggcgccngtccgttccccctctgttccccaaaagtttttggaaaaagcgctgaaaaaaaatcaatttcgatttttcatactcagaatttcacaaaatgcttatttcaaataaaaaattgctcaaattgatcatggacagtcaaaaatacaacatttgaacattttaaacgtgttttgaataaatttgtaaaaatgaaaagtccaaaaatgacatattttacgattttaatttttaaaattgtgattgaattgtaaaaaagtctcggtctcgagtctcgaagaccgagaccgagactgaaaacccgagaccgagaccaaaaaagcccgagacttttctctagtcgagactcgagaccgagagtctcgagcagcactagtaatttgacctcgcaatagcttcttcgcatttaaacatgcatgggttgcacttgaatggtaattaatgaaaatgtcgtttaattgctttaaagttgctcatgccaaaatgaccgtgccgaaatgtcccagactgcaaatagattaaaaaattaataattgaaacttttttgaaaacatttacagtcgaagaatatatgttgcaatttaaatcgaggcgatacattgactaaaggaatgtggagccaaacacattattaataaaattaatttttttttttttatgagattttttggaactattaaaagcaaacccccgtccccgcgactctgaccccccgccaacccccgcccacggggctcgaaccctattttttacgatgatagatcagtttctatttaatttccaagaagtaaagtcacattcattttaaaagtgcataagaaaatgcaaaaatatttgcaaaaattgaaagaaagaagagaattttgtgagaattaatcaccgtcttttcggccaattgaaagaagagagacggcacaacaagcggaccaattaattccaatacattaaaatccttggccatttgatcaacaacaaagctttattcgcaaaaaattgaaaaacaactaaaggcgaaaaagctgaatggtaaata

SEQ ID NO: 4920 - DNA, 1625 bp, Heterodera glycines
tctcgagtccgagtctcggtaatgttcagtctcaagcatcactaattgaccacatgggatgacagggtgttgtaatttcatgagctaaaaactaccaaaaatttgcttaaaaagacaatgcatttctctgaaaatgaaataaaatcataaaaataggaataaaaatgaaaaacgatcgccgccctttgcttcaagtggaagaaaagcggacaaaacaaacggacaaagcatcactcattcatccatttttaatggtcacaaatttcgtcgcgttcttccaattctttcataaatgtttcgatgctcttcaccgcatttttgatcaaattctgcttgatattttccattttgttaaagtcttcctttaccttcttttccctttcatcattatcccctccaaatagaattaatccgtcattcaaatatttttcaaaaatacagaagcccatatgttctgttcccataaaaattttcaatttttcatctgacacatcgccaaacagtgccattttctctgcatttttctcgtattcctttggcttacatttgccctccaaatagtcaatgattcctttggcactcattcgcttttctgcatcaatgtttagcatattctatacaagttaatttattcacagagaaacccacgaaaaatttttcatagttttaggtatttttaaaaaactgggcctagatttcttgttggactcggtctgtgtgaatcccctacccacttgaaaaaggggctggactgaatatggctcaagaaaacccaaaaaatggtctttaaatttagacattcttctaggacttaccactgataggaagacaatctctggcattttgtcccataacgtaagaatatcatggatcactgtcaaataattgtaccaccaatttcccgatggccaatattcatcatattttaagtggtccctactatattcataaatgtctattggcagtgataattttgcaggatcaggcttaaactttcctccttcaaatttcaattttgcgcttcgaaacaattcgccaattttctcatccaccttttctttatagccaaacgtttttttgagggtcaattgtaaaatggtaagcccagctgaccaaatgtccatttttggagtgacctttatttaataaaatgatttaattaattagaatgatttaaattttaaaatttgattcacctcaacatcgccctttttgttatatgataaatgctaaaaataaaataaatttaaactttttataatatttattaatctctgacttcaagcagttcgggcgcggaaaagtcattagtgtcatcctttttgtttacaattattccctttttttctgcatgcaaataaagaacagacacttaaaaaagaatttaaaaataataacatttgattaacaaaactgttgaatataaaaataaaattaaataattaataaattaccatcaaaatcggtcaatttgataactttttcctcccatttaattgtcttggccctctctttctcttccctctctctttctttcctctctttctcttccctctctctttctttcctctctttttcctccttggcttttttctcggcttcgttttttctgttaaacattttaa

SEQ ID NO: 4921 - DNA, 1142 bp, Heterodera glycines
aggaaggggacaaaacgccgacaaaagtggagactaatgcgcgaaacgagtgccaatcgctgattaggggggggggggggcagggaattgattgcacggaaaccaattgtggcacaattgtggaaatgggattttgagaaaagaatctggggcccggaaataacggagctcgagactgtgtttctatggtcccggaatttttgaacaaaaataacggagtctttgtcggaagagtaacggtaaatcacgacggtgtttttcgaatttggcacagattaattttaccgatttatttttccaatgatcagtttctttgatagaatgcgcttccgccaagctcctccaatggtcagcagcagtcaaaagtagcagctgtcgcttgtcgtctcggattttccattttagggaaaaaataaccctaattagggaattggggtgaattctcaaaaagaggggggagggtgatggtgatcagtgatctgagcactgaccatcaatcaaccggtggttaatcagtgccttcattccccactttggcgtttcaatcaaaaaattccaaaaataaaagtcggctttttgtcagacgaaaagcgttggcactgtgagcagtgcggccgcgtgttcgctttgcgcagctatttgagcaaacatttgaagcagcagcaccacaacggcagcagaaagaaagggacggcggcggaggaaatggggacggtgttaccatcggacggatacgataggaccaaacggggggagggaatacagtacgatcggtgatggaataaatacggtatgggagaatcattgatggaaacagttttgcgacatttttaaggaattttatagttgacaaattatagagaattgaagaaattctcattagtgaatgtaatgctgatcaaggctttcagatgcagggctgggcgtaattatggattacggaaattacggcctttttggaccccgtcatgatggattacggcttacggatttttgggatttttccataattttgatccgtaattgggtttttggattatttttcgagacgatttcctgcaagattattgttttataaaacaattttttctgtttttatttaaaggtcttaccatatttcttgaattatttaatagaaaatt

SEQ ID NO: 4922 - DNA, 5306 bp, Heterodera glycines
aaataaagagacaattaaaattaataataatttcaaatagaataaattacttcggctcccggaaaatgcgccagtggaaattttattggcataaaaacaactcctttggattttcgaggtcattgatcacgaatccggtaccgatttgtgccaattccggaccccggactcgaattcgaacaaaaattcgaatgtccaaattttcgaatttagcatttattgttcaaaaacggcataaatgatctcttattgaaggattaatggctttcagtttgtttccgtgtatttgaaccttttccaaaatttggactttcgattttttgttcgaattcgtgtccggggttcggaattcagaatggtgttcttacagaattaatttaatattacaataaacagaattttgttttaaaatgtttgtatcgctgacgcattttccggtcactattaattctattcaaaaaataaaacatgaaatattaaaaaagaattaatttaaaaaatataagttttatttgtgtgcattcattaacagactttttggaacggaattcctcacaaatggaaaaaagaggggcgaaatttaattcgctgctataatttattcccaaaacgaatgaatgataatatttcgtatacattatttgctcaattaagtggaaattgagatgaattcaattgcaattttgaaagctttttcccctccacagaaaacgtttgagaaaacaaaattttgtaatttttagcctatgttttttcaatgaatgttaagggatttcactctcgattgactcataaaaacaggtagattttgaatttggttaccccacatttgcgcccaggacatttgcgccccagacatttgcgcctatgtccaaaatcggagtcaaacttattttttcaatccataatagcctaaacagcttaaaataagcgtttgaaagtgtttgtatgcgataatttgatcgtcaggaaatttttaaaaaataattaatttttcaaacaagcaaatcattaatcctaatgaaccaaaagaaccagtttctaaaatttaatgctgtttaagagctctaagactgaaaaatgtaagttcgaacccgattttagacataggcgcaaatgtcgggacacgttgaattttattttacgacaatttttttgtttgattcacttcgttgaattgatgatttcttcgccgaatttccatgcgatgacagtgtgccaatgctttgaatggacaagcggtggccaaatggcttttcacgccactgcaaaacaatgtgccaaaggtgttcaaatgctggttgaaggaggattattggcattttgcgtcatggattgaagccttcaaagcggtgcttacgaattgattatttggcatttttacagtcttttgggttcgctgacaaaaatattttggaaggcactttcaattcgtttttggcgacagttttttttacgaattcaaattgtgaaattttaatgctttttaatttttcacagtttttaactgtttttccatcattttagacatttgccaatgcttcttctcccgttaatttcattgtcgttattcgatctgaccaatgaattgactcgggaacaattgatgctgaaaaggaagaacgatattggccgttttcttctgatccgttacccgattgtgcgcgacccgagcaaatgggcaaaattcgaattccgtgacgcaatgatcagcccaagtgatcagcagcagaagtgaatgaatgatttattgagaagtgatcgatcaattcgaattttagggagttagataatgaatttgatgaatttctgacagtgacttcaggaaaataggaaaacggacaaaatataaaaatagaggccttattaatacggcaagaatttgttgggaaaggtcaccaaaaattgattttttaagtttaaagaaagtcaaaacaaatctttggattcttcacatttatttacacacattaggccaacaattaatcacaaatcatttgaaatgataacacagagatacaacacattgataatggtgatcaaccaacaacagacattatggtcgcttaaacgataaccgggcgacaaatactgtacatacagtgagatacaataatacaatctgtacagttggcatatatgggaatagggtcagttgaatgtatcctcctcctccttcctcttcggcggttgtcttctgcatctctcccatccatcggtcgtttgtcgtctcatttcatcgcgtgcttctgcgtccattcacgggcatttcggttgtactgctcgcggtcgttgcggtagataatcgcgatgttcatctccagcgcactgttcggattcgggtcgcagagaagcgaagagatggagagcagcactgaaatggaggggagacaatgaattaaaacggcatttccgaatttgaaaaatcccattcacacgacaaaatatcgacacttttccaaaaagtccggttttggtggtcgttttgaattggatcgttttgtcgtctcaatattttgtcggcgttttgtctgctctttcccgcgtcgctttcacctttcgaaatggtcaacgacggcgcccactgcgtcgtcttcaggacgtccagacaaatgccaccctgcttgttgacgttcggatggtaaacgggcgtttcgaatttgacaattggcggagtgaatgggtagtcgcgacggaaaacgatgtccaaatggaaggtgcctccctcgtacggcgactcgggcggtcctttgatggtggccttccagtggaacatgtctttgccgtcatccatcggtgccgcggtgcaacccgtgatcggttcctgcttcagctccgccagttcctgcaaatggatcaaaacatttaaagcattggctgatcagagagttgtcatttcgccacctgtttgatgcgtcgaagtgccattgcgaaaacggcgagcgaattgatgtgaaggacggacgaacgaacgaacgatgagaaacggcgatgaggtcgcttttgaagtgttgttgttgttgttgcacaatgaagggatgatgatgataaacgcaaatagttgtgttctaaaaaatgaaaaagcataaaaacataaataatgaaatgaattataaattttacaaatagggaaaaagcaattttttgggtttttttgattaaattccaagtttaggatgggtgatagaggccaggcaaatcctgagaaaaacaatatgctggtcgaaaatgtaaaacaaaaaggaattttggaacacaaaggattgagcaaagaagagacaaattaagcaatttggttaatacaaagattgctgctctattcaaagaaaaaaaaaacaatccgatgagaaaagcaccatttataaagagaaaaaatatttggatttgggcactggaaattttgcccctttccccgctgcgtcgtactataaaaagtccttttccctcctctttcattcattgcctatttaaacaactctcttttccgacttttccctgtgtccacgtcattcattatacctatattctccttaacgaaacacctcaacaacttttggaaaccaaacattcgttcattcattcatcggtcagtttttgcatgcttttctcctttatttcgctcaaatgttttgtttatgcgttctttttgagacaactcaaagccttaaactgaaaatgctgacaaaaaggaggttctaataatttcagcaaaatgcctttttttgttgttatttttggatgcataaataaaaattgtttgctgtctggacgcataaacttcagtagagcaagcacttaatttcatcatttctttaataaaagctaaatccctttaaacatttcagttcataatggccagacccaggggcagtggaagagacccattcaaagcacgcagtgccagggcaagacgtcgcgcgggcaacaaaagaaaggcggccgcagggactgctgcaaacgtgggttttattctgctgctgtgctattcggccttcaattgttttttcgtttcactttttggcacttttccagcagacagagcgaaggtcgaaatttcatttctccctttttcaggtgcaagctgccaacaggcgccccatttgtctgatctgcttgaagaaaatgacccaagtccgtcaggtgcgcaccatctgtgaccacgtgttccactacgtctgcttccaccgttggctcaaatatcgtctgttttgccccgtctgtctgctcaactttcgcacggaattgtatcattcgggaaacgccgtgtttgagggcgcgtacaacgatggacacgttgtgctcatacctgatggtgaacaaagcaacagtggataagtgatcggcactcatctccaattgtgatcggacaaaaacgatatctaattttgtattgtacataaataggttattcggacaataaaactgtaatgtgcatttttaaattggctgtggttttctaaattttgtggcaccgcccaactcgccgcacctttgttttatggctttctcgccgccattgaaaaaatgaatgtgaaaaatttagattcgataaatcatttaacgaaatattcttaatcagaactttttccctaaaatcgctgcaaaggaaagccgtgtgcgacttgatgggtgaaactcccattgattcgacattgaagtccttttgacaaaaggaacaataaaaaaagaacatttgcgcttatttgaaaacattctgaaataaaaatgggtatcacgaaagattcctaataccatattaataataataataaataataattctgaactatgagcaaaaaaattgacataatgccataatttaatatccaaatatgttataaaattaccaaatttcctttgattattttttccatttttgaaatgctcattttcaaagacgtccttgcatacaaggacggatcccatccctgaactaatcaaaatgtgaaattttcactttgtcactttttggctgtttcggcacttctgacttatatagaggggggatttttaaaaggatcgaaaaatgactaatttggtatcatttaaaagctctagatgagatataacggacagattttcccacagccgtcaattcggagcataaccaaaaaacttgagaaaagtgctcaaaaaacgcatgttttggattgatgggaatatgcatgcgcgggaagttcattcattgctttgattggccatccctttgacccaagggcgtagccagacccttggcttcgggggggggggaggctgaagacaaaaattcgatttttaggggtgtatttttgcttttttgaaatccc

SEQ ID NO: 4923 - DNA, 2564 bp, Heterodera glycines
aattttcagtgtccaatgccattggatttttaactttataacttaccgacccgacaacgcgcgcgtcgtcccaaaaatgattaaaaaaaaattcgtacgacattcgcgtcgaatgtcgcaccaaagcgcggcgtataattgactcccaggtagaattcgtcgctcaacagagagccaacgaagccttgaacaacaaaaatcaaaaaataattattgtttctaccggtgtccaccaagacaaagcacacgcgtccattaatatacgcgatcgtgtagatcaaacgttgggacaataaagcttggattggctccggcgttggagctggcgattcagggcggttttaattgtgaacgccctcttgccatgcgatttggatcccattctctgttaaatttcactttcgactttcgcacggaattgtatcattcgggaaacgccgtgcctgagggcgcgtacaacgatggacacgttgtgctcatacctgatggtgaacaaagcaacagtggataagtgatcggcactcatctccaattgtgatcggacaaaagcgatatctaattttgtattgtacataaatagtttattcggacaataaaactgtaatgtgcatttttaaattggctgtggttttctaaattttgtggagggcaccgcccaactcgccgcacctttgttttgtggctttctcgccgccattgaaaaaatgaatgtgaaaaatttagattcgataaatcatttaacgaaatattcttaatcagaactttttccctaaaatcgctgctaaggaaagccgaaaattctagctattttttatcgggacaacaaatttagacaattgccagttgctgatgcgagcaaccccgaaaatccatgaatgaattttcatgatttattatggaaacattttttgcaatcaaaaaggtctataggtctttaataaaattcacgtttcatcacagttaatacatattaggcgaaacaattgatcacaagtcatttgaaatgataacacagagacataacacattgataatggtgatcaaccaacaacagacaattatggtcgcttaaacagtaaccaggcgacataatactgtacatacagtgagatacaataatacaatctttacagttgggatcatatgtgggaatagggtcagttgaatgtatcctcctcctcctccctcttcggcggttgtcttctgcatcctctcccatccatcggtcgtttgtcgtgtcatctcatcgcgtggttcttcgtccattcacgggcaattcggttgtactcctcgcggttgtcgcggtacatagtcgcaatgtcctgccgcagcgcactgtccggattcgggtcacagagaagcgaagagatggagagcagcactgaaatggagggagaacaatgaattaaaacggcatttccgaatttgaaaaatcccattttcaaacgacaaaatatcacacttttccaaaaagtacagttttggctgtcgttttgaattggaccatttagtcttgtcgatattttgttggcgttttgtctgctatttcacctttcgaaatggtcaacgacggcgcccacatctgcttcagaatgtccaaacaaatgtcgcccctttctccaacgttcggatggtaaacgatcgtgtcgaatttcacagttggcggagtgaatgggtagtcgcgacggaaaacgatgtccaaatggaaggtgcctccttcgtacggcgactcgggcggtcctttgatggaggccttccaatggtacaagcgtcatccatcggtgccgcgttgtaacccgtcgtgaccagttcctgatgcagctccgccagttcctggaaattggtcaaaacatttaaagcattggttgatcagagagttgtcatttcgccacctgtttgatgcgtcgaagtgccattgcgaaaacggcgagcgaattgatgtgaaggacggacggacgaacgaacgatgagaaacggcgatgagatcgcttttgaagtgttgttgttattgcacaatgaagggatgatgatgataaacgcaaatagttctggtctaaaaaaggaaaaaacataaaaacaatacataatgaaatgaattataaatttaaaaatagggaaattgcagttatttgtaaaaaaaaatttgataaatttaggatcaaatttgtaagtataggtcacggaaactctgatgaactttcaggtctatgattataatttttggatattcggctctgatatttactgtatcagataggaagaatgactttttgtctcagagttgttaattgctttctcaatatgcgtaaaattacacgcttaacttatttatgattgactgatcaggaacgaaccggattttccaaaatcatcgaacgaaccaggaaaggagctgctatgatgctaactccagtaattctgaatttatagatcttttattaggttttagagctttactattatatttttttcgcactatcaattcataaatattttttcacaaactgctctgaattgcaccaaatgttaattataagttaaataatgctctctgatgctttttc

SEQ ID NO: 4924 - DNA, 6598 bp, Heterodera glycines
aattcccccccccgaaatgaaaatttttaaaaattttccagcaaataatggaaaattttttcgaattcccccccccccaaacgaaaatttaaaaattttatagacaatttttgtaacaaatagcactcaaattttccgtaaaacggccaaaattgggtccttttttagtgacaaagtggagtttttacccagcagtgggaaaaagttttttaagcagccgccgccgacgaccattttttccaagtgtttttttttagtttttttaaaaaactcatgattaagtgatcgtaagtggagagatcgcagcttaaatagacataaatggaaaggggagaagtgtgggatcgatcgctattggctaacagaaaataaataaatgaaaagagattaaaaatgagtgtgaaattgtgcataatgcttcgtcaatttatgttaattagaatatgtcttacacctcatacccccttttagaccgtcccaggtctcagatttgaaaccagttaaaacaaaaaatgaattatgaacttttcgcctatctccattaagaaatcaatttggttgctttcggcattcgaagtaaacaaaaaaaaaaattgttgaaaatattttagaaaaatggcagatatttggtttttgggggtgtattttcaattcttatatttttcttacatatttttttcaaaaatgccaaaataagtaccaaaccctcgaaatatgtgctatgtttttttgtgccaaaaggccaaaatatgtgtttttatgtttttataagtcgctctaaattgaaaattgattcaacatatactccaaaaaccaaataaaatttaacaaatttctaaagttcaaaaaaaatgttcgagtttcgcgttagggattctgaaattcatcaaatagagttcatattcatgatcagcggccacaaaagcccctggaaacacgtttttatcattaaatcaaaattttttatgtgggtcaaactgtataagtacccaaatcctttatccatttcgaccaattcagaaccctgggcccgaattcagacaaaaattcaaatttttcgagtttcactctgtttccttgaaattttatgacaaaattcatgatttttttaagtttggaaatttagaaaataaattcgatagggaaatgggacgttctgtaatactcatctcaatttgtcttaaaattgttgctgaatttctttctcattttacagtgtctcttcgaagttgccttcattcaactggactgttccgacaatttctctgttcaccaatttccctgtcaaacaattgaactgcgcgcccgactggtaccggagcgagtttcgtcctgctgccgctgcttctgttgctgctgattatgtggagaaaaaaataccgatgacgccgactctgttgttggcacttttgctgccgttggccttgtcaaatcggcaaatgtcgtggtccgggacaacgatggaatgtgcgcacgttttttattttgtgacttattccccacattgcagtttgttatgcaccgatgttttgatggacaccttcccatttttggacccaactcggccacaaaatggcactgatttcgccacatttcgactttttagtcgacgcgcattttgaggagaaggaaatgacaatttggaaaccaatccaaattttcaaaggccatgttgcggaagggccaaaattccgtgtgatcgatgatgccgaaggcattgttgaatttcctatgcctacgggtctgcagctgattcccgtacccaccattaattcaatctatttcagtgatctgttccccgattccattggtgatttgatgagcaaaatgaaacagcctgccaaattctgtccaaatggttacacaccccggcaaaagatgggcggcctaaacgattgaagtctattgacaacgcaacaattaattttgaatgggtcaacaatttcagagaggtcagtaaacgtcatattttcataaacatttcaatattttcatttggtttccgttttccattgtttagaatttatccgcgccaccacttctgtcagctacaaaatacaattcaaactctttgaattggtggagccttttacattagtgaacaagcggacccagaaaagctgacactgactaaagcagaagaataagacaaaagatggatggtaaaacgatgtccaattggggagacggcagcgattcgatgggatgtcgaaaagagggacgattttaacacaataatgttttggctgtcacctgattaaatcattatgaatggaaatttacctgataattgctcctcacatttatttgttgcttttttcgtttgaagacatttaatttgtttggattttgggacttttacatcaacagaagtgatgagttagaataggtatgtgctttaccacggaaacgcttgaaattgtatttaatttgaaactgcaacagtgtaattttttggcatttttttcgggatttccaaactcccgaactgtccgacccacgaaatttattttgtttgatttcagattttgtttacttattgtcagtgttgtgttgtagaaattcaaaatgatgcttgtctttcagcgatttgcatatcttttgtatttttttgaaaatttgtttcattttgtgacacatttttggtccataaattgcaaaatgtcctttttcgaggtctttgctctttgtgctcgtccatttgttgggaaggcacgcattttttttgtgctccgtcgtaacacaacaaaaggcttcggcggtgaattggcgagaagaagcaattgccgcatacacaattatccaaacggggatggagaattgtatcccaaattcaaaatctaaacaatttacttttacgattttaaagtccgaggcagcaaattaaatacagagcagaaaacaaaacgaagaaatatcataaaacaaaacgaatgaatgagggaataacaaaatatgtatttacataaaattggcagccctattaattaattatataagcaccgctccattttttgcgatcggcaaaacattggacggaaatgcggacaatttgtcgaacaaaaagaaaactaagccaaacgcggcaacggcgccgccccaacacattgcattccattttggaatttttaatacatttttgattaaataattccgacctcaactcggcctcaaattggcactgctttctcctcgtttcgatgttttagtggacaaacattttggtggaaaatgcgaattgataatttggaggccaatcaaaatttccgctgccaaacaaaattcgctttaagaacttcaaattacgtaattcaaaaaaaagcacagcaagaaagcataaatgttttttaaggtacattgaccatttcgtcatcgcatttctccgctcaaataaacaaatttttgacaacggaagaggcaccaatttgtatttaaatgtgttttatcatttcaacaggaaacgtgtccagcgaattttggatgatgtttttctcagtgaaattttgcccatttttgcgccaaacattcgtcgtttggactttccaaatgacgatcatctgcgtcatctccttcgaatcagttcgccgtcacttctcaccgatctcaatcagttgaattcaatcgattccgattatctggtgcctgctgctgccattgatgattttgatggacaaaatgcaacttctgctgaacaagttctgtccaaatggttgcacacgccgagaaaagacgggcagccgaagcgattgcgttgttgtattggttgtgcattgcaaacgaaaaaatggatgaagaaattcaagcaggtcgccccaattttctttcgacattaattctttccttgttgtaaccaaacaactgaattctaacaaaaagtcgaaagtatctcttattaaaggattgattttgcacacttgacaatgttacttttaaagaatatattaattttttttcctttgactctaattttcatcactaatttttcactcagacccccattcttaccagtgcttgtttttcccggttgccctaccgggaccgggacctgagcttttcaaaatccgggacctcggatgaccgggaattcccggcccggtcccggtcccgtggcactctactttaaatcttaaacattttttcgaaaaatcctcatttttgcaataaattttaattatatatttctttaaataattttatacaaaaaaatagattttagtttctaaaaatcgcgaaatatttgcatagatagttgctaaaaaactggtaaattcccaaaatagttgctaaaaaagttgccaaaaattggaaataactgcttttttgggtaaaatctgttaacaaatcgtattataaattacaaaatttttcccggcgtcgcctatcggcaccgccggcccccggttccccaaaagttttttggaaaaagcgcagtaaaaatgcgcaacgcagattttttcgcgtccagaaacccgaccgatgaattttcggccgacccgacccaaatcccgacccgatattttttggaaccgcggcaaccctgttataaatgacaagaaattgatgaatttgattgtttcaaacgaaaaatatgacagttgactgattttgttcgcaattttatgatgttttaaaaatgaggattttttatggctgaaatgaggattttcaaaattttgagatcgaaaccctgatttaggcgtttctccgtgccaccactgtgccagtcacattctgtcacttactttacccaactcagcgcaaattgtgccatttgaattggtcaatgaacgaactcgagaaaaactgacactgctgaagaaggaatgaggagacttatcgatatataatagtcaatgggcgatgaagcgatgcccaattggacaaatggttcagtgggaagagctgaaaatttggacaatttgaacaatgtcagcattatttttcgtggtttcactaattgcattgggtgagcagaagcaactgtattgtgtactgtattgaaaagaattttaaaaaataagtacttgaatatatcttgaaattttttccaaaaagaaggacctccatcagtaagattactgtttttattgaaaatttaattaatattttcaattttttttcaatttatatgtttttgtcggaaccgctcagtttgcgcgcatggttgggcgccagcacgtttttctactataacttttttatttattatccaattagaatacctgcaactgccgacacttgaaagcaggcgaaagctttctgatctgttcatggctcataaaataatttatggccgaacagatctagatttatttaaaattttcaaaccttctaaacgctttaacattcccttttatagacttaactcgaaatataaattaggcaaaaaatttataccttttgcggggcgggtaacaaaaatttggaaccaactcgataaaaagcttattgaaataaactcattaaatcaatttaaaaataaattaaaactatttcatttctgtaagattgaccggaaaaataaaagtcgaattattaattcattaaacaaaaagtgatttggtcattatttttattttttttattgatctcacattatattttattttttggcggcgatctcgtttttaattgtttatgcgctttcttgaggacattttaattaatgttttgccctcaatgtaagcggatttttcccttttgtggactttttctttattgacaaataaataaataaatataaaaaagttgtaaagaaaaaatttcaaaatttttgaacttttgcaattttcgtgtatttttaggtctcgaataaaataattaaaatttatctaatattttaaataaattattaaccgaaattacttagaattttataaatattttaaagtttcattggccccataaattttacaaaataaagcctaaacataggcctaagtccaagcaatttagcttgagatgaagcggatagaaatattttaaaatttgatttttattttttaatttagtccaattataattgaatttgaaatttcaaaataatctggttattattttatttaatattaggtaaattttaactattttattcgagctttaaaaaaacttttagaagaatgtttatttaagtatcaatttaattaaatgttaacatattttaaatttaaaaaaatgataaaaaatcataggaaaaaattgatttttgaactttttaggaatcgaccaaccacagttcataatcatctttcacgaaaaaaagtttcaagccccctaaaaatttttttttctgaaagttttctggttttaagccattttaaataataaaaaattttcaaattaatttttaggtaattaataaaacacacaaaaactttctttaaatgtaaatgaaattatgaaatttaaaaaaattgtttttcgaatacggacaaatttaaaccaaaaattttaattaagaaaaaataattataatttttggggatcaatttttttaaaaaaaagtttttcaattcttcgggtgtacatttatttgtttcgatttgcgaaagggccgttcaggaaaaaacaaccaaaaaaaaacgacaaagttccactg

SEQ ID NO: 4925 - DNA, 1122 bp, Heterodera glycines
  unsure (1)..(1122): unsure at all n locations
atgtgccaagttcaaattggtgaaaaacaaatcgcgttttattatcaaagacatccctgctgaccctgaggcactcctaatgggcgtcttccaacattgtatggatgaagcaattattgacagccgtcaaagtggagttgaaccgactcatctcggatgtattgtttctagccagaacctttcttccgacatttggatccccattcggcagcttactcctgacaccattaacacaatactaaatcgcttcaacgacgttgcacagagcaaaaaacaggatgatgtgacgctgtggggtgaaccatttactgttacagtaacaacacttaaccgtaatgctctaccggcgaagcgtcaactgaaagggggagtagcccggaaattagcaccagttcaccacaatattcatccaaattgtcttattaaagttaataatttataatgtcttaattaaaaataaattttagatccaaaattttgatgatgacaattactgtttattttacgctatccaagcaaccttggttcgatcaattggtgacttggatcgtcgtcgctttcatgattacgtcaatggaaacagtgaaatgagaggaaaacttaaaaatgatgctttggaaatgatgaatgctgttaacgcaccagctggtcaaccaaattacgatgcggaagtatatgtgccaagaattgtggactggtggaatggggaaaaattcgtgggccaatggaaattcaaaacatttctcttcggatcagcaggccattacaagcctttattcaaatatggaccagaggactatgttgtgccgatcatcctttacttcgaagaggaacattttaatggtgtgcagaaaagtggcaatttgttcggcaaaccatattgtctaagttgtgaaaagacttacgatcggccaaaacgtcacattgtcaattgcaaagcccgctgcattaaatggtaataaacaattttaacaatgaattaattatttttaagctcccaattgggtccaatatttccatgcaaaccaaataatggattccgacaaaaatgcaaagagtgcaataaatttattcttcacactcatgctatcagtatcatctttcatcnggaaatttgcaaaa

SEQ ID NO: 4926 - DNA, 7276 bp, Heterodera glycines
  unsure (1)..(7276): unsure at all n locations
ctacccatcggacgattacattcagccaaatgccatttaccgtaacaactgnagatcgacaagnaattgaccgacatcccctggtctccttcgtcaaatggattctatacaatttgccaaaacaatacgacaccattgcatacattttggaggacgatttgacatggttttggttttccgagaattattcatggaagggctaaatccgtcaatgatcaaaaacggcaacagattactcgaaatgaaagtaataaaaatatttttaataatatttatttttataattttttggtaaaaagtcggaagaaattaaatccaaatatatcattccgagattcttggaatttggttcctggtccattagcctcactggtcccaatgtttggcttggacgttcaagacaagccgttctttccacatttggcaaacaggccggaaaattacggctgccaaatatttcctacgaaatcaaactatttggccggtgggataaatcctgagaagcgtaaagaatttgacatttggtatgctcaaaaccaaaatcagccgtttctgcttgatgaagcattggccaggtattttttataattttttgaaataaccaaattttcagttattgtaaaaatgacgtggatattttgatggctggccttatcgccttcagaactgaatttttggagatgagcaagcgacctgctgatcccgacggaaaggcaaatcgagcaacttacacaactccacacaacggaattgacccgctcaagcattgcataacaattgcatcagcatgcatgcgtcatttccgaactaatcatttaaagcctggtcacttggctcttgttccggaaaaaggatacgatagctgcggcgacaatcaaagtgatttggcaatgagttttatgcagtggtacaccgaaaaatatgcggttcggattcaaaatgctttttcggctgaaggagagaaaaggtaattttagagtggggattctgagcaaaagttattctcaagagttggcaattttcgtttggacggttggattgagtctcaacgaaaaggactagaaatccatggctgtgtatggcatgcatgctcaaaatgttatccggatgataatgatgtaatgccttgtggcaaatctgcaggccgaattcgagagagaaacaaacagagaatggaatttatattgaccaaagtgccaaatgtggaaatcttttggcaatgtgagattgaggaaatgctgtccaaggacagggaaatgaagcagaaattcaaagaatatacgggagatggcgggccaatcaatattcgtgattgttttatgggtggaagaacaggtgcattgaagctttatcacgagttggcagcggacgaagaaatcagttattatgactttaccagtctctatccattcatcaagtaaaattgaaaattttattttccccaaaaaaagttatagttgtgtaacttattatccggttggacacccaacacttcatgttccgtgtgaggacgttgattggcggagaccagaggacaatccatatccgcttgcaattctcaaagttttcgtcattccgccacaaaaaatcgatgttccggtattgccagttaaagtggatgatcgactatgcttcccactctgcatgagttgttgcaaaaaatgccctaacggaggtgtaagggaaacatacaattgtcaacacacataagcaaagaggatggatcagtacatgcacatcattggaggtattaaatattttattatttttattaatatttttagcttaatgccgcactggaggagggatacagagtcaccatgcttttacgcgtccttgaatacaacaaaagtgacaaccaactttttcgatcatacatgagtgaatttatggcccaaaagttacatgcatcagggtttgatgaagaaattcgcggaaattctgaagccgaggaacgattcataaaggagtgccgggaaaaatttgacataaaaattgaccgagcaaagatgataccaaacaaggggaagcgagccttggccaaattagctgtgaacaatttatgtatgttgtataaaaacccaaaattttttaatgataaatttagggggtcgtttttccctccgtaattacggactctcttaaacttttataactgatgatccatcagagctgggaaattatcttgacaatcggaagatcgaagtgactgggctcgacatgttaactccggagcggattttaatcagctacaatcagaagaaggattgggttcaggaacacccctgctccaacgttgtcatttcacttttcacaacttctgcagctcggctgcacttgctaaaagcaatgcagaaagtcgcgcgaacccctggttgtactattttatacactggtaaatataatttattaatgaaaaaattaaaatttttaagatacggattcgttgatttatgttcacccaaaaggcgcaaatcctttgaagacgggtcctcacttgggtgagtttacggatgaatttccaaaggtaattgatttttgattttaaagaaataaatttaaattcagcatgacattttggaatttataagtggtggagcaaagcaatatggtctgaagcttcggaagaagggcagcgaaaatgagtttgactacgtgctcaaacttagagggataaccctaaattatgatgtgaccaaaaatcaggggctttgttacgacactttcaaaactcgcaccacttcaaaaagtatataaaccatatgttggcaaagggattgtttgctctcgtgattttcgtgtgcttgattttggttattccactcattgattcgttgtataaagttgaaaaaataaaaatttatttaaatggaaatataaattgaaaaatattaaggaatagaagaggtcaattttgggtgaaaaatggcaaaattaagagagagaaaatacaaaatggaaaaaagcttaatctaccacaaagagtagcaatcattttggctatattcatcgcgcccatcaacacttttcgaatcatcatttgaagtttgagtgtcagcaaaatttgttgaattagttgcactaatattgttgttgttaatctcggtgaaaatctgaccaagccattttgattcatcaacttcctcaattttgcataactcaagaggataaaaacgatcctcttgtccttcaggaaagcgttcgatgacacaatgaagaaatggatggcgaagtttaatacgatgtcgaacgtagaaatgtgcggccacattaacattgtaaggtctacctaatcgcccatatgccattgtagttgcagctccttgcgcagtaatacccccaaaaaccaaagttttggtgtatccatttctgtccttgtatgttgtttgaatatgctttccataaaatgctttcacaacgatttcacaatctgatggatgatttaggcgatcacggagctcagtaattcgacaattcaaaagttgtgctattttttcagtaagaaggaccatttttgcaaattaatctagaattaattaatataaaattttaaaacgaataagtccttttctagaaaaaaaaactgcaaaataattttgcgaagatgattaatgaaaaaaaaagaaattcaagcgctatttataacagtcatgaatataggttaagtaaataataacaagtataaaatcagattttcattcattttaagtcactttaatattaataaaataaaattgcattttcaattcctgatttttaaaataattttttgataatgtccgttccatcaaatgacaaccaatttccaaaaactacaaatgaatgccaagtcgatgacggtattttatttttatttattactcataacaaaaaattatgaataacttaagatgacgtcgacactgatccatcacccgaggaagttgagaaatggactcccgaggaagtgatcgagtgggagaagcgaatctttggaaaaatgcctccggaagaggagttttggcaggaaattatcgatgatggagacaaagatgtgagatattcattaaagcatattttatacgccgaaagaaaaaagcggagagatgaaatattgaagcgaaagctaatcgaatacgaagaatcactcaaatctaaggctgataattgatttaacagtttcgattgtcctattcagcacacgaatttttgttaatatattcatgaataaagaattgaaaacaaactccgctcaaattaggttaagcaaacattaaatggtataaaaactctaaatttaatataaattttcattttcattactcaaataataaaattttatattgcaaaatgcttgacaacgaaaatggtggttcaaatgaacctcagcaaataaacgaaaatgttcatgtgaagaattcttataatgttcagccctggaaacttttccgtccgaaatacatgctcacctaccgcatgtgtgaatgtaaacaaaataattaaatttcttttttaatttattttcttcagtgtgtctttccgcattgtggaacaacaaaaacaaatatataccaaatgaacgccgagcattaatcagctttgaactttgtgaaaaatgcacaattgacaattgtcgtgcgaccgaaatacttgcaccgttcaagccgaagaaataaatttggagatgatacgcagattttctcacagacaaaaaattccagttaattatttaaatctttgcatattcgtctctctctatttcaccaattcctcaattatttgcttgtttgcacgatggtgccaaataaaaaaaatgtggtattcaagaaccatttgacctctctaatttgaattcactagtggattcaccaaatatgtttgcatacgattctcggttaggggttaattgcggaacgataaaagagattacggatttacagttcaagcactgcattcgtcgaatggtcacctcggaaatttgagatatttggtgagtattgccaatgcggaaaggcttgggggtctagtaggcggaacgaacggcaagaaggttatttggcggatgccaaagcaaattagttgcttcttcttctaattttatttactttttctattttcttttaaaatatttttagatatcaattaattaaaattcattttcaattagcgacgaataaatgtccgacaacgtctcgaattcgatccaggagttaaggcggatggtcagcgaccaaaaccggatcattttcaacttgcgctcccagatgatagaccaaagagcagtcattttgcagaatttatcacggattgagagattggaatgtttcgcttcgaacgtaatttaaatttatttattggattttttaaattttataattttattttaatataataattcaacattgttaaaattaaaactattttttccagaaccgcggtggtcgtggtaactttcgtctgcggtataacccattggcggctgttgaactgaccctgctcggaaatcgtcttgaggacagggctcgtagacaccgagtggccataggcgcatcgacgtcagcatcgctggtcaggctgtgcagcagcctcagctgttagaaggcgaaaatggtgaatttatttaataaattaaattatataaattattttaataatattaaattttaatgccttcttttgggccaacaattgagcgccatatggagagatcgcgtcaccggttgctccatgacgagatggttcagagatcggtacaacagcatttccaacaccaacaataacagcttgtgttccaagctcaacagcaggaacaccgccgacgtgaagtgcagagacagttcgaggtagccgaacagttgcaagaagagattcaggcagcggaagagggggaaaatgatcaagagaatgaggatcagcatcaacagcagcaacaaggaggggaggaagcgcaacacggaggggaggaagaagtgcaacaagctgcgcagcaaaactttgagcgaacagtacgactccaattgcgcgagtctcagcgctttcacaatgggtaggcctcgtccgtgttggtgccaccgcgccaactgttctgggaaacggagtgcgtggtttgcaccgcggcgcgcccacatttttacagcaaagaatgtgggcacatttttttgtgcgctgactgcgctgtgacatcggtgatcaataaggtacaccgatgtatgttatgccgtactcccgttagcgggatatatccttttgttcgctaagttgtaaggattatggaagtaaaaaaactacttttctgaatttggaaaatttttaaaaaatttaatttacttccctaaataatttgaatgctttaactaattatgtttatagctttcaaattgtaactgaatcgaattcatgaatgattttttcaaaactgatccaattgactcataataattaatcatttcttacaatatcgtaattgactctcattttgatgacagttttcacttcattttaaaaaccaatgtctcattttctgtaattcaatatttttcaatgtaatctcatgttactttgcgtttgtcaaccttttacattaattcaattcacctctcactatatatttgtgtctatgaaaataaaataaaactcaataattgcgaaagtgaatgaaaaatttcctatttttaatttttaacaataagttttgaattaatagacaaatgtatgggatagtcttatggtaattacagtatcttataagagagtgtggggagacgtgtgacagtgaaaagcccaaagccagtgctgaagagcatcgacctcacataagtgggtgggcagagaaagagagagagagagaagcccaaagccaacgctgaaaagcaccggcctcacataagtgggtgggcagagaaagagagagagagagaagcccaaagccagtgctgaagagcatcgacctcacataagtgggtgggcagagaaagagagagagagagaagcccaaagccaacgctgaaaagcaccggcctcacaaaagtgggtgggcagaaaattttaaaatttttcgagaaaattcatatgaaaggaaaatgatgaaaagtagaaaaatttaaaaatttaaaaccataaaaatgtaaatgaattaataaaaaatttaaaaaaaacaaagaataaaagtggtaaaataggaaagaagggggaattttgcctttaaataaattcaaatgaataagtacattggaaattgagggagaattctgcttcgggtaagagattaataaaatgtgtgtgtgggtgtgccgaagaa

SEQ ID NO: 4927 - DNA, 1679 bp, Heterodera glycines
ctatgttttagagttatctggcctctgtccacttcagtattaaccccaaaattcgtccgacgcatttggcatttttcggtcccacgccattcgcccaatggcacaattgttggccaagttcaaattgatggtccgaaaggcaacaaaatctggcaaatagtgatggatgcgaagtccgaaaaagcatttggcattgatcagaagacgggcgaattgacaataagaaaggaggaagggacgagtttgaagaggaagaaaaaggtggcaaatggaggggaagaagaagcggaggaagcgaccattgtggtggcactgatcggagcagcggggggcgaattatttgacaggtgatcgactgatcgaatcattaaaaaacataccgtaacggaaaagaccgtaacacctttaccatttcctcaaatcagatgcgtcgtccgcgtgttcttctcccgccttcgtcccccctgcgtcgcttttccctccccccatttctccgtccgcctttcctccaccgcttctgatcagactgctttgcttcggttcgacatcatccgccacactgactttaaaattgtgctcagtgatcctccggtatgcctttttctctgaataatgttcgcctgtctgatcccgggtccaatgccggtccatttcccgatcaaattttgtgccgatcggtcccccgtttctctggcaatgccttggtttgcctctgatcagtagtgatctatccgtttagccgttgcccttctgcttctccgcccgttctccctccgtcctgtctctctgttcgtctctgtcccctctccgtctctcttcactctcttcgtccgtctctttgattctcttcctcctcctccttcatccttccggccgcgtttgctcccgttcctccgtctctgtgttcattttgccctcctcctcttcttttttgccctttgtccccgtcggtggcgttggttttgtgcgaaggaatgcgttgccgggccaaaatgtgctccaatttcgaaatggccgtggtccattagaaatggttgaccaacaaatggacaaggtgcttaaatactctctcattttttaattgctcctaattgccaatatcatccctaattacccctctttctgtcccttttaagctttttcggcttcatccctccagcggtgtcctttcaacccgaatttcctttgtcggccttcgtctcccttctcttttgccaattgtcgtccgttcacacaatgccacttttcatctttttgtccttttggaagagcaacaatggaagaatgccaatgtttcgtctgaatcaaatgccaaaatcgaagtgattcttccggtgatttcatccgataaaacgacgaatggaaaggaggaattgcaattgctggcgacagaatatgccaacccaaaccgaaggcgatgtgtgccgacattgaagcgattagacaacgaattgcgatcgaatgtgacggtttgtcttagggatggggactgatcagtcgaatgattctgctgatcagccctgatcaatcagttcggttttgccagatcacttcctcttgctctctgctgctctctccgttgcctttgtcttccgtcccttccgaatttgttcctctcggtaatggcatatgccttcgaatttgactcacttcatttgctgctcgtccttccgcgcctc

SEQ ID NO: 4928 - DNA, 5640 bp, Heterodera glycines
ccttttatcccttttatctctctctctcactctctctcttttttgtctgatcattcccatgttttttctcatttgatgctttctcccagtttctgcttttcctcccctcaggtccttcttctcccgtttgttctctctgctgacttttcggctccgttcggctttcatcggcttctcatcgcttttcgtgaccaaaatggcaacattttatctcagtctgatgccgttcgtttgatgcaacattttttcgtcactttctccgatttgtctgacaatgcgtggaatttgcgagttgaggagacaaattttcaagtggaagaggaaagaattttggactgtttgaaagggccgagggaagtgatcggaacagcgcagaaagtgtgggcaccgatcaaggcggacgaaaggcaatttcgagtgatcttttagatgccaaagttacccatatcttaatgctaacagttgcctccgtcttggccccgtcttcaccccaaaatgccctttttctccgattgtctctgccaacgaattgatttctccccccgtcctttcctttatgccctccggcaacttcaacgaccatttcggcttcgttcgcttctccggcatcctttttccccgtgttcgaatgatctctctccaatttctcactgctcaatcggtcactctttccttccaattcttttcccctttttctcatcccccgcactttctcagagtgctctccttctctacttctctctcgattccgcctcatctttctttctgtccgtcgatctgatcaacggaaagccaagactgaatgtgggactgacttttccgcttcaaagtcgcgtcattgaaaagtccgttaacgatgaaagtacgctttgctttggttctttccttttcatgcctttaccctctctaaatgccacagaatggtggcatttggaactgagttggacgaagggacgcgtgacattggaattggcggagtgccaaacggaggacgaaaatggggacgaatgtgctcaaaagagtcatggcgtttatctagtgcatgtccaccttcagcaagaaaacaatttgctcctacagtatgctactttctcttccccaactgtgtctctaccgtaccccttttcagtccgccctctcttcgtttctcacccttcgtcattttcggtgatctctccgttttgcctgaccttctccgtcattctgctggtcggacttcggacttttcattcgttggctgtcagcgacgaattgccatcgacggaatcgaaataattggccaagatttggccattttggaggagagattagaccaattcatggcggaggtgtttgcccattttattacaataaattgctctcttttgatcagatcaatgcaaccacttcatccatgtgtccgttcattggaagtgcgcgaaataaaaggccaaatgtttgccatggagaaaatgcccggaaggcatgtggaaaaggcatttgtatgcctgagggaagcgattcattcacttgccaatgcgaaagtcagcaagttgagtccgctaattgtgagcagggtgagaattctttgcatatttctgcttattcattaattagttaattaattactcaatttccccaaaaagttctcttcgccgcttccctccgcttcagtcctctccgttttgtgctctcttctcgcactttcaatcgtttgtccttcgtccctttgcccggcaatttggtccattctctcccccgccgtccgttgtccctccgtcgtggagaggacgaaaatattcaatttgccgatggattgaatgtgttggcattggactttcattcgtcgaattcggaaaatggaaaaggcgaagaaacacttttgtgcattgaatttgatgatttgttgctgatgatagcattagaggtgaaaacagcgaaatgtctgataataaacaaaatgaaaatgttattaattcatgcaaatggcacttttgtcaaaaaaatgccaaattctattaattgaccatttaaataataaaaggcctccgcttcagatgaatgtcaattctatgcgcttcgttctccaccggcacaccaacaacactcagccgacgccgtttccgctcagtttccaattgatcgttaacagttcgacgccgttggacatccattggcaccgattggccatgggagtgtcgccagacggaaaaatggtaaagcaatgaacggatgacagcgaaatgtgtcatgtccgtttccctccccttttgtgcagctccgtctccaacttgatgacatggctcccgtcgtccaccggtcgtccctcctcaatttcttccctctccttctccgttctcggctaaaattgctgtcgttgggttcgacatgttcttctctcaacgcgcatcaaaatttgtccgtttttcggggctgcgttcgccgctttctgatcaacaatcagttgcagcaaatccatccccagcagatggctccgtttccctctcacaaaaaggtctctcctcgctccgtctgtccgtccctttttcactgtctttccctcttttcagtctcttcggctgctaattgaggagaatcggccggaggatgcgatttcgcagctgtgcctatcagccaaatcagctgaccattccgttcttgcctcgatatttgccgtcatttctgtcctttttctgctctctttcgttctctttgccatcgtttttcgcttcaaaaagcgaaagagaaaagaaagtgccaaaagaaacagaagtgtccaaatatcatcttcttttgtgacccaaagtcaaactccgccgattattgtgccatcgcaatttaatggagaggaagaagagcagaaaatggccaaattagaaaattggcgggcgatggccgtctcaacggacactttttcctcaattggcttcagttcgtgttcgactttcccacgccactccaacataatcggtccaagtgatgccgaaggtcagttgaaaatagtctctctctattttaaaacgcccctatctataaattgccgcagattcagcatgagccgtccaattatcattcaatcgcttccaaaaaaggccaaggttcgtttatcctttgactggttaaagttcccttttgacaatgggatatctatgctcagtttctgttatgcctttttaattctcttttttcaccccaaagattgtgaaaatgaatgctacgacacgaagcgcttaacgacggcagcgaagaaattgaaaataaagaaaaatgaaatttacgggtgaagcaccaaaaagaaaaatatataaaaagaaacgggtcattaatagggctgccaattttatgtaaatacatatttttttcctggcttctccttgctctaaatagcaggaaaaacactttcttttttgtgtttgcgaacaaaaaccgggacttttatttacatatttcggggtttttatacatatttcgggattttcttacatatttgtactagagtgccacgggaccgggaatttttgccaaaaccgggaccgggacttgccgggacctgagaagccgggaccgggacctcgattttttttcgggaccgggaccgcaagaaaaaccgggaaccgggaccaaccgggaaattttaaaaattcaaaaaaattttaaaaatttaaaaaaaaattcaaattttaatttatattaagtgaaaataatacaaaattatttggttttttataataaattaaattaatgaaaattttcaaacaaattttcttcaattatttcaaacaattaatcatttttggactaaatcatcgaatattaatagaaattcagatttgattttcacatcacttttttcggagcgctttttcaaaaaacttttgggaaagaaggggtccggcggtgccgataggcgccgccgggggaaattttaaaaatttgggtgcaatttgttaacagatttttaacaaaaaaggttggtttttgcgattattaagctcaattggtaggattttcatttaaaaaatgataaaatatgtatcaatttaaaaagaaactatgaggaatcatattttctttataggaaacccacgagtatacaaaaaaaaaattgaaaataatctaatttctgcagagggattgaaacaggggaaagaagaagggaaagccaaggagactagccattaggccatttgcacacttgggcagtgttacttttaaagaatatattaattattattttttatttttccctttaactccaattttcatcactaatttttcactcagacccccattcttaccagtgcttgtttttcccggttcccggttgccctaccgggaccgggacctgagcttttcaaaacccgggaccgggaaccgggacctcggatgaccgggaattcccggcccggtcccggtcccgtggcactctaatttgtacatattttggatttttttcatatatattttcatttttttacatattttgagtattttttacggaaatttttggaaatcctcaaaaaaaaatccaaaatttcggtaaatatttttatacatattttcatttttttacatattttgaagatttatagaaaaaataagtttgaaaatgttgcctaaaaataccaaaaaaagtaatttgtatgtcattttgtggctatttcatactttacggggattttctttcccaaaaaattccattaaaaaaatttttatttacatattttgggatttttcttacatatttctttttgtacatattttttgcagccctagtcattaaaatgctgaacatttatagaatttgaattttaaaaaataattaaactttgtttgtgtgaatagcaataaaattagtactacggtagtcaaattcaaaatattcatttttattttgaatttaatttattttaaaatattttttcataatttaatttaaattctttgtctacaaattgtattacttttttttcaattaaatattaaaaaagtccatatgtacctgtatatgttcttccttgtctcatgtcctttttagatgaaattgttaatctttttgtttttattgctctccataactctgagccaatgctcattaagtgccaatgttccagccgatggagatggagtgattagtgacaatgaatttgccgaatttgagtttatggatgaagaagacccaatcagtgaccagcagtcaaatgataattaccaacagaatgggcaacagcaaaaagagcagagaaatggtgacaaaatggaccaacttaacgaccataattccaaggaagaacaaattggtaaaagagcggatgaaaatggcgcagaaaaggtgacaatgatttatgggattggaattttatttcaaaaaataatgtacaaattatgcattttactagtatgtcggtttagatcaagtgaaattgattagaggtgcatttcagtacctaatcaaacttaatttcaacatttagtcagctcggagtgaaggtgatttttcgtttcttgtcgacgaagaagaatttgatgaatttccggcgaaaacagtggaagaaatcgaccaaactcacaagggggaagtgcctgtcaacaaaccaccaaaaccattgacttttgctgagatgagccttctcggcgctagttaaaagagcactattttga

SEQ ID NO: 4929 - DNA, 2163 bp, Heterodera glycines
  unsure (1)..(2163): unsure at all n locations
ttttttcaacctgtttatggtcaaaatttgttttttttgtttaaaaagtcctgaaaccaagttcccggtggttttaaaggtcgctgatcaagaatatgacaattatttgggcctattaagcaaatttggcgctagttataaagtgataaattttgtattttatcaaaaaccataggggggagggacccttttgttttgtaaatttttttttggataaaaatcgtgaatatacattttattcaccataattgtgttgttaatacttaatatccatcattatgtgtaaaaaaacaaaaaaaaaatttgaccaaaaaaaagttgaaaaaattttcaaaatagtgctcttttaaactagcgccgcccttttcttnttttcaattataattgtattttttaaggttccctcccatttccggtcaaattggtcaagctaccaaggtaaaccaaagcttggaaatgcctttgtcgcaagtaaattgtaagtccacttttagtcgaacttctcgctttgctcatcatttttgtttatgcgctgaattacgcttacggaaagtccaaaaaccattccattgctcacaaatggttcatggacaatcgtgaacgtttggagaagcaattcgcactggttggcgatgatggcacttcgcaggaaaatatgggcggttgtctgatccgcgagactgactttgcatattctgtgtggtgcacagggcgaattggttgtcgctcaatgcacagccaaataaaggtgcgttttgggttttccatgtgtcaaaatttgtttatgacaaattttcagctcttcaagcgacaagatctgcttggtatgatgatcggactcgtccgtccccggccggataacgtagtgtacaaaatcgacctggaccctgatgagatggattcatttgttcttatctttgggcagcgtaaaaatgtgcaaaaaactgtgaaggaaatgcatgatttggtttgtttattctgcaaaattattaatatttattgtttttcgctatattttagtcaacgtatgtcactgagcgtaaaaatgtggacaaagttcagctgccatcttcgatttgtgtctttgcagaaattgccgagaccattccggccataatcgacgcttcaacgctgcaattcctcaagaaatgcgagaaatacgtggagtacattcatttttccgatcaatatgctggcgcaaaacagccggagtgagtttgatcagactattatttaatataattattcggaaaatgaatttagtgatcaatatgtgcgtcttccggagacgcacccgacgttggtgttcagctacataataacagatgacaacgaagagggacatttgatggattcgatgctgctgaacttcacctttttcatgttggataaagtgcggcggtatcggctgagcaaagaggggaaggcaaaggcggacaagaaaaggcaaaatgtgcaggagaacttcctcaaactgacgcatcagcagagacaggaagcagcacaggtgaggaagacaataatttacaataaatgagacgggaaaaaggctgtttttgttcgatttatagacgcgacgtgaagaaaagacacgggagcgaaagcaacgagtgattgaagaggaggacccggatagacagaaacggttggagaggctagagcagaagcgagatgcgaaacagaagcagccgaagatgaagcaattcaaaattaagtagctgatagcgtataagcagggaacgatggcatacaacttgtaaaaatagctatgaatgccacttcgtattgttatttactcccatttctatttgtccattccttaataaatttatgttattataattgatcgtggaacgattacattcgggtaaatgtatgcacggaaaaattaggtttagtgactgttcgtcttgtttacgggagtttctggagtgataactaaaaatggaacccatttaattaaggctggcagattgaattttcaaaatctgtttttaaaaaacagtgcacaaaagcaagcaaacatgatcaaaaagctccaagaggagaagctttctctaattaaaatgctaagcattttgacgtatcagaaaaaagttacgattgggaattttctaaaatatagaaaaaatctttaatgaataagaggtctgagggatgaga

SEQ ID NO: 4930 - DNA, 2114 bp, Heterodera glycines
gcgttagcgaggtactgtaaaattattttgctatacaataaatttttgtctcgattttcagttattgcaccaacgatgttgggaatatgatggcagctctggtcgcctttcgccgggaattcttcgaaattttcacggcgccaaaggctacgttgatgggattgacgacaaggagaacccacgaccggggattgagtgttgcgtgagtgcatgaccatcgcgggggcatgcatgcggcacttccgcaccaaccacctgcccaacgagcacttggccattgtgcccgagcgcggctatgacaacgcgcagaaccaaagcctgctcgccttacgcttcttccactggtacgccaaggagcatggagtgcaagtgcagacagcccacgcggctggaggagagaagcgcattgggccctactcactggatgggtggattgaggcggaacgacgcgcaattgaagtcaatggtagctgaattttatgcacaattattttaaaatgtgctattttaaggctgcacgtggcacgggtgcaaaaagtgttaccccaacgacaacatgctgctactgggaatgcgagatccatcggatgctggagcggagcaaagaaatgcgcaaggcatttgaagactatgtcgatgacggcccgctggtgatccgcgacgcgtttatgggagggcgaactggaccggtaaagctgctgcgcaaagctgggccgggagagagaatctcctattatgacttcacatcgctctacccgtatataaagtaagcacagttaaagttataacaaattaacattgtttccttcacagcttcaccacctgctaccccattggcactcccaaagtgcatgtgttgaaccatgaagtggagtggcgcagtgcagcggacaacccctaccctttggcattgctcaaagtgtgggttgtgcctccccgacgcgtcgacgtccccgttctgccagtgaaagttggagagcggctttgcttccccctgtgcatcagtagcgccaaagagcacccgacaggaggagtggacaacgactaccactgcgagcacaatgacagacagcgggggtgggtgagcacatgcacctccattgagctcaacgaggcgttggacgtgggttacctcgtcacaaaggtcttccgcgtgttggagtattgtccgagagtgcgcagagcagttcaacatcaccatcgacccaaccaaaatggcggtcaacaaagggaagcggtccctggccaagttgtgtttgaacaacttatgtgagtactgtcgtccattattattatattttaaaaaatagggggtcgattttcgcttcgcaactttggtctcgctcaaacactcatcactgatgacccagcaactttggcggagtacctggacaacaaatccatcgaagtgacatcaatcgacgagttggacgagcagcacatcacctcagcagcgcgcctcgttctgctcatggcaatgcagaaggtggtcagatcaccgggctcggatctgttgtacactggtaagtcaaactacaaaaaattttttgtgcacaaacatttattttagacactgacagcctcatcctcgtccaccctgaggagcggtgcccgctgaaaactggcccccacttgggccagttcaccgacgaataccccgaccacgacattgtggaattttgcagtggcggagcaaaacaagtgcattttcagttcatttttgtttacttttcaattttaccacgctttagtacggtctttgtctgcgacgcaagggcgcggaggcgggagcccaattggaacatgtgctaaaagtgcgcgggctgacgctaaattatgatgtgatcaacaatcaagggatgcgctatgaaaacttcaaagagcaggtggtccggtacgcgacaagtggtgaatatgagccgataatcatcacataccccaacttccttcgtccaaacattagggagggaggtcgggtggtttccatgcctatgcaaaaatgttatcgcccgtttgtgggaaagggaattatcggggccaatttcaatgtattgaattttggacacaacattgtaatttgtacattatctatcacacacacacacacacacaca

SEQ ID NO: 4931 - DNA, 4080 bp, Heterodera glycines
aacatgtactcactggtgatcattttcgatcattcccctattagcttacttctggttatacactcaagaattcactcacttattctaattattttctcattctcgctcttactctgatcacattctgatcactcactcaattggaccaccttctgttcactcactgtcactctgattactcagtcactcgaatctctctctgctcattcactcactctgaacatctatgaattgttaagctctcaccgcttcgatcaatttctctctctctctcgctctcggatcgttcactcttactcagatcacgttctgatcacacactttcaatcggatcacctactcattcactcacgtactcactaggatcacgttcagatcacgcaataattctgatttctcgcactctttctctgtcacgacccacacattgatcattttctgatcacccactcagatctctctctctcatgtatcataaatcacatgcttattttgttcattctgatcaccctttcacacttaactttgtgatcactcactctttctctctgatcaattattgttcccaatcactttttgatctctaactcttactctgatcattttctgatcacttactctctattataactcactcacaccgatctctcaatctctctttgatcacgcacttgttcctaatcactcatgatcactcaaacatgcactcgaacacacacacacacacacacacacacacacacacacacacacacacacacacacacacacacacacacacacacacacacacacacacacacacacacacacacacacacacacacacatatatgactgtttcttttgtacctcaaattgtgtacattttatgccattttattagtttttaataaaaatttgtgcattattagtgaatggaagatgcaattatgaaataattaagcattagaagatgtcatttttaggtagaaaaagtgcataattaagctaaagaagacacaatttttgaaaaattaaggaatgaaaaatgcaatttcaaattagtagatggaagtggtcattttaaggaagaaaaatgcataattagtgagcaaaaacaaaactaatatacggtacagtactctgtgagcattcattgcgtccgctgtcttcatccatgtctccctcaaatactaggcgcattgttgtgtcggatgagtttgacgacgattgtttgtcgtcaatttcagtgaaaagacggcccagccaatgctcgttgttgttgatgtccatgtccatgttgtcatcaatcagctcaagaagttccattgggttgtgccggtcctcccctccccccgaaaagcgttcaattatgcacggtgcatacgggaagtgaagctttatgcggtgccgtgcataaaaatgcgccgccacattgatgttgaaagggttgcgcaattgcccatatgcaggaagaaatgcggcgccttgtgccgaaattccagtgacgaagaaagttttggtcaatccattacggtcgttgtaggtggtgcggactttgcgtccaatgatgtgtttcagcacaagcgcccgatcctctgggtggttgagccggtcgcgcaatgacttgacagggcagttgagaagctgagcgcaaaatgtgcttacaagaaccatggcaggagaatgaaattggaatgaggttaataaattttacttttatattcgcaaaagtgtggccacgcctacactatttgaaaagagtcacggttttagacacgcccactaaaagccaaaacattttgcctgccaaaaacccagaatcattttaccaatttttgtcaaaatgaaaagacgcgttgctcctcttactgctgctgctgtctctgctgagcaacatcaaataattggttccgagtcgcccaagccacatgaagagacgaccaaaaatgttgagccgaaggatgagttggcaacgaagaaacgcaaagtggacgaccgagagttgtggaaattggcaaaaggcaaatttttgctgaccacctatttgtgccatggtaataattaataacaatttcatcaaattttaatttaaatccataaattttgagatgattggaatcgtctgtacaacaaccagcagaaagtgaagcgcctggagggggaccgttttgccttcggctttgaaatgtgtgaggaatgcgtgtgggccaactgccgcgcaaccgaccttttggcaccaatgaagaaaaagtgaactttgcccaaaagacaataaaggattttgatgatgcaatccataattttaattaatatttaattctgcacaataaacattttttgagacagtccctcaatttccttttttgtgtttgcttcagatgaaatctggtgatgattaatttgcttgccgaatttgaatctggcaaagacactgagggggggggggcacatggatagggacaaagcgagtggaaggaccattcattgtcttattacacaaaccctctaaaaatataaaatgtcccgccgcaaatcttcaattgcaccatcgctgtttggaatagcaagtaatatagttttgtcaaaaaaattttgaaccaaattgttctgttgaaggatgcggcgagtgccatttggttcggtgcaggccgtgcaaaagtctgcgggagaggaacagagaaaaaatgcgtatgggactaccccatgggcgcatcagcatggaatttgggccgatgacgcgcctacaaatgtgttaagcaacaacggcacgaaccccattggaggcggcgcaacaagaagggcgagaaacgcggtctctttttcgatggggggacccattgggagccgtccattaccccccaaaacttttttacccatctgaggggggactctgcctctgcactgtccacactgcccagttctatgggcagtgtggacatgtaggcctatgccgaaattgtttaattcatcatttgatcctttctgaacaccccaaaaaatgtccatattgtaaagctctaactaattattacatggaacattaattgtgtcattattttcgactaattttataaatatgtaagaataaatttatttctgtttaaaattgtaaaattggtgaaaaatgtttgtaagagcacattggtgaggaatgtgttatgtaagagcaaattggtgagaaatgttaaaaatgattgaatttgttattgttagccttttcttttcattcgtcttcgctgtcactttgctctggtgccggcgcttccaaacaatttttgacaaattcgcccaactgtgcaatggcctggaaaaaaaaaatgaaatttaaaaaaaaaattttttttttaataagctaatacttttttgtacggaatgtcctgtacattgagcgatggagcaaatgaaatgttcaggtcgtcaattttcagcactgttgcggggtcccggcccaacaaattacaaacttaaagaataattttgaaaattcaaaaaaaaaaatgaccttctacgaattttggactcgccatcacttccttggcaatactctcgggaattggctcgccaagtagtccacgcaacacatcgtggacattcgccttccttgtgaagtcaatagcgagttccatacaatcacatgactcgctctgcacccaactctcttggcccctcgcacctaattaataataaacagtgtttaggactgtgataaatttaaaattgagagacagcgagaagagagagagatgaaaaggaggaacggaacttaaaacgtttgcgcggagctattcaaagacaactcggcaacaaacattcaaaccccggactgtttgattatggaggagctattcagtgacaactcatcaataaccaaacaaatagagacaaaaatatgagaagaaatgaaaaaaaaattttaattttcatcccaaccacttacgaagccagtctacgtaatatccgatcctttttgtgctatgggtgtaggtcgccaaaacagccttcacgcggtagctgcgctcccctttcagagagcgaatgatcggcggccacatccggggcgctgctggatacagtgatctcaaatttcaaaaaaaa

SEQ ID NO: 4932 - DNA, 1142 bp, Heterodera glycines
ttatgccggtccctgaccgtggacatttttgattatgccggtccctgaccgtggacatttttgattatgccggtccctgaccgtggacatttttgattatgccggtccttgaccgtggacatttttgattatgccggtccctgaccgtggacatttttgattatgccggtccctgaccgtggacatttttgattatgccggtccctgaccgtggacatttttgattatgccggtccctgaccgtggacatttttgattatgccggtccctgaccgtggacatttttgattatgccggtccctgaccgtggacatttttgattatgccggtccctgaccgtggacatttttgattatgccggtcttgaccgtggacatttttgattatgccggtccctgaccgtggacatttttgattatgccggtccctgaccgtggacatttttgattatgccggtccctgaccgtggacatttttgattatgccggtccctgaccgtggacatttttgattatgccggtccctgaccgtggacatttttgattatgccggtccctgaccgtggacatttttgattatgccggtccctgaccgtggacatttttgattatgccggtccctgaccgtggacatttttgattatgccggtccctgaccgtggacatttttgattatgccggtccctgaccgtggacatttttgattatgccggtcttgaccgtggacatttttgattatgccggtccctgaccgtggacatttttgattatgccggtcttgaccgtggacatttttgattatgccggtccctgaccgtggacatttttgattatgccggtcttgaccgtggacatttttgattatgccggtccctgaccgtggacatttttgattatgccggtccctgaccgtggacatttttgattatgccggtccctgaccgtggacatttttgattatgccggtcttgaccgtggacatttttgattatgccggtccctgaccgtggacatttttgattatgccggtcttgaccgtggacatttttgattatgccggtccctgaccgtggacatttttgattatgccggtcttgaccgtggacatttttgattatgccggtcttgaccgtggacattttt

SEQ ID NO: 4933 - DNA, 2261 bp, Heterodera glycines
aagttcttcgtaaagagcgaaataggcacaaaatgccataaaaatgacctaaaacagaaatgtttttcctactatttagaacattggagaatcgaggaaaatacaatatgtattacataaaatttgcgcctctactaattataaatttttcgtcatttaatttaattttcttttgctccacaacaatgaaaatttaaaatacaatatattaatttttttcttcaaactgtctaattcaatacatcactttggatttttttttgcctaatgttagccatttttttgtgatgacaactgattgatgaatcacccaccaacgatactgctcagaataattaattgcaattacttttgattaataaaagatcacattaaatttcccaaaaaataaaatatgaaatttttgtaatataaattaattaataaaaataatattttaaaaggtcattgaatgcaaatgtaaagttgtgacacatttgtcaccttcccccgctccccaaatatcaaatgcattttcacaaactttttgattctattaattattaaaataaaatgctttttactggtacaaaaatattttttagagtatcaatgaaaatgtccaaatttgtgattattgcacgttttctactgccaatcgtgctgttgttgatcagcagtcgtccagtctcggctagttatcaggacgatttggacgatgatgacgaggaagtggattatatggctggatacacgtaataattttgtacattatttaaaatcttttaaatctgtcaaaatgtgcgctttttctctaaaaaagagatataactttaagcaaaaacaaccaaaatttaaattcaaatttaaggaaaaaatttgaaatttgcctctttctgagtaaagttgtgatttcattttaaaaaacccattttggcggtttcacaaacataacctctgatatcctgataaaaaagtgctaaagaaacaaaaaataaatccaaaagtggtcgttttggtgaaaatttttcaatatttttgagattttaaatatttatttccattataaatggcatttttgaagggaggagcaaaagaagtgttgtacggactggctacaagcagttcaaaagctgtttccaagaatgctacactaaccagtcacagaacaatgtgtgcgtgctgaactgtcccatcgacttgggcatctgtgtggacaaaaactgcagcctgactgtgtgtgtcctcggcccaaggatttcgggtcagtgccatgagaactggctgacaaatgcgcaataaaaccggaaaaaatgccaaagatccgtaaattcgtcattgaaatacaaaaaaaaaaatataaattgcatagaaaagatttggaatatttttacatggaaaaagcaatcatttaaccttttttcatttgagtgaaaatattttgtgactcattttgcaataagattgattttttgatatcattttttaaattgaattatagaattaaacattattactggacctctcaatgttggcatgaaattctgccatttatttaacacttaataaaatcgatctgaaaaaaaatattctgatttattatattaaaaattgcatacattttttatgaataatttgttgtaaaaaagaaatttgattttgaaattgaaattaataaaaaaaaaagtatttattttaacattgaattttgagtaacgtcatagcaccatttcttgggccaaattctccaaaaagtcatttctcacaaataccaattgtgcagcgatcgatcaattcgttctgttccccccgcccctcatttgctcgcatttacatatttatttatttgtctccgtccgtccatttactaactattagcaaatgttgtcgacacgttttatgcccgggaattcccgagatcaatttgtccttttaaaattctgtcaatatcaccatttgcttatccaagatgatacagaccataatagcttttcttaaattcaatctaaaacatcaagccaaaatgctaatcacctgcttaatttgaaaagatgcgatccgcaccattccagcacaaaattcgtagattttacagttttgaagccaggattcatgatcagcaccttaaaatttgactctccaggaaatgtttttctttgttcgggttatgactagggttcgaagttgtatgcataaaaaatgccaaatatgcgcaatttaattaattccccaaaaagtcgatccttagagtgtatttttcgcttttttcgcatttttcttat

SEQ ID NO: 4934 - DNA, 2778 bp, Heterodera glycines
  unsure (1)..(2778): unsure at all n locations
ctcccgaatgatttccaaaaattaaaatcnnaacgaattatggaaaagtgccaaaataagcaattatttttntaatcattaatccaatgactaattgtctttcattttcgcttatttatttttcttaatttgccttgggccacctctccaaatggtcttcagtcccatccccaagaagtgtttccccgcctcctcctattacggcccacacaatgtgttcattgactccgaatcggacttgccgtggtacttccaccgtaattactcctcctctttcaagtacagtcacttctacggtggctattggaacttcccctacagtaattatccgctaaacgctctctacaaaagtccgtggtaattggaaaaagtaatggtaaaaagcatttgatgacctcaggctcaaccgaccctaccacaacatgggcaatgccacggattggtaccgctaagagagacgaaaaggaaaagggcatttgatagccaagcgcaaatcaaagccttttaattatcccattaattaataatgttagttggtaaattgaaaattgtaaattatatttcattaatttcatttcgctgtaataaattatttgcatatttttgtgataagaaacgtccaaaaaaatttaatgcaaagaaaagaaattacagaaattcattcctttgtttacagttaataaatcaattattaaacaaattcaccaaaattaattacttcttaattgaaggctaatcatcaaaaattaacgagagcattgataaaacagcgagcaaaagggaagaaaaagatggtagaacatcaagtgccataattatcagcagagcaattcccgtcctttgattccttataattttctcaatattaaaagggttaattaatttaaatttaaaatttacattggcattttcacagtttaagcaaaaaaaaaaaaccaatggaattcaaaggcgaagaatggtcggtaaggagaaaagtaattaattaaacacaaaatggcatttgatttaatgggttttgtgcccgtccaggacaatccgataagcgaatgccgaatggccgagttggtccggcactttttcgccttgggttggatgtgcgacaacggcagcggaatggcggtccgagtgaaagacgaacggacgggcgaacatttgattctgaactcgtccaattcgttggagaaggaaattttttcggagtaattagtgccaattaagcacacgcattaatttaacatgggcaattaagaaacgatttatttgtgatgaaaatgaacggcgaaattttgaaaagcccgtcaaaatcggaccgatctccgacggcgccgttttatttactgcgcgacaatccgggtaaatgggaataacattcaattgataaaggagaaaattgcagatttggcctgtgtcattcacactcactcaaaatgggcaaatctgatcacccaactgatcagaggagacgagttcaaaatttcaaaccaggaaatgattcaggtggacaaaaagccatgctgagggggtaatttgaaaaagccatggattagtagaaattcgaagctaaatccgcaactgtgtggtgagatcagagaaactatgaaaggattaatttaagaataatttcttaaataagttacacatttaattattttgtttgttgaaaaattaaataagaattatttttaaacaatatgctatcacattgctttccttgtccatgtaataatttcgtaaattttcacttttttcctttttttttgttagggttgtgaaaatcgtctcacaaaaggccgtctggataacattgacgtgctagtggtgccaattgtgcagacagagatcaatgagcatatgctttatgtaagcacagagagaggaaaatgaaaagggagtccattaatctgattaatttgttagccaattctgctgaggacactgaatcaaaacgcgggggcaagtggcattttagtgcgtgggcacggctttttctgcttcggcagcaacagttggcaaagcaccaaaatgatgttgaaaattggcaataaatgaatttatagaaatcatttccattgtcaggttggagtgctacgagtatttgttcgaattggcatgcgaaatgcttaattacgatttgccattggtcaaaagtccaacggatgaggcgggaggagaagaagcgaatgacaaattggcacaaagggcgcaagaagcggcgtaaagaggacggacaaaatgccgaaaaataagggacaaaatgagacggacaaattaaataacaaaatgaaaaaataatatttgaattttcaataattggaggcacaagcgaaattggggttcgaaatttcgtaaaaaataaatacggacgacggaccaaacaggtagtaacagtaaaacccaaaaataattggaatttgtcggttgctgattcggtcggtctttgtccatccgtcgcacttttacaaatcaatcagctgattctaattaaatctttgatggatgaaaatagagaaatttaaataggcaaagaaataaaaataaacaaaggaatttatatgttccccgactccagttggcgaagcgggtcaactccgtcgcgccaactccgtcccagccaactccgtcccgccaactccgtcccaggccaactccgtcccgagccaactccgtcccgccaactccgtcccaagcaaaaattcaagaatttttttaaaaataaatttgagtttaacaaaattttatgaatgggaaacaaaaaatgataaattttggctttat

SEQ ID NO: 4935 - DNA, 3355 bp, Heterodera glycines
ggtagtagcagtaaacccaaaaaataaattggaatttgtcggttgttgtttcggtcggtcttgtccgttccgtcgcacttttccaaatcaatcaggagattgtaattaaatcttttgatggatgaaaatagagaaatttaaataggcaaaaagataaaaatgtacaaaaaaatttgtctgtttttttcgtgcccaaagaaacgcgaaggaaacgaaatggaattatgtcttgagaaatgagtcaaaccctaaaagagattcatcggaaaattgtgcttttttgtatgcgcttgacactaaaataagtaaatgaatcgttttttgtgtaaaaactaattcgaatcacaaagtccaaccaaaaaattgacggtatttaaggggacattttggcactttctccaatcactcactaccaaattccctcccatttttgcctcatccctcaaaatgtgccgccactttctccccattctctgctgcttctttgttcccctgttgctttctctgctgctcatcgccgtggatgcccaatttgtcgatcagttcagttccggcacaattatggagccgtggggcggaaatttggccaacggaggacttttggggtggccctattttggacggaagaagcgataaatgaagaaaaaaaagcgaaggaacggacgaagacgaaaaaggaaaagaaaataaagaaccaattaaccaattaacaagccaattgttgtatcaaattgatatgcaaataaataaaaaataagtgttttcttaactaaagagcccgaaatttgtaaattttaaaaatcaaaggcaaatgaaaccaaattatttaatttgatagaagttgttaaattggcaaggaatttaagcggcgtcctttcgcatagtttctattgtatataaaatattatcaaaaatatgaaataatatcaatcatttgccgtttcctcctcaattattccctttttggcctttgttgtcccctcattttgtccattaattttgcaattaatgccaaaatccatttgcacacaaaaaaagtgagggcgaatgcaagtaccaacaaaacaatgccaataagcgccaagtcgatgttgtacagcgaaattgtgcccatatttctcgattcgctcagcaattccggcagttttcccccattttgttcgagaaatcggatgcttttggtgagtcgttcttcggccgggaatggcttaaaggctttctatgcaaaaagaagtggtttgctaataactcactttagtgctcattaaattttgaattctttttgcccccacagcgtatcttttggtttgaaaagtggcacttttatttgattgtgccaaaattgttttgtgtttacttttcgttattgagcatttcgccaagcagcgcctcgaactgcgccgtgccttcgaccagcttcaacttgtcaaatgagcgtgcccacccgttccgttccgctgctcgtgcgttgcggtgttggtccgcaaaaaaacccatcgccagcaccggcactccgccgcgcgtcgcctccaaaagactgttgtagccgccgtgggtgatgaacagtttcagacgtgggtcagctgcaaaccgaccaattgggtaaagcagataatggacaatgaaaaatgggcaaaattatgggatgtatcgtaatgaaatgggaaaaaattatgcgcattgataccgtatgaaaacaaaagggtttaaatacgccgcaaataaacgcatcccattgcattaccgagaatggccggctgcggcgcccacggcgtcaaaaaaatgtttccgaatttcgctgcaatttccgctgaatactaaaaaccgaaatgatggctcttaattatttaatttattacattgtcccccttttctatcctcattatgaagtgataatcggagaattttgcaaaagtttcgagaaggttccgccgaaatttggccggaaggtccgatgagcgaatgatggtgcccattgaaacgaaaacaacgccttcctttcctttgctcatttcacttttaaatggctcctaaaaattaattagagctcatttgtaaaactgtacattcttaagaaagaatggaggagcggtgccacagaaaattggataatttatgcaaaaatcgtcactttttagggttttagaattaatgttgaaaaatcctagcgaagacatcccagaatgtcccgaaaaacaccgctggaaaacaactcaaaatgttgctttatcacaaaagcactctttcggtgggctgctcatttgtcagaatacctccaatttggcatttttgtccaatttgtccatgccaattccgccgatgttcaccatatttgggaagagaggtcgcggaaaatcgagcagttcgtccacactaacgaaaacaaacggcgaatttttgacaatgtcgcgaaggtcggggaaatcgtttctgttgaaagcaaaaataaaatgaattaattaaaccaaagcatttaaatgacccgaaatgttttcggaaaatattcgtcagcggatcaatgccatgccaaagataaacgtaaccgacaaaggtgcgcaaaaggttgtcaaatcgttcagagagtgacattttgtcgggcaaatccgcgtccattagcgaaggaagataagaaaaaggaaaaggaaggccgaaaagagaagcgacgtgctcttggagaggacagctgagaaggaagtcggaaaataagggaaatggtaaattaaaatttattaaaattaaaaaacgaaggaatggacaaattaacaaaaacaaattaacttaaattcattttaaaaatggttaattttaaaatttagctaacaaaaagaaattaattcaaagtaattataaacggacgaaaacaattaaaaaatggaatgggcttactaacaaaataatgaagttaaattaattttttttttaaattaaaaaacgaagaatgaatttactaacaaaaaaagaaaattattttaaattaattttaaaaagtggttaattaaaatttagttataaaattaataaaataaaaaactgaccaaaacaactttaaaagcgaaggaatggatttagaacaaattaattaattaaatattcattaaaaatgaatgattaaaatttaataaaacaacaaacaatggacctgctgatgagaatgtgaatgggaatggccagcaaatggccgagcccggcaccgcaaaagttcagctgctcctcgatgaccacgtcgaacttctgcttgcgcagcgattcaatcaaatccggattagaggtgataaattcttaaaatatttttttttttttttgtaaattcaatttcccaattaattaattattaattcactttcacacgctttgt

SEQ ID NO: 4936 - DNA, 3351 bp, Heterodera glycines
ccaagtcaggtgcatgcgcgcggcagagtcagctttggcggcaatgcgcgagccgaagcgccgaaccgaatcaagaccggaccaaagccgacacgccgaagggacacagaatcgggatcagttcccgagggtgttcatggtcagaagcaacccctcatcccaacgacccataacacctggggcatccgcccttcggaccggaactcacgcgccacaccggaaagtggctgatcggaaccggaatcgacttgcccaatctcgtgggccggccccaactgacaacggctgttctctatgccaaaattggggccaccgtccaagcaattgcccgacttatcccacgttccaagaacgacgacaacgtttcttcgagcaacggcggtgtctccgatgcctttcttctgatcatattgccagttgctgtccccgcccaaaagcatgccggtggtgccagcgcgacgaccatcactctttggtctgttgggtcggaccagggaaaccaatcgcaattcgtgagccagcgggaccggaaacccgcgaacacattgggtcgaaaccagtggaaagtgtcatgatggtacaaactgtgctcaattctgagagcaactcccgcccacccgaggcacgtgcaaaggccaagcgaaagaggccgaagcgacgacggagtcatctgaccaaacaatcggagaatcaaggggaacgatcccctggcactgatctgcgagcattcacagcaatgggtgagagcttgccggctttcctgatggtctgccccgtgatcgctgccaatgacgacaccacgcggcagtgtcgaaccgttctgctcatggatcccgggagtcaggtggattatgcccaaacgattctgacaaagcagctcgaactcccgaatgcgggatcatccccgctggtcgtgcaagtgttcggcggatcaaagaagaaagtcccgtcggccaaacatcgagtgaaactcaaacggttggatggcggatgggagcagctggaggtgtcatccgtaccgaacgtctgcacccccattcatacgaagctggtcgagccgggaacccatcccggcctgctcaagccgatggacgcgacggttcagcctcaaatcgtgatcggaattcgcaagttttgggacttggtgatcggattcaaaaaatcggccgagggggcctttcttgtcgacacagtgttcgggaccgtactttgcggagagcatttcggggcgcccttggggcaatcagtgccccgcgacaccatcctcatggcaataagcggagaagaaaacagatggaaccgcatgccagcctcatcgggagtggaagcagcggacaaatcgaaaccgtccatttacgagaacgatcgtctggggattggtcccctcaacccaacgccaaagaacccgcgcgatcggaaggaccctccgcatgtccagcccgagaagcgatgcagggtggagcagcaacggaccaaatgtgagttaccggaatcggaccaagacggaacaacagaaccgtgcgaaagaggcctcagccagtgcttgctcggggcgtctctgctgtggaaggtgatgacatgggtgactcggcacccaatccgagtttttaatcgtttgacgggtggggacattcccgagccgaccgccgatcaggtcaaaggtcaagaacgagtgcaattggccagacgagcccgcgcagccgctagagcttggagaaatgccgaacgaggacgggcatccaggcccggggccgccatggcactgcttccgctgctttgttttgtcgcccttttttcttcatcggagcccatgtcggtgatgctccgctcggaggactgcgcaagcacgccatcgggattcaaatgttccggatccgcggccatgatcatcggcccggaagtcggtgaactcagggactcagtgaacggcatcactccaaaggggattggtcccctgtgcctcttccttcaatgggaaggtggcatttcgactgtggctcgtcttggcccgcctcgccgccgcccccaatgtcgcgaaagcgacgagagaaaaaggatgggctttggatggccgggattgttcccggcggactgaaggaagcagggggcccgatgccaaacagtgattaatttatgatcaccatcccccatttttgcctccttttcccttcctttcacttcaacaatttgccttccccccccccccctctttttccgtcttatccaatttgtttaccatttcccttccttttgcttctcagcatttctcatttgcatttttgtgcccccgctcactttcatttcaaatgttttcctttgttgccccgccgcggggcatctgctctcaaatcgcttcttttgtcccaattttttgcccgtcttttctcaccattcaattcaattcattttgtaccttgggccccaatgtcatcgggtaaatgttcttcccaactttgtccccgtccgaaatgcccattcacgtgatttgcatttctcattgtccggcctatttaaccccccgccggtaatctctccggcgttcactctctttttccttcggtcatctttcccttttctttcgtccttcccttcacttggtctcccctttaacacatttttcctccaaatatgtgcccttccctttggcaataaatatttgtgtgtttgtcctttcctttggacagaggaaaattgcccttccctttgggcaatcaccaaattcggtcattcggttggggcattcggcgcccctaatcgcattcggagcgatcagcaattgtcgtgcgggattggatcactcctgatccctgcccactccctcccatcgcccttccctcctcagcgatcggagtcgggactcatcccggcaggcaattgggaggttcactcactccttaactgagtggtggtgccgttacatcacccccattttgtcggccctccccattctcggccccccttgggcattcaattcggaaaggggtcgacaaagccgagaaggagggcaaaggaagccggcgatcacccctccattgatcgcaagctttttcgacaagccctgtactaaatgtatatttacatgggtactacccttgtaaatgcacattttgtatattaataaggcaaaaaaattacgttgtgcagagcagcggcccgagctctcaaagcagccagatcgtcttcggcagcgccaaggttttcgcgggtttcgcgaagctcacttttcaacccgtgcttacgctttcgaaacttggctttggtgcggtcgagtgcacgtctgctcaacaacacctgttggaagacaatgacaaattaaagtcagatcaaagcaaaattcaagtccaattacct

SEQ ID NO: 4937 - DNA, 3051 bp, Heterodera glycines
  unsure (1)..(3051): unsure at all n locations
aaaaattagaaatttttttattttgccggtaaaattttaaaaattcatccggtaaaaaaaagtaaattttttttgaaattttttgctccgtatttttttagaaatgaaaaaattgtagttatgataattaatctcttttagcacttttttcaattaaattttcttagccaaaatagaataaaactgcattctgcttcattttgttggaaaatattttcatttttggcattataacaattataaccaaaattttatttttacttgggttttattatttttatttaattcatattttgtttattttttcatttttagtcttttggctatccttaatgttttattaggttttgttttgatcatagctcgtaactgaacaaattcaagtgaatttattttttattatttacttttatttaacaatgtacattgtgactgtcttaggaatgattgatttccttataattttttttaattttaaaattcaattttggtttaaagtctcttttttaatattttataatagacactcctggtacgatgttatccaatgttaccgaggcaattcgttggtcagataaaatagcacaacgtaatcagtaaaaggtaacgaatttttttttaaatttataacattttctggtaaattatttttatttttaaatttatgtctcgtgaactatatttaatttcactttaatcattgatttcgctagcgccagtaagagtgagtccaagctggtttttaaaccagagcttccatttgttcttattcgtgctgacgcgtttgttaaaactgccacccatgcgcatttcttaaaatttctaaagatgcgcgtttctaaaactgtcagcgcgtttattaaaattgccatccttgaaaattgttcaaaaaattttcaaaaattaattttttttaaaaacaatgaaaaatttcaacgaaaaattataagagaaaattagaatttttgaagaaatatttttaaaataaaaaatgtaaaaaaaaatgataactttactcaactgcaaccaatattttatggtatcaatcaatagatttaattattttctatcaaaatattaatacttaaattttttacaaagtatataaaaaaagtttgtattaaaatttcaaaatttttagtttttgaaattctagtgtttaatagattatacaaaagtttttaaactccaaaaagaaattaaatttcaagtcattaaaatgcaattcaacgatttttttagaaaagttcataattttttatttattaatttacgaataaaaattaattttcccaggtttttataatattccaaaaatttttaaaaatatttctcaagttttcaaaatttttcaagaattttcttgaaattagggggggtggcagtttttaagaaacgcactagcaccgacattaatagagggggaggggggaaattgcgctttttcaaacagtgaatttttaataaaataatgtttgattaatgaattttgccttggaattaatgagaaataaaaccgaaaggaattttcgggaagagaattaattttggatttaaaaacattttcagcggaaaatagcaaagggattgctcaagtgaagtgaactaagaagagaacgaatgattccattaaagtttaagcgtaaacaaatcgattaaataaataaataaaagtgataaagaaaaatttagtataagcgtcaataatagtattttcatgcaatttccttctttctttaattgattaagttaagtaaaattattttaaatacaataaaataaaaatataattagggcgatttcttcgtgtccttttcccttagcactcgccgcaatatttttcccgaggcgcttttcggaatttcgtccacaaattcgaccgagcccaactgtttgtaggaggccactttttctatgaaaatgaatcttaaaagtggtgctaatttgcttacgtacccctcacaaatcgcttcaattccgactcggtcagtgtctgatccgccctcaccacaaatgccttcggcacttcccccgcgagttcgtccgccacccccacaaccgcacagtctttgatgcccgcgtgggacagcagcaaatcctcgagttcagcgggagcgacctttaaaatgaacaaatcgaagtcaaatgataccaattgacatttgctttttcaccacaattttttctatttgttcagtggggggggggggggggggggggcgtccgtttggtattatgaagagagtgcccgcgaactgttctatttcgccgattcgttggacgaccgaacggcacaatttgtgcgccaattggacaaaaggcgcgaaatgtggcaaaaaacggcggaggcgaaattggagggggcgacaaagctttgtctggtgcacaaaatgacgacaaaaacagcaaaagacgagaaattgcgaaatgccaacaaaaagtgggcacggcaaatcgacaaaataacgcaaaaggacgaaatgggcaaaccgatggtaaggcaaagcgaagagaagaaacagttgcaaaaaggcattggcattttgaaattgacccaaaaagcgttcattaaggtcccgctaattttggtggacgatgagtcaacttccgagggcatcaattgtttgaacagtgaaatttcggaaaaatttttgcaaaatttcttttcggtgtccaaccgaatttttttctgccacggtttcggcgtcgtttccgcctcggatttgaaagaacggcttcgatggattataagagataatgcgctgctcgcactcgaaaacgcgcacccccaactgatgcatttcggtgggaaaagcccaatttggacttgcggcatttcatagtgaaaaaatatcttcaactttattgtcaattattgacgggaataaaaaagcgcaatttgagtttcaaatccgaaaccctaatccgaacaaaaagccgaaaagcaccaaacttttttcataattttaatgttccaataaattactttatagtaaaaattacattntggcaaacaaaaacccaataataaattancgcttatggacaact

SEQ ID NO: 4938 - DNA, 3341 bp, Heterodera glycines
actttcatctcaaaattcgaaattagtcgaccgacggttttcgaatcgtccgaaccgaacactgacaaatgcgaacacatcgactgctccgtcattccatacccttggcagatttgtttcagcgagggaatccgtctcctcactttgtccaacagatcggtgcccaccggggcagcaccggtcataatcagtttcagtgatgagaggtcgtaacgagaaggggcggccgacttggcgagaaggacgaggattggaggcaccaagaaggcaactttgacctggaaaagagtggagacaaaacgtgtgaagccatgccaaaggcacttggtaattttggacggttctgcagaagaggtccaagtcaaaacgaccgaaaacgacgcccgaaccgccgcacaaaagggaattgaggccgagaacgaagccataaactgacaaacggacgaattacaaaatgtaattggacagcgaatagatttcttaatcgttcgattttgaaggccacaaattccgaaaataaaaaagggaaacatgggaattgtaccaattattattcaaaaattctgctcgccgctgtcagtaaagccggacataaattctaaatttttaaaatgtttccccctcaaaaaccatgatagaagggtaagtgcaacatgatgtgctctttgctccaatcccaattcggttccatctttctcagcatttgattttccaaatgactaaaaggggggggggggggggtaaatttgggaattcatcccatttctttgcctgctgaaaattcgtgccattgtgccgacgttgcgatgggaaagcatcactcccttttggagaccggtggtgccactgaaagggaaatttaagtgatagaaacactaaatacaaaagcaccacctcgaaaatggcataaacatcacgtctttttcgacatcaattttgggcaatggtcgtgacaaatcgacggaattcgatgaaccgacggcatcggaccaatgaaaaacagattgaaattgcgaatttggcaaggaaacagcggactgacaattagtggtggaaatgagcacaacgtactaaaagtggacaaagaaaggccgaaagtgaaataattgtgaaaaagcaaagttacctttaaatggggacaaagcggacgagtcgccaaaattcgttcgagcagagaatcggcacagaacaccactttgcactttgtttcattaaagatgcgggccagttcgactagaaattttcaagttggcaattgaatttgcaaaaaaccggaggagaggggggtaagaaaaaacgaaaaaatttttttattaataaaggaaaatttattcttttgatttgccaggaaattttgcaaattttgcaccatttgatgagtacacttacttaccttcattgagaagtgtgctcaccggggaaatgcacgccttttgcatggaagcggccaaaaaaatggcgaaaaaatgccaacagtttggaagaatgacacaggcgacatcgccggaggagaagccaatggaattaagaaagtgagcggcggagtgagtcttggacagaaattggccaaacgttgtaatgttggaagggttttcggcatcgacctggaaaaaaattaattcatagaaattatttctcataaattctttataaaaatcatacaaaaatggctcgttttggttgttcagcggaaaattgtctaattcgattcagaagtgtttcggtaaaaggttcggactgaatcggcactgattgaaattcagaacggacgattccatcctcgtcgggcaaatatttgtttctgttgttgcacttttcttgagaggaaaagagacactgcttttggcagtaaaaagaaaacgaattcaagaagttgttgcttttaactttaattctccactgacaaaacatttgatgacgatgagcactgtgaaaggacttttctaaatatttaaaacatttgaaataaaaactgacggaaaaaataataaacgatgacttaagagattaaggacgacgaaagcaaatgtacagataaaatgggaagggaaagacgcaatgataagtggtaattgataggtgatcaacaagcgttttttacatttacgcctcggacatttgcggtcatttcttaagggccattttcgggtatttcggcccgacatttgcggcctgctgaaaaccgaacatttgtggccaactgaatcaattaccattctgttttttaatacatttactaaacagtgattaattaattatttaattcttttaaccatttatttttgaacaacaatcaaaataggattttaataatttcaataatttttcaatcgtattttgattccttcacaaatttatttcatttcaacaatttgagcttgcttaaggctccaacctgcttaacaaaaaaaaaaaaaaatgcatgcttaagcaagcatgccacatcacaattaaaatcgatttaggtaatagttcagatggtatgagatgtttgaaaaagcatttttttaaagtctaaaaacatgtttctcattgttgaattttcgattccatgtccacgagcaaaagcatcacacacttcattggaaagattctatggtccgctttgcgggttgacaaagaaagttcgacactgaactcgatcagtgacgaaatgatcggtcaccttaacatccgaaaattgagtcgctgagtcaaacaaaataaatgggaatgaacaactacagcagttaccaatggtagcgttatgtacatcatgggttatctgctactgctgataaaactgttgatcattatttggactttttcggtcatttcctttcattttcatttaatcttttacatttgctcccctctttttcctcctccgcttcttctgctgtttctgctccgctttatgtccatttcaccgcatttgcttccttttctttttgccctccttttttcttcgtcttccgccgctggcgatgttccttctctcatcaaacggtttcgtgtcgatttggaccttcccccgaaggatcgttggtcgcccgtgctgaatgcgttcagagagagtgaagtcgttgctcgactgattcgcacggttaggtacaaaagcaccaccctcacttttacaattcctctaatttccccctgcccaattaaattttgttggatattctcagagcattccttcccgagaatgtccgctctccgctcttttggatctttggcaaattgctgcattttcttccatacgaattcgctgaagagattaaaggtttaagaagtgtgaaaattggcattttccaccgtttgaatttctctcaaagcgttacagtaacacaatggcaaataca

SEQ ID NO: 4939 - DNA, 1363 bp, Heterodera glycines
  unsure (1)..(1363): unsure at all n locations
gcatgcnnctgcaggtaaaattgttagagcgatcaaacgaactctaataaatgagaatgctcagtttttttatcaccaattcagttatacggataacaaatttgtgctgttaataaatgcgccggtcggtgggccaattgagcagacaatttttgtggccaattcatcaaatgccaccactaccagcgctgatgctcatcatcatcaatttatgaccaccaattttgctttgacccgtgccgcaccgccaaatattttttgcaaatggaccacatttattacggtgttcgactcggtggagcagccgaacaaactccaaattggccacggaaacggaccatcacaccaaagtgtgcctgttcaggtcaattattttttaaaaatatatattttaagaattttcgctttttatgcacgaaaaatgaattggtttttggctttaaatttacaaaaataatttttttggtcaaattaatgcattgtaatataatattaataattattagagatcgacattttgaaaaaagcctggacctggaccttgatttcctggacaaaaatccaggaaaatccaggtccaggaaaaatccaggctcctcgagacctggatccaggcatggacctggattttttgaaatttattttaaaaatcaaaaaaatgtttgaaaaaattaattatttgcttagaagcatctgaaaatatctaattaataataataataatgtctttttaaatttatttaatctgtttttgaaaacttgaaaaaacatcggtcacttgaaaaaataaattctaaaattttgtccaggaaaatccaagttttttcctgttttgcctggacctggatttttttcacatttgacctggatcttgatttcctggacaaaaatccaggaaaatccaggtccaggaaaaatccaggttgccgaaaaatggcccggacctggacctggatccaggaaaaatccaggcctggatctaggtcaaggtcgatctctaataattatataggccaaattaatttttaataaaattacaaacttaggcttaatgtgttttctctttttagcttttataaaatatttgcttctctcctaaaaagcattttcttgaaaatgttcgtttaatttctttttttaaattaaaacattaaaaaaagctgatttaaagaaaatagaaataattaattatatttttaaaacattttttatccttaattaattaattttttgttttattagttttatttctttccatcattgacacttaacaaattaatttaatgagtaattaatgatccaaagataattctcgaaaacatagataaaattgtagttgctcgctcaaccatttatcaaaaaa

SEQ ID NO: 4940 - DNA, 3324 bp, Heterodera glycines
agaagatgatttaacagatgattgagtgaaaataaagttttataaatttgaaactcattacatccattcttaaatacaaaaactcatcaatttaatcagttaatataaaataagaattaacaattaaaaaaattttttttattaattttcttaattatgattcgaattcgattagataatataaaaaaatgttctactaaaaaataagcagcggatttttgaatttttggaagataggtcaccaatatgttatatttttttgtaattttgccactgttatgtactgtactatactgtacttgttgtttagttccaactaccgtacatgaagaggcgtgtgcatgtcggcacctgtttcagcccacttttcctggcagaacattggcaattggttgtgttggccatcgaaatttaccggcattacggcattcagttgcaagttgtgtatttgatgagcgcagttgagggcttatataaaattttgaaggtatttcaaaataattcgcaaaaaatcacaaattataaacaggcgttttttattttatttttttcaatcacaaaaaggacaaattttcaaatttacaaaaaattattttgaaattgtcaaaattttttttgattgttttattttttaaattcgtttaattttaatttgctttaggcatacagttcaaaagaacatatccaattggagccatgggcatcaattgaaattgatggacaaattgataaagagatgaacctggaacttgattggaggaatcaggcaacggcacacactgattgccttttaaaatatggagtaatttaaaaaacaataattaattaaattgatttaaataatataaaaaattaattaattataatataatacaataatgattgttttttaaaatatgatagataaaatttattttattaaaatagcaacagataatggttgtcgtaatttaaaataattattttaataacaacacgcacttaaaaatttggggtattaaaattgttattttaaacataaaaattattaattaattacaccaattgattaaccgcctattcaacatttttcaagtttaaaaatgataatatttattatttttattatatatttaaataaaataattattaattttagtattctgccgaatttttgattgttggtgatatggatgacattttgatccctgatgataaagaatattatgcagaatttattcgaaatgattatcggcataaaaagaatgctgtcgcacttttataccaaagatatacagtggatatagtcacaagtaatgccaaaaatttataaatttagtaaaaaagtccaatgaaatttattttaaaattttaaatgatttaaaattttagcccaaaattcgtcaaaattctcattgttcgatgcgttaacatcagcaaaagttgcgttttatcagcccgatgatcccaaatatgtggtgaacacttcgcgcgcggaatcgttgtggattcattggccagtgatcataaagccgaacactgcaacacgcctggtgccatcaatggaagggcgaatgttgcatttccgaaattggcactttttggaagacgaaaatgacattttggcatcggaaaattatatgcacaggaaagtggtaaaaactattatttaaatgtgtaatagcgagaatcaaaattatataatagtagttatggtccggtgccattttcattttcacgaatatgcttaagtaaaaaagaacaaaagttctagaatttttctcatgatatttattcaaaaaatgtgatgaaaaacctcgaaattatagaaataaaataaataaacaacctaattttaatcgaaattaaaatcccattcaaaatatcataaccaataaatttatttattagaaaaatgcagctctgtggcgctcagtggcactgaatgaatcatttcttagcacgaaaacggcacgacaaattagcagacgatttaaatccgacattttcaagcgcaatttcggcacatttcttaaattgccaaccaagagaatgtatgctgaaatgatggcaaaatgttatgacaaaattttttatttgcatgataaacaagtgacggattgtccgggtaagaatttcgacaaaatttgaaaaaaattatatttttaaaattaaatattttttaaaggaccacaccgatgcagaatcaaaccaattaatgggctaaactgttttattgcaaaacgtaaattaattgaacaagagttggtgcccggaattttttggtacatttcgccagagaaaggaaaatttcgcttttcaaacgaaggatgttcactttaaaattttttatccaataaaattcatatgcttacatattcccgcagtgccaatgatgccgtcgagaaaatttttgatggaaattttaatgcatgtaatagaaaaaagggattttggtttgcaattgtgctagcgaaatggataaagaatgagatatattttttgagagattaaagtatttttgagcagttattgttccaattttacaactattttgccaacttttttggcattttcggtttttttgcttgtttttcattaattttacattttcgccaacttattagaggtattaattgctaattttatggatttgctttcttctgatcagtaggattttcaattaattttatattcttgccaatttatcagaggtaatttaatttctaaaaaatggtaaataatttttttagtgttttatggatttgctttcttctgatcagtaggattttcaattaattttatatttttgccaatttatcagaggtaatttaattgctaaaaaatggtaaataatttttttagtgttttatggatttgctttcttctgatcagtaggattttcaattaattttatatttttgccaatttatcagaggtaatttaattgctaaaaaatggtaaataatttttttagtgttttatggatttgctttcttttttaggtaaaacattggatgacttttgccgttatcaaggagataagaatcattgtttagacggagtcattccatgtttatacaaaaatgatgaatgcgtaccaaatcataaattagatggtgtgacaatctcaagcagtgtaagtaagcgggaaggggtcaatgttataattattcaggtgtggatttaaatttactaaaactagcggttgaatgcgccttcggcgcatcgcaaccgctaggaagtacggttgtgttgtaaaattatgaatgataaaaccgaaaatggctcggccgcttcgcggcctcgcacccttttggcattttcttatggcactaattttta

SEQ ID NO: 4941 - DNA, 4842 bp, Heterodera glycines
cgattatctcctaaatgaactttcattgaacaaactaaaaaaataaatgattaaaaaaattaatattttatttctgttcataaagcaaaattcgatacagaaagaatatgtcgggaagtgagcaagcgaaatgatattggtgaacagttgtgctgtaatatcagtgtacagaacaagaattcgcgtgtgaataaatgacttgggattagcaaaattataagcaaatgaaggaggccaacattaatcatccgtctttttgcttttttccccgttgggccctttcatttctctgagtcggtccattaaactctgaaatggtgaagagaagttacaatgaaataagtagaaattattgtctaaatttaagccattttgaattcaagtccttttttgctgtaggattccaaaaattgtttgtttttgtgtataattaagcgaaaatcataacaaattcaccttattctgttcctgcagtaaagcaaccttcaaaaaggtaataataaatgtgcttcgttttctgctctttattcagattttaacttactcgattttcgagtgccaacacataatccggccttttgcacttacattggcacggaatatcactgaaatagaaaagaattgttcaaaaataataaattttaattatttactgacagcgaatgtaacgacagagaccgttggagttgagtgatcgaatctgtgggaagttataaaattgttaattcattccgataaaaagtgtgtttcctaaccattttgcattgaaatagtggtcagtgcggcggtgttaagcacagcgaatagcggctgcgtattgccaagggaagcgggggtcatttgctggtgttgctgcggctgggtttgatggtggacaagcagttcagcctccaccaagctgttattcggacgcagctgttgttgtgttgctataaaagaaatgcttaaaatcatagttttattaaaaccagaccaatgggaggcatttgctgcgattggttcgacgacgaagcggccgattcagttggaaccgaacaaatggtcacattgctcacgtggtccgcttgttgcggtttgatcacctgaaaacggattaatctgtttgtattttttccattgggtgttcaaattgaagggctaaaccataagaaatcactctcacaaacagtgtcaaaactctaaagttgtaggtaaccttggctaacgccttctccaggtcggccagcgatagttgcccaaccgttgcgattgtcgtcggttgtccaccgccgaccgccactgccaaatgctgaaccgtaactgtcgcagcagaagcatcgccgttcagttgttcaatgccgtagttagcgccggaagaagtcgccgacgacgacgacggcgccgtcccttcgggcgcttcgcttaaccgctgctggaccaactgctgctgcaatacgcgttgctgttcatcgtcgcgcatttgtcgctggcgaaaatcgcggtcccgcttgaacgcttcgacctgggagaaacaaatggcaacgaattttaaaattatatgtaaaagttcaaaggagtacaacaattgcacactttgtccttgatgagtttggtgatgtgccttatgtcacagtcggggatcagttgttgttccaccatttgttgcacaatctttgttaggacaacttttgaccaatttattttgacatagaaaaccattcagtcactgacctcctcggacttgtccacttcgatgtcaaatgtgaactgaaggccttcgttctccttgaatttgtactgtgctcgcttccgttcatcgatcacgtataattgcatgtgaatcttaaaattggccaagtttattatagtggaataagtaattggaaaaattaagcaaatgaaaaaagggagtcagtcgaaaaatttaaaaatttttgtttagcgacgcagatacataaatttggcaatttcattcaattcatccacagaaatcaaagagggtgggcggcattcaacggcatcacctcactgctggcactgctcaaatcctggtctctgttctgaatgtccactcgaatgccaaattgttcctcctgaaagaatatcatgaaaaattgattaaaaaatggaagacggactggcatgaaaaactcgtcgttcaacaattgccgcacattcgatcggtcctctctcttcggccgaatgcatcgttcgattatctgttcagaattgggcaatcaaaacacagtcaaacaaaggagtggagtaacaacctctttgatctccgggttttgaatgcgttcaaaacaggcaggcttcactccctaaacagaagaaagggccgatcaattcgatcgactcgcttttgctgtctttgaatcgcttaccgaaatgacctttcgatagacttgggcggggtattggcactcgcttaactcattttgcaaagcgtgcaaataaagcatcaaaacaattacctgtatgggtattccccggttaccatttccaacaaacacatgccaaatgcataaactaaacatattaaatgtgttattgtatgctttacgcataactgaccgtccacgctttcgtcgtattgttcttcgtacatttcgggcgccatgaactcgggagtgccaattacactttttgcgtgcgatttgtttttgagggtggcaagacctgaaaaggattgtcagggcgtttaggtcacgttcgaaaccattcgaaattaatattttatttcagcattcctcgacctaccgagatcaccaattttaacacttccggttgtgccagtaatgaaaatgttgtcacatttcaagtcccgatggatgaccggcgtgggacgcgtgtgcaaaaaatagagaccctgaaacgaagaaatccttgcataagtcagaccattaaagcagctattaaaccaaatgacagggaatctaaatggcattatcacctttagaatttggcggcaccacgatttgagcacttttacattgattcgtttgaaacgcttcaaatacaacttgagcgtacccgaagtcatgagttctgaatggggcaaagcataagcaaagcaattgtaagcggagggaacactaaaaagactaatgcacaaatcgacctaaataatgggaaaaaatggaaaatatttgcccaatgaatgtaaaaggaaaggacagtttggaaattgtgtgcacaaacaacctgtaatgagcacgatgtatctgcaaattgcatttttgaatcgacggccccaaacaaaataaaatggaaagccaaccaacttttttttcccgtccgtccgttcccaatagtcgtaaaatttgacaatgttcggatgttggaggcccttcagcatttcggcttcctcccgaaaccgctggcgctccgctttgttcaacttttgttcctgcaattcacaccaagcgacagcaacacctgcagaaacgaatgaattgtggagtgatgtgatgccaatgtgaacaattgcatttgcctgtttcagtgtcaagaccccggtaaacagttttgaacgaaccgcgacccaattcctcatcaaatttcaaaaatcggttatctaaagaaacgatttgtggttgacctttgagccattccctcccgctaattaccaggcgatttgtcaatgggcttttcctcgtcatagtcctcgtcgtaatcctcagcggattctcgtcgtgattccgcctctttcttgacctcgtctagctctagcgatgtctgtggcttcaaagctgtcgctggtattggcacttcttcctccactttcgcttgtgcgctcgctgtccgactcaggcgccattcccgctgaacgacttcaagtcgggacttctcctccccagaaagccacgcgtgcgacgaatcccaagcgtgggaagagctgaaattcggatagaaaatatttgtttaaagtcattttaggggttttcacggtcggagaatccgaatcctgtatccattcgacccaatcgaacccaaattcgaacaaaaaagcaaaacttgcaatttttctatttttgcatttttggtctaaaaccggcttaaatgtaaggaaacaaaaagaaatcaataatgagattttacgaaatattgttgcctttgtgtcaactatatatttaaatttttgttttcaagttttgaagtttttcatgtaaaatttcatgttacgtaaaacacattgtagctaaaaataaacgttagattcgtgatcagcatcaaaaaattagcgtagaaaaaaaatttcaggggctggctaaacccggaagtaccccatttttcattttcacgcgcggtttcgttgacacgtcgaataactgtccgtctttttttttcattatccatttaaatagaaatttaacagagaagtcaagtcaaaataaggcctgtaaaaaatagaagggataggtgtctaataaaacatattttcataaaaataacaaaaagttacacaaaatagaacatggagcaaaaaacgaaaataatttttgtagatttatgaaagactcacttatgcttttatacttctttgggtttctttttatttagtaattactaattaggtagtgagcctaaaaaacttccgtccaattaatgccgccgtctttttggttccagcgtgttagtcgttactcggcagcggtaggcattttttccccttttaaatttaaatttggcattatgtatgttataataaaacaaataataaatgaaaacgatatgctgttcgacctttgataatgatgctctcactttttttattactactttttataaattacttaaattttatcaaatatgtgaaaataaatttctcgaaaatatgggacattaagtctagactct

SEQ ID NO: 4942 - DNA, 2694 bp, Heterodera glycines
ccgactcaggcgccattcccgctgaacggcttcaagtcgggacttctcctccccagaaagccacgcgtgcgacgaatcccaagcgtgggaagagctgaaattcggatggaaaatatttagtattcgctagctcatttcatgtttagtaaggtgagccaaaaaatcggtaatagtaaagtttacccccccccccgattttcaaaaaaaaatttgtttcgaaagtcatgaaaacacgttccaaaggttttcggggtcgctgatcacgaattaggtatttaaacaaaattttgacaaaaaatgctaaattcgaaaatttgactttttgttcgaattcggatccgggattggtcaaatggatgacgaattcgtggtcagcgacccggaaaaccattggaaacattttttctagacttatttttgatgctgatcatgcatttgatgtttaaagtcattttaggggttttcacggtcggagaatccgaatcctgtatccatttcgacccaatcgaacccaaattcgaacaaaaaagcaaaacttgcaatttttctatttttgcatttttggtctaaaaccggcttaaatgtaaggaaacaaaaagaaatcaataatgagattttacgaaatattgttgcctttgtgtcaactatatatttaaatttttgttttcaagttttgaagtttttcatgtaaaatttcatgttacgtaaaacacattgtagctaaaactaaacgttagattcgtgatcagcatcaaaaattagagtagaaaaaaatttcagggggtggctaaacccggaagtaccccatttttcactttcacctcgcggtttcgttgacgcgtcgaataactgtccgtctttttctggaatcgttgcttccgccgtgttttccactgccaccactgttcgaatagccatttctgaagggtgaaccgacgcgtccaccaccgtttctgctttgctgtttggagtttgaggaagaaaagttttcattatccatttcaatagaaatttaacagagaagtgaaaataaggcctgtaaaaaacagaaggtgtatgtgtcaaacaaattatacttttgtagaaataacaaaaaattacaaaattagaacatggaggtaaaaaccaaaatttaaaataattgttgaagatttcttaaagaaccatttatgcttttattcttctttgggtttatttaatttggtagtcagtaatcctaacaaaaaagcggtcccctcgatttccgtccaattaatgccgccgtctttttggctccagcagggtgttagccgtttcctcgttactcggcagcggtggtattttttcctttttttaaaattttaatttggcattatgtttaaataaaaaataaatcgggaggggtcggtttagtctggccggtttagtctggccgttttagtctggccgttttagtcagagggtcggtttagtctggccgttttagtcagggggtcgttttagtctggttagctgttttcacccacaaattaattactttttataaatttcttttgtttgtcaatcatatacataaacataactttaaaatgtctgtttagctacaaatcaaatggaaatctccaatcaggaaataaagacaaagcgaaacaagcagaagctggaacatgagggtgcactttatgttcttcaccaactcagtgacggaccgcaaaggtgaaaaaatcaattaaatttcactaatttccatattaagaattttgatatttgctcgttcttcgacttcggaatggactggtgttatgaaaaatgtgttcgcagatggcactttcagtttggcgccgcattttcagtcaaatttatattcttctagcaaagtaaaaccctatttttcacgttttttccatagaaagcttctacaggcttttgcttgttcatattcaactgtcttccgcttcttcaacacaattcgatgtgagcaaaagtcaattgatgcggacatctcacgatgcatcgctggtgaactccctcctgcaaaagcgccaaaatatcgtgccgctgatgcgagaattcttcgacttttgcagggctacaatgccatcaacaataaccctgctcaccaaaatgaccataattatcatgccaatgtcaatgttaatcccgataacatcaaccatttgctcgttggtatttctcgaaattatgaaatgcgcccgtaatttttcaatgctttgttttttttgttgttaacacattgataaacattttttgataataaattaaacatttctcgaaaaaatcagaatataacctatgtggcacaaaaacagcttgccagactaaaacgaccccctgactaaaacgtcccctcagactaaaccggccagactaaaacggccagactaaaacggccagactaaaccggccagactaaactgacccggtccgaaaataaatagtggaagtgcggaacccgtcaattcggccccagcacgtttcggacgccccagcggatttttcgcggaactaattggttatgaaaccctccctgggctatactacctaattaggaaccaaaattatcaaatttttttttacaaaaactgcaatttccctatttttaaattaataattcatttcattatgaattgttattatgttttttccttatttagaacagaaatatttgtgtgtatcatcatcatgccttcattg

SEQ ID NO: 4943 - DNA, 1354 bp, Heterodera glycines
  unsure (1)..(1354): unsure at all n locations
ctgtgcagcagcattgtgtgtgggaaaagggaagaagtgagaaaaataaagaaggaaatagtgcactgtctgactgtctggttatgcttttgaaaaatttgtcccaaaagggggatacaaacccaattagtaccctgaagggctttcgaatgataccaacaatgtttgatttggatgacaaattaaaaagttataagctgaaaacccgcttggggctcgaaaaattnctggggcccgcgaaaactctggaggtccgtggaagtgatatgctgttcgaaggtgtttctgttgaaattttcaaataaaataaaatttggcattcttcctcccgccctttctaaattttaaattttttcggttcaatacagaagcctcgtttaactcatttttacatattttaaaattaagaatcagaaatttagaaaaccaacgcaagcattacgtaaaatgggaagaaagaacctaaaaacttcaaagtcacttcgacccttagaaaatatcaatgattcggttggaaaaataggggaagacttggaggacgaagaactcgaagaagcggacgacaacgaatcgcttgaagacgaaattggagcggaatcgggagaaggtccgtcccaacaattttaatcggatttaattattccaatgttttagaaccttttgaattagaatttgttgggtataaatcggcaacaaagtcggctaaatgtttgcttttggaagcattggaggacaacacaattgcaacttcgcgctttgttctcttcaagttttcggatggcataaattaaaaggaggcaagcgatccggtggtcaagtagttagtgtgccttcctttggtgctggcttcccatgagttaaagtcccatttcttctgattattttaaagcaaatattatattgaaattattctaatttttgttttttttaatttatttttttaattaattaactttatggtattttaaattaatgataatgattttttgaattaataaaataataaatatttttaattaatagaataataaagtctaaattaaatattaaaattaatcgaataaaaattaaaaataaacaaatattaataaatatttaaataatttataaatttcaaaatgagttaattttagggttagacgaatgtcgggtatttgggcaaaactcgggtcctggatatttccgggtccagaaaagccgggtccaagtttttaaaccgggtacgggaggaacagagagtggaagaggaacagaaagtggaagagaaagtggaagaggaacagaaagtggaagaggaacagaaagtggaagagaaacagaaagtggaagagacacagaacgtgaagagaaagtg

SEQ ID NO: 4944 - DNA, 5650 bp, Heterodera glycines
  unsure (1)..(5650): unsure at all n locations
caaaaaaaaatttgcaaaacaaaagggtcccccncttttgaaaaaattttcaaaaaaacccacttttaatatagcgccaaatttttggtaataaatataattaaaaattcagttctataacgaagaattgtcttcgcctcagatgccaataaattaccaagtcatgaagcaggtgtcgcttaaaccgcttattaaaaaaaaaattttttttgaagggcaccgattacagtgttcacggatgcaaggcaaaggctgagagaaatccaatttaccgatggactgttgggaaaggagccatcaacaaatttgaatttgccggtcatgacaacagtctaatggcaactgctggacaggtcgtcaatcggaaaatgagcaaaactcggtatttaacttacggatttcttataggatgggtttttgcgagttttcaattggaagacgatggatttggttggctttttcaagtcctatttcggtggactcctctgtcttgcttggagtccggacaacctttacatcgcaaccggtggagaggatgacctgctcaccgtctattccctagctgaaagtgggtggcgttagcacagttttgaaaatttaaactttagatagggtcgtatgtcgtgggcaggcgcataagtcatggatttctgaagtttttcccttttgaaataaataaaaagcgaacctctaaaggtcgccttcgattgttatgcacccgaatttatgttggaacaaactcaaattttcgacgaaaaacgctgttgtccgcctttgaagggtgagggcacctgttcatcgtttgcaactaatgaaggttttttgtgtttaatttaagtgagcctttttggaaaaaacattgaatgaatccgattttttcaaaaggccaactttcattcagctccatagttgttttttttctaatccttcccattcctcaggaaacgcctttcaaaatgggcaccatttcccttctggccatgaagaaagtgtttcttctgccccgcaaattggccatttgccttttgctaattgcgacgacctccgcacgaccaacgcaaattcgcttcaattgcttcccaacggaaaagtaacgcacagaaacggctcatcggatgatgcaaatgacgtttctcactgtcagcctcagcttctctatagggttggcactgttggccacgactgtcaggcattgttttttgtttttgtctccaaatgttcgcatttcattggccatttttttagttgtgcctttgggacctttccgaagacattttggcttctccgcccctttcccaacatcacttcgacgaaatcaccgtttctccttcaccctcaaactttgcaaatgtttcccctcgaaataccacggtcattcccattggcttcgcaaatgcattgtccacaaccgaaactgatgtgagtcatcctttttaagcttaatttagaataggaaaaaggccggcttaaggtgagaacagctgacaaaccttctgacgcaaatagcaaaagcagcggacgcttcagaaaatttcataagcgtggcttcagtttcgggtcccgtttgacgggaaatgaacggtgtgttttcctatacaattttcaaatcttgaaatgttagaggtctgacaatgagcggtgagatggtttacaattgaactttacgaactttaagtgggaagcatatatgaattcggtatcaatggatagataaagtagagtcgacttctatgaattttcaattttacagacgcagaataaaaaaagtacttaaaaatctgaatttttaggcctaattttgaggggtattccagctttttcaattattgcctacttttgcattgcctatttttcatttaatttctgtaaattgaagaatgaaataccacattttttaaatagctattaatttttaatgaaattgtttaagaaaacagcacgggaattcttcgaacggggcaaattcgaatgaaagtacattgaaaagaggcgaaaattatgcacaatttctcggaactgtgcaatgtccacgactcgaagacgtgccaatgattgagcctttgatgtgcaaaaaggtcgttgtttttcgcttcgctgcaattggcgtgtccgttccgttcagattgcacacgaaagactcggcgctttgctcttccgcgaggattgcatcggttgtcaattttaatctagcggagttttattccaatttttgctgcttaagtgactgcttgtcaggagggaatcatttgcacttgggctcgaccgaatatattggcgagacaagtgagtgaggggggggggagaagccgacttttgcggtgattggcacgcgacaattgcaggaggccgggagccacgaccaaatcatgggacaggaccaaaactgtgacgccgtttcccgggaaaactgcgatgggacgtgcgtttgacagacatgtgaagcaagcaaattccactccgggtactgttattgagtcaattcattcatacaattaaattgtccctcgtcattttccactccaatcatttttttaacttttataatttataaattactgaaacaaatacaatggcactttgttgatgagatcatttgaaattttgtgcattttgaggtatttgttattgtaattccgttaattgcttgggtaagcgtcgtcaataatgcacaaaatttgagaaatgtacaaatgtggggggggggcattggcattggcacttctcactctgttccctgccatttgtcaatttcctagaccttttcgtttttctgctgctttcctttgttttctatgcattcactttgctctttccttcctttattttcaccgcaatttgccattatttcagccaaagaaagcattttgcaggcgtcttcataagttggcaaagggggcacttcgcgagtcagaggactggcgtagcagagacccttttcatcgaactgaatttgagggatcgtatttaaggcattcagacaaaaagggagtccaaccttaagacagtacggcttatccgggccgaagggctctcgtatccgtgtcaatcctgaagatttatgataaacatattcatcaatgaaattgagaggagaaattggggaaacccctccccccccccactcgaaggtacaaaaagtggggaacaccaaaagatacgcgattgggaaaccacccctccccttccccataattctttcaaatttctcaaatgataatgaaaaggcaacggacggggaacccctctccaatttgctaattatttcatcatcatttaaaattttgcaaaagcatggaaaagggaaaaagtcaggaaactgaacgggcccaggcctgataagcaatataaactaaaggaagccaatgggtaaaacacggggataatttgtttcaatagaatgaaaaactcacggctaatggatgcgtcttccatcgacgcgacccgtctctgttgcgtgctgatggagcgacgagtgcggaagaggcaagtgcacgctgagatggtgcagacggagccgaacaatgtgctgaaaatgaagaattgacacagcagacgagccgaggcatcggacgaagtgttggaaggagcggaagttgtggaagtgaagagggaagcggaggacgacagtggcggcgcatttcccccggagggcactaaagcaaaaaaggaattgcgagactgcattctccgacaaagctttaccttctctctttgcttcgttctcattcaacgccgtttttaacctctgaattctctgagtcgattgatgttcacgcggcaaatgcacgaggtcggcggaacccatcaaagggacagtgccgaccgaagagagcgaaaggaggaaaatgaaaagcaaaggaaaagcgaggggagggcagggaaaagccatcggaaaggagtgatgtgacagttcactgaaatgatgttaaaatggtcaatgaggtgaaaatctgctgctgataaaaagcaccactgacaaatgagtgggggggaagtctttgatcggtgggacctcccgccccaaaagggaaaacggagggggcgggggttccccgggagaagtcccttcacagggaagaaagacaaatgtcattgatgacagttgacagcacactgctgctggaggggggggggggggcaaaccgaggagtggtgtccttaactttattcctaaacccaacgattgatggagaaggtgtggccataataacaattaataaaatgagatggaacaaccaaagggagcaatgagaaaatgacgaattgttagttggcactgatcaaaagaccgagaaaagggattcttatgtccaaaacaacggtcgctcattaaattgctcgacgtgtccgatcataacaaataatgaatttaattgactcgtaaataactctttctctctctctgcttactcactgctctttggcagtgtcccctctcccctcggctccgccttttccctccgtttccctcactaactgaaaatcgttgtactaatctccccaatttcaactgatggccattcattcattcccccattttatcccaaaataataacagcgatatcattcattccgttttggtgtcacatggtatttaaccttcattttcattgccaaccgccccatcccttctgtgagcagtgaaaacctaacagtcaatgattgacagtaaatgttaacgttaagaaacggtgggaactcatctttcatcagtcaattggggcggggggggggcaaaaagaggcaaacaccgcaaatatgtgcagggacagtaaacaccgagtaaagcgatggcggagattggaaagggggatgaggacagagtctataaatgggagggacagagtcagaaattcgaggaagtggtaaatcagaaacagcaaaacgcatttaagattgaatttgagccttgtgagattgtcaccagtcgccaccgattataaacggtaattttctgcactttgtgtaaagcgttttatatttccggtaaacgactgttgagcaaaaactaaactcaaaattggctgttgcttttttgtcaactgtaacaactctttcccttccctttctcttcattttgtttttgtttgtttccttttctcatcagtggccggtcgattaggacggtaaagtgatgcaaaagaaaagaactttttatgaggaaatggggggagggaggggaggtggcgatcagtctgtgtaaagtgaaagaaatttggaattggagaattgtgggcgatggattaatttgggtgcagcaggcggaagggaaatgcgcaaaaaatggggaaaggaaatgaattcattttgggcacgagagttttaaacggtattgtcgcagaaggaacggcaaaattttgtgattttgtctaacatttaaaatttatttttaataaaaaaaatatttacaaaaacaattgacaaataaccgaaacaaaatgaataagcgaaaagtgcaacattggcctgaaataaatgacatacaaacgaccgacggaggacgccgaccttaacaaataaacaaggcaataaaagggaggcgacagagtcaccttctttaatagcaaatggtgaaccgttcccgggagaatttcatttntttggggntcgtccatcgnactttttgtgnngtgaccaaacgtctttcatg

SEQ ID NO: 4945 - DNA, 4319 bp, Heterodera glycines
  unsure (1)..(4319): unsure at all n locations
ttttctccgtaattcactttttgaaagggcaaatgacgtggactgttgccgaatccgtaaacacctcaaaaataggggcagtaaaacttaaaacacgggtgaaagtcgaaaccatgaggccaaactgtgcgtccctcctccgttttggaagggaagcgattggacaatgaaaaaatggcggaaggaccgacggaaaggaggctaaagagaaggatgggaagagcggaagaaggagcgacctgtccacgagaagcaattggaagccattcaactgttgctgttttttggcaatttcggtaagaaattcggcgggcggaaaagtgccgttgagaaaatctttgacgaaagcccctaagggacaaagggaaatcgtagcaacaaaaagcagcgccacacctcggctcggggcattttttttcaaggtgtgcggaggttcggtcactgagaggagcactccgacgcgtcccttccggtcgatgcccagccacgtgccgtgctcttccgcctgctcgtcccagcctaaaaacaatcggccgaaacattggtcaaaccgtccgatttggccatcccccccctccaatttgtcaaatgcattccctcacatgccaaaatgccatctctccagcaaagttccgaagtgacgcggtccaattcttaacaaacaacaattaaaaaatacgtttttcttaatcatttggcatttcaatgggtccgccgttggcactgactttcgtctctgttgtttagcaaaatcattttgtatttccctccaaatgattgtccctttaaaccatcggccaaagctaagaaagtcacacacattctgaagaagaaaaggggaaaatggagagaaatgtgaaggtacataaaagcacaaataaaagtaaggaaaggaaatcagtggacgaaaaacattttaacatttaatgaccgaaagtgataaacgaaaaaataaatacaaatcattgcttcacatgttcagaatcaaaaaagaaacaacaaaaagagagaggagagagagagggtttatgtaagaaagaacatcaaaataaggaaagaaagataaagcattccatcagctcaccaattgaataagccccttttgattgagattcaaaattgagtccgcgatcactttggctgatcgatttgtgtaccctccgctggtgaccattgtaatgggcaccctccgacggatcgcagcaccaaaaacgatttcgtcacgacgaaaaatggccttagaaaggaagaaaacaatgataacggatgagaaaataataaaaagatataatgaaaaggtgcccggatttcggggtgcaccccaaatttcgccgccgaaatttctttaaaaattttcagacttatttagcctagaacatgacactgattttggcaatgaaacgaatgaaaagagaaacaacaccttgggggagagactgaggccacccaaagggtcgccgatcagagaatcggtgccggcgacgaaaaggaggaagtcgggaacagagaaatcggcaaaggcggcgtccaattccatttcgagtcgacggaggtaaaaatcatcctcagcgccaaaagggagcggaacagcgcgcgaaacggactctgagaaaagggaggggtgaaaagggacggacaaacggaaaaagggcgaactcagtgcatcggagtcaccggggtaaatggacgcgttgaaaaggtcgaggatatacacgcgactgtcagaggcaaaatcagtctcatggccatttcccttaagggagggaaaaggcaaatttaagggacggaaagggaaggcacctgatgagcatcaacatcaactgaaaaaaatatatatgtgaacattaagaactttaaatgaatcgacaaatgttgggtttcaaattgtgaacaaattcccatggtgggattaaattgtgagcgaaaccaaaaaataaataatttttgagtttcattattttgaaaaacaggggaatatcaaaatttgactatcattatttctcaaataaaaataatttcaaaaaaccaaccaaccgatcattgcacttttgatcaattcattagcgaacaaaagtttaattgccaaagtgacgtcagcataaacgcaaaatccgccgccttttccctctgcgaaaaaacattttacattagttaagagaaagtggcacaatgccataacataagtacactttcttgtccaatgcatctcgccgcttctcaaatttctcacctgaggcgtggtgaaagccgccaccgatgttaatggcccagcccctaattaggctgactctcgcggctaacaccgttcctcccgtttgaattctgttgaggaaagcagtcgctgtatcagaggaaaaaagggccaaaaaaagagacacaccgcattggacgaaggatgcgacggtcgattaggcaaatgggaaaaaggaggacgaggcccacttccaaaatgcgagtcaaagtgaagcggccattcagcgagcgaaggtattttttggagtggaccagcaaaagatgctcctttttggcttcgattggtcggaggacggcactttcgacgagggcaccacttgctggaaaatgggagaaagtctaaactgaaaatgaaacaagtcgatttggggcccgacacttaaaggattaaggagggtattattgcctatcaaaaagcggaagacattgccccatttattggagtcgaaggggtgacacttctcaatgccgaaaaaggagatgttgtaatcctcggaataaacaattggacatcgttcgtcccagtcgatttcggcctcagaatcatccaaaaaagcaaaagcggaaagagcagcggaagcgcacatcggcaatgagatcagcaggtgaaaagccgaaatgaaagcaatcaaaaccagactcgtgagttgtttatttcgatattttgtacgcatatttacgaagacaaatgatgattggcaatagtctcacaatcatttgtaaaagcgctaatatataatttattgagtaacaattaataaatgtataaaagtggaagtgaccttaagttataactccaattggtaaacaattaaatttaaaggcagaaactcgggaagttgtcgaatccatcataagtcatacgttccatcattttgtcttctttgagtcggctttttttacatttggcgatttcttttcgtccgataaaacttccttttggccatttgctgaaacttatcattcaatcccgttatgttctcttatggctgggtttaccgacctttctcagcgctttcttttgcatttttcttggcactttgttgctccttccttcgctcggcttccttcttcttaagcgccccagttgggaacacatagtcaataatgcacacgatgatctgtaaacggggcaaattagtgttaatttgttctcgaattaaaaacgaaaattaaattagcaattcgcaaaatgctcacaaatccgaggacacagcccaacgcgagagtcactgtggcaaagaatgcatacgaagcccaagcgggaacaccgacattttcgacaactgaaaaaccattgcatcaaaaggtattcattcaaacatcagcccacaatgtccgtgtaagtctctgactgccatggacagtttgaagaagacggcgactacgcccatttgagagctgtccggatgtttgtaggacgggagggggtcgatgctggtccatcgtttgtcttcgatgaaagagatctaaatgcaatgttaacgaagtcgtatacgaatagccattacgaaatcatttttgtcgcgtggtcccgcgtaaagtcgaaatacgccatccttcacgctaaaagaagaaatattacttgaaccggcaaatgaattttaactgataaatggtgggcagagcagtgacaagaaatcgtccagaaagccctggattcgtggtcacgtctatttccgcaacatttatgttcaaatcccttgaccaatcagcgaatgaattccatgactgaatgatgggaaatgtaataaatcaaagtactaaaaaaatgcaacactttttggaggtctttgcaggcagggcaccacggcgcgtgacttaatttcaacgaatttcataaaaaacgcaaaaaacagacaattccatcatccattcgccgctgagaatgtttcgccaattttcctcatttagattcaaaagattcttcgattttactgcacaaaggacaaattcagtgcaaataaaaatggaaagtaaaaacagcggtgaccttgccatttaacctataaataaacgaatttaatgaancaagcgtttattgttgagtggacggatggtttaaa

SEQ ID NO: 4946 - DNA, 1175 bp, Heterodera glycines
gggaaggggaaacagcgatcaaagcgaggaaatgggtcacaagcaaacgaaaatggctgaacagaagacaattcataatttacttcgcagaagtggccaaaaagggagcccatattccgttttacaaattcaattgttaaaattcgaatttatttccaaaataaaaatcaactgatgctaaaggcatgaacaaatgcaaaaaaatcatccttgtgaacaactttcgtcaagttcgcatcgatttttcgttcatttgctaaaagaattggtggatgcgaacaatcatcccatccgtgatgataaatgcacgcgtcactcgccgccaattcctgttttcgcgagactgccatattcagcacggataaaccggctaacaaagcgagatgaaaagccaataacacaaacaaaaacttcagtagaactgtgagcaaacagagaatggaacggttgaagccatgtgtgttggacagaatgcaaagttcattgtagctcataacgccattttgctgggccatttcgctggcaacgaacccttctaatctcgccaaaactttttcaaaatcttcggattgaattgaaacatcccaacgctgtaaaaaaaaacaaaataaaatattcagtcatttcacaaattaattttcaataaaaacttactaaagaagtgagcaggcgaatttccaactcgtttagtttgggtaatgcaaggcccgaaactgatgcctggaacagaagaaaataaataaataaatagaaccattaaaaaggactaatttatcaaatttagcattaagtatttaagagaatttacaatttgcaaattcatccaattaacaaggaaatatgcttaggattttagacgaaaacctattcaaaattattagttttgcctgacgtcaaatttaacattatcataaaaaaacaagaatatataacaagtggaattgaaacataaataataattaaggaaagagaacaagcactgaattcaatgttagtgaaccaatcagaacctatggtaaatgagttaaggcgaatcctacccattcgtcgttccaaacaaattcctgcaaagtgccatcgttaaggtatttggttgccaacaccaacgaagaaacgaagagttcagttggattgaaggcgagaaatctctttcgtttgattcttttagccgcata

SEQ ID NO: 4947 - DNA, 3358 bp, Heterodera glycines
aaaaaagggttaaaaaagagtacaaaattcctcccctccatcaaattttgaaatttaaatttttacaattagttgaatttcaaataatttaattttttttttaatgttgaagattaaattgaataatttttaattcagtttcaaaatagggctgcaaccccgacgtcggggttggaagcgtcggagttcggggtcgggattaaccccgaaaatgcccaaaaatgtcggagttcggggtcggggttgcaaccctatttcaaaatttcagaaaggcaataatataatgatttcttttcaaatattttgtagcgccctttttcagaaaaaaatttctgtgaaagtaggaggcacacgcgtgccagcaatcaatccctccccctcccctcccctcgccctttccgcaaatggacagtgctggcataagcgacagagaaggggctgcagaaggtggcacggatgaattgccggcacaaaattttcaccaatttaccaccgccgcggcgacggcggcggtgggtgacggaaatggcacggggggtcactcgccgtcactgacggcggacacggaggaggacaactgcggcggggccgggtatggcgccgggcaatgcgcgcccgcggcgtcgtcatcgtcccccgccggggagcaaagacgtccattccattcgtatcgttcaccggtgccattgaaggcaaatgccaacagcaaaagccatcaacaaccgccggtgggaggcgtaagtacggcacaacaccacgcggaacaaccgtcgaaaatgcctttgatgttggacaaatacgagaaaattggcaaaatcggcgaggggtcgtacggcgtcgtgttcaaatgcaggaatagggacacaggcgaagtacgtcccgcttctgctgattggcacgaaaaaataaaaatttaaaattcagttggtggctatcaaaaagtttttcgaatccgaagacgacccggcgattaggaaaatcgccctccgagagattcgaatgcttcgggtcagttcgggtcggacaagggtttaatggtgaagcgaggacacatttaaaataccaattcaaatatttaacggtaattttctccagttttatgtggaagagtttaaactttcaatttgaaaatttgcttaaaaattttaaaattcccaatgcctttaagcaactgaaacatccaaatctggtgaatctgattgaagtgttcaagcggaacagaaagcttcacctcgtctttgagcattgcgaccgcaccgttttggacgacttggagagatttcccagtgggtcggtcggttttggtgccattaaatttgcaaatcgtccaaaatgtcagttgtcccgagtcactcaccaaacggctgatttttcaattgttttccgccattcgcttctgccattcgaggaattgcattcacagtcagttcagtccctttttggccaaaggcgaaagccccggccgatttaatttgggggggggagaagccacggagggaggcgaaaggcaaatccaaaaaaaggaaaagcggcgaattaatcgcgccacatggagaagcacgaacacagaaaaagagaccatactgataggtcataggcttaaacattttcaagctgaagaaaattaaaaagttcctttttccattaatcaaaaaataattttgtgttttgggcgtaaaatgttcaattaaccaacggcaaacgaatgaccctttgccaattgcttaaataatctaattattggtgttcaattgttcaggggacataaaacccgagaacattttgctcacctccaacgacgtcgttaagctgggcgactttggatttgcgaggataatgagtgggttactgtggttttaagttatttaatcaaaatgaatttatattctattacaaatgttgcaattacttaattaccgccccccccccctcaattagcgcaggtgttaatgaaatatacaccgattatgtggccactcgatggtaccgtgcccccgaactgctcgtcggcgacacgcactacggttccccagtggacatttgggcggtcggctgcgtttttgccgaaatgctcaccggagagccaatttggccgggaaggttagccgcgctgagttggtccaacatttaaagaatccaaaaaccaatggccgttttccaatcccatttcagatcagacgttgatcagctttacctaatcattcgaacaatgggtaaagcagcaataacaacagcagcaatgctttcataattaacagtttaattgacaattatttttcattttctcggaatgcttttcgtatgttttgcttaaggtaaaatcacttcccagcaaatgaaaatcttccacaacaacgcctatttccgcggcatttctatccccgagccggaggaacacatcggactgctgcagagattggcacagacggcgaaccccgcggtgagcgtcgattttgcagcgatggatttgctgaaggtggcggcgtaaatgggggagggcacccggtgctatgtcgttacttaaagaaccatcattatgatttgatgaaaaattatttattagctgaaaagtaaccgaatttttatttcttgatatgattcgatagccctaagtgttctctatcagtctacaaaatttcaaaaaatttcatcaagtttcaaaagagttagggccaaagatgctcgaagatcaaggttttttgagttcctctagccataactttttttaaacttaacgaaattttttgaaattttgtagacttatagagaacactaagggctatcgagtgatatcaagaattaaaaattcagttgcctttcagctaagttataaataatttttcattaaatcataatgatggtttttcaagtaacgactcagccccagggcacccattaattttaaaaatgaatttggcatttttaattagcgatgcgtcgaaatggaccccaaaatgcgatggagtgccgaggagctgttggaccacgagtattttagaagcagcgcactgatcagcagaatggccccctcaaagcagaacaatcaccaacaaatgagcaacggcaaattccaactgccccaattgggtgcgctggggttggcattctgtcccgtaccccgtgaaatgccgtatttttgtcagtctgtatcgtttcggcgccagggtcgtttcggcgtcaagccaaaaaaatcatgaatcagtgggaaatttttgagcgatttaaatttcaaaaattaaaaattttagcaaaatgtagaataacaataaactaacaaaaaaaaatctaacaaaaattcatttgtttaccgtatttactcgattgagaacccctacccgctctacaattagaagccccc

SEQ ID NO: 4948 - DNA, 1640 bp, Heterodera glycines
tcttttgcatattgtaacaaattttgtcccctttccaatggccttgctaaaattttccaaaaaaaatttcctaaccccctaggaatttttttctaaaattttcctgattttcagtgtattttagggtgtcccgatcactatgaaggagtgatctgatcaagttgctgtaaaagacttttttgatcagcatcaaaagttagaacggcaggaattttttcagaatttttggcccacaaaatattgacgtattcattgataaagtgaatcgtgttaaacatatgaccgaccacccaaaattaggggtggttgcactttgtctgctcgcatatcggccaaagaggattaattgacatatttttggtaccaatcgaaagcccattgaataagctatcgattggtataacgcatatgacatttggtcttagtaaaaaaaattatggttaaatttataaaaaaattttggggtgtgttaaacatatgaccatgactgtatgtacatatttttatgcatattttagactttttcgtacatacatatttcgcaatttttttttttacatatttagggggtttttgagaatttaaagaatttttgtgaaaatgtaccccaaaattttgactaccgtatgcatatacggtattaatttacatatttcgcgatttttcttacataaaaaaggaagccctgtaataattaaatagcagagctcggtattttcaaattatttaatttaacgctatttttttaagaaaaaaagaattgataaaacattgaaacctaaactaaaaatgcatcttcccgtttttgagaaaaaaatttacaggaacggaaaaacgaaaatgaacggggcgagattcccgtgtttcccccgttcccgccggactcttaaattatttcataaatctttggcataatgtctaaatattcaaaaaatgcagtacgagtccgcgggagcagcgcaaaaaatcaaattttaggaccccgctgcggaattggaactcaaaatttttgctggacaggatcacgcgggattaatcccgcaaagtcacctaaatcagcaattgatttaccctgaaattttaataattttaattctttcagcttttctttgtatttttctgtttttcattgtccaccagttcagtttgtggtgatgatgcagcaaggagggcacaaatattccatccaaatgaaaattgagcgaggcattcactttgtttattaaaaataccagttaatgtatcattcaaatttgcttccgtttcacttttccaggtctccaatcccaaaatttggccgatgtcttaacaaccataacggactgtgctcggttcattcgcgagtaccctttccccggctttgttcacaacgttttgtttaaattggctcaggtaattccatcacttttcgtttacccattttttccgcttgttatttaggccttccaaggcgaattgttcgggcgcaaattcgagcagtctctgaacgccattcggctgcgcattgtcaccgccatccgcgagtgcagcggcgtcaatttgggcgtcacaattccgtcggaggacatcgtccgctgcattatgaaagtgtcccattccaacgattacaaagcgcgttcgatgactctgctttttttcgc

SEQ ID NO: 4949 - DNA, 1767 bp, Heterodera glycines
ccttttccgttttggttctgcgcaaaattgccgaactgtttggctccaatagccttacccattgggtcagggccgaactgatggccgtcgtggccaacctcagggacctttcgctgacaaaacaatgtcttgaactcgaagtggcactcctcgacacatccgactacaaactgcgccccgtcatttacgagtaataacaaacatttggacggttgttgcattaactttcaaagtaggcaagtgtaattccaaataccgtatatttcgaatgcgaacccaagttcgaataaattgaattgtcttatagagagtaattggaaaatatgtcatccctctgctaaagtgcccacatttttcctttatattttcagttgtctaacgcaattggcgtcccgaggggagcaaaatgtagcggatcaagtaatatttttcaataattatgatgattcggactgattgaaacaaattttaactggaattcaatccaaagttcaaaaatgaaagtattaatttacagtgcaaagattcggtttttagaatggaaagtaacagacgtcctttaatttgttttccatttttttgcagatttccattctgttgcgtggccttgccaaggctatttcccaagaggataagccgttgctccgttgcgttttgctgaatttgtccaaattgtccgcctttccctcccattggagcacagaacacattttggtattcgttgccattttcccaacttttcatccatttcctccattttttggactctccgtgacttttacgtccaaattgaatttctcaactcaaacgccgtcctttgcgcgtggcttcaatgcctcgaggttctgtccacctccgaaaagcacaacagacttttgatcggtattctccttggttttccctttgtgtttttttattttatcaatttgcccaaactttcagaaaatcaccggtggatttctctgctgaacgatgccaactttgtgcttcgtatccatgccatcaatttgggtttgttttccctcccccgtttctttcccaatttaacttgtcctttttagcgctgaatttggtccaacagagtgccacggcaaattcactctttgggtcgtccattttcgatgcaattgtcagtgagttgtgcataaacacaaccaacacaaaacaaatccttagcgtagaaacactccgcgagtcgtcgcattcttttgttgtcaattcgccgccaactccgttctccaatccgaaactcagtcaaagggtcagaaatgtcaccaaaacgaaaacactagcgaaattaaataagagccaaggaaaatttgtcatattttcatggacatttttattcatttgcattttacattatgagttagaaccgttaaatttttaaaatgttttcccctggccctgtgtaacaaagcgatgtttcgtcttacaattagattttccttttttgtttttcagttttttgcgcttgtctccaagtttgtccgtggttcgacttgtaccgctcggctggcaaaatgtctcaacgaaactttattgccttccgccgatgagccggcgattctctccctttgctcctccaaatttccgttggaactgttggcggtcatttgcgacaaatattggacagagtgccgtacttttggttggtgttggcactttcattccctttcctttttggactttttcaagatttgtctcccctcgtcaattgctttctcttccgcccctccccccgcttttgcccaattttcccctcca

SEQ ID NO: 4950 - DNA, 2544 bp, Heterodera glycines
  unsure (1)..(2544): unsure at all n locations
gctgatcgatcgcatcgacgagtccttcccgcaaatggaccattggaccgttnatcagatggcccgctccgcactccgttacggccattggcgtcacttggcactgccgttgctgcaacggattcgaacaaaagtgcaataatttaatgaggggggagggtattgttggcaatgccttctctttccatttgccagtgttttgctaattgtgcgtttctccccttcagacggaaaatttggagacaaagtcatggctaatggcgctcgcttatgtggccgactcgcagcccaccgtcttttccgtggaagaattgcaacggtccgagacacttttgcagagggcggcactctatttgaaggtgcaattatttctgaatggcattataaatcattacattagattgtaaattatgcattttaatcccttcgtttttcgcttattggtaggctttggtcccttcggaaaaggaccaacccttttggttcgccgccgattacgtctcttcgctgcttgcttcactgaagtgcgtccgttttcttttgtcctccatcgaaatggaactgttcaccgacaatgaaatggaagagagcggaagagcaccgttcattttggaagaggtcggaagcaagggccaaattggtattgggggacaagggactgggccaatttcacacggggattttcccgatgtatacagtttaaatctaaactattttgacgtttattttccatttcaattatagtaatttttttttttgaagttgaccgaagtgcacaaaaagcttggcgaagtgcgacagcaatgggtgacactgtgcagcaaatcattcgacgccgacacacaaacgctgctccaaatggctctactgattcgaatttgtctgctgttggaacagtacttggactttctgatcgctcccaaaaaggagcgtccgatgtacagaaaatattccaatggaattcaaaaaatttttcttttttttgcccttttaggcttaacgaaatccgaattgaggatttgggggaaagcacgcagaactgcattccgagtttccagaccagaaaccttttcgcgctgatctgttggctgcggggggaactgctggcatttcacaccgacatggcaaagcaacgcgaactcaaaaccgtagggacatattttacggcacttgtgcactttgccatcccccctcccaataaaaaaaatttaattttaataaatgatgacttatttttcgagaaaatattttaaaaagttaattacaatttttgaaaattttttttctgtcattttttagtgtcttgacaatctgcgcaatttgctgaggcaattggtcgattttcccctcggattgcctcgctttttcttccaaagggtgcaatttacgaaaataaaagtgagtggaaatgaattccttcggcttcatttttttctccatttttcgttgatcatttcgccccaaccgtcggacggacgcggcgtttaccgcgtgtcatcgatggaccttttgccggtgatcattgagggggtcatcgaatcgaacaacaaaaagcccatcgaaagtgtttgcgttgtgctcactttgcgcagggacaacacggcacgtcacaaaattaacaataatgagggaaatgccatggccaacgaataattatttaggcacccaccgaaaagcgacaaaacattcaattggagcagggcgacaactatttcaaggcacaatttctgctcaaaattgtgcatcaggtggagaagaaacgaaatcatttttaattaagcattttattaattaatgtaaattaatttttgatagggaaaagttccattgaattaattatcagaaaaattaaaatctaatttgacaaattggattttcaaatataaaaatatatcaattgtttatgatttctttggaacatttttaaattcggaatgtactcagtttttgagaaaattaacttttctttttgtagaaggccaccaaaataagcgcaaaggtttattttgtggattcggtcaccaaaaagcaatggtgcgacgagtcggacacggccacactgacggtggaacttgcggacggaacgcattgaaaacgatgatgatgaccaattagtttccattgtcctccgctgaattttgtcatttttcaaaatattttttaatttattttgttaaattttgatcacaattttgaaacgactctctttaaagttgcggcggattagacaaaaaaaaaactttcaaatcacataaaaatcccgtcagtttttttcgattactttttaaaattaacaaattccttcgtttgttttgttgatgccgaaaatagactttggaaagaccgtcgtggtccatcggcggagtgatcgatgcccggcaccgccggccacccgtcgcccggtggggtttttactcgccaacctcaatgccccccctccccccggcatcgtttcgccaatgccaatgattttctgccagccgaccctcccccccccccctcgcatggtcatcccctattctccccttgtgcaacccctcgaga

SEQ ID NO: 4951 - DNA, 6337 bp, Heterodera glycines
tgttgtgtccgagcaacagttaaagggaatattgatttattccaaataaataaagaacagaaaattgggaggtcaaaggacaaataataaatgcagataaattaaatgacaaatgaatggtggaaaaagcaaaggaaggggaaataattccatatttatgggcagtaaaatgggcgggaaatgtgggcatttaaaattcaaaatatccacttaaacactacaattccttcccccttctttgagcggaatgcgcctcacgaggggtcaaaaattacccttttcttccgatcgcgagttgatcggcgcaatgcctgatcaggcacacctccctcaggcgcaattttctgccgaatttcttggcgtggactcccaatcggaattggttgcggttgttgttcgtcgtccgattccgcatctgcctcactttccgattcggactcctgatcacgattgtcagctgtcgaagtcaaatcagctttgagctgatcaaaatgccggcaccaaactccacgggcggtctttacacggaacattgctgctccaatcttttctaagattcgtccctgtatccattttggcccaccatggtaatttcgcgcaaaaatcggctgtccattttcaaaattcttcgctttaccagcctttttatcataattccttttcattctttcgccgcttttactttttgccatttcgggttgattcccctgtgggtttggttggactaaatccaataatgtcctcaatcgccggttgaaaagcatttctgcgggcgaaacttctgttgatgcatgcggcgtgactcggtattgcaaaagaaattgcgaaactgccaaatccaaaccaatggaatcgcccatcatgtgccgaagtccatttttaaaagtctggacgaagcgctcagccaatccgttgcttttcgggtggtatggcggcgtcagtgtgtgttcaattccgcgtgatcggcagtagttctcaaattcagccgaggcgaattgtcgtccattgtcggtgacaatttgttgaggcaatccgtgtgtgccaaaaacaattcgaatggcctctatcgttgcattggccgtgatgttcttcattttgatcacttcaggccattttgatttggcgtcgacgatgatcagccacatgtgtcccatgaaaggaccacaaaaatccatgtgaagtcgctgccaaactctgtcaggcgtttcccacggatgcaatggaaccttcctctcctcgggtgcatcagattggcaatttctgcacctctttcgttccatttcgatgtccttgtcaattcctggccaccaaattttctgtcgagccaatgctttcatccgaacaattccagaatgggtggcatgcaaaagttctaacatttttccgtgaaattttctcggaataactgttcggtttcccaacatgatgcatccatttaccaattccaaactgtttttgttcggctcgaatggcttcagctgatcactttcgacctttttcggccatcctatttcaatgaattctttgaccttcttcaaaatttggtcttttgctgtttcactggcaatcgattttgcggtgacaggcagcgagtcgatgttttccaattgtacggctctcacttctgcactgtccaaatcaatttttgctatctccggacatggaagtcgcgatagaccatcggcatttccaaattcttttgttggacaatattcgatgtcaaagtcgaagttcattaaaatgagtgaccaccggtgcagccttctcgccgccaccacgggtatttcactttttggcccaaaaatctttttcaacggttcgtgatccgtctgtagcacgaattttcggccatacaaaaattgtttaaacttttcgactccaaaaataattccgcggccttctttttcaatttgcgaatagtttcgctccgccgcattcaatgtccgtgatgcataggcgatgatgacgccttcctttccattttgttgacttttatggaaaagaacggcaccaacgccataatcagacgcatccgttgccaagtataatggctggccgggatcataatgaacgagcacttcggttatgacaaaatttctttaatcctttgaaatgctttctgctgttcacttccccaatgccacttttcttccattctccgcaattggtttaatggctcggaaacggtagccattgcgggcacgaatttgccataataattaaccatacccaaaaaggattgaagctcctttaaattttggggcggtggcattttgcgaattgcttccagcttttcctctgaagcatggactccgtttttgtccactcggtgtcccaaatattctatgctttcacgcataaattcgcatttgtcccgtttaactctcaatccatttgccttgagccgctcaagcacctgcgtaattcggcaaagatgttctgcctgtgttggtgctgtgatcagtatatcgtcgagatacactgccactccttcaattccttgcaaaatttcgtccatgacctgctggaaaatcgccggtgctgacgctacgccaaaagggagtctcgtaaattggaacaatcctttgtgcgtgcatactgccaaacacttttttgcttcatcatccaacatcagctgcagataggcgtctttcaaatccacttttgaaaatttctgaccgccatttagcacactgaataggtcgtccggtcttggtagtggatattggtgcacgtccaaccattggttgacggtcactttgtaatcacagcagagccgaatttttccgttcggttttggtacaatgaccaaaggtgtggcccaatcactgttgttcgtcggctccagcactccctgctgtacccactgatccaaaatcttctccacttcggctttgagcgcaaatggtacaggacgagccttacaccttttcggttgcactccaggcttgaatttcaatgaaatttgacgagtgcatcggcccaattcgtctcgaaatacttcttgaaatttttcgagaattttgtccacctctttctgatcattattcgtggatccgatttggattgcgttaatgccgaatgctttgttcaaatcaatgcgcagtccgcgaatcaaatcacgaccgcacaaattcctcttatttcctttaaccacataaatatccgtgttgatttgcatgccattgtattccacatttacattggccatgccgaggacgcctttgatcggaatgcccccataagccagtagtccttgactttccttcaattcgggctttccaatatggctccaatcttggctaccgatgattgttacatctgcaccactgtccaattcgaattcggcatttcctttatgcactttgagttggatgaagctcggcggaacagtctcagttttagccgactctcgctccaaactcgaaattactggtggcttctcatcgcactgcagctgaatttgcttcacgcgattgctgcttttccatagccgactttccactctggccgggtttttgttgcctccatttgtcctgcatacaatcgcccaatgtccgactctcccgcatttggtgcatttgtcggctttgccgggacagatattagcccaatgtccgcttcttccacaacggtagcatggcttactgtcggcacttttgctattgttggttcctttggcgcgatcatatcctcctcctcttcctgaaattttggccacattgcctttcaatgatttcaatgagtccgatccaatcgcttgagcgtccacatttgattgctccagcacaactgccaattcgacggcatctttgaatttgagatctttgtccccttttttgatcagttcggcacgaattgagtcgtcgacaattccattgacaaataatgcgcttaagcacatgtcgatgctgtccttgccccactccgttttggcaataagtgaacgcaattgaatggaaaagtcgcgaatcgattggccggaatgttgcctggcggtgaacagctcgtgcctccttgccgcaattgactttgcttcgccgtaacgctcgcacatcaatgctgtaatttccgcaaaatccatatcacggatgtcgtcaggctgtgccatcattcttaactcatcataaattgggccaatttcggtgaaaagcaatagctttttcatctccgggtcggtgatccctctgagcttgatgaaaaaatcgaatctttccgcccaagaatcccatgacatttcctgtgaatatgctcctggtcctttggccgatttgattttgttgtcttgctgttgttgagccatcgctgcgacgttttaaaccgtatatcacggaaccttacacaacacgagtgtttcggtttttcggcgaatctgcgaaattgaaaagtcaacacgagacttattcaatttcccaacgaaaattgttaacacgaaacaattttcgtaaatgttgattgctgtttgtgtcgcttttatgctggctttgttcctttgctgactgcgccaatttactgttgtgtccgagcaacagttaaaggaaatattgatttattccaaataaataaagcacagaaaattgggaggtcaaaggacaaataataaatgcagataaattaaatgacaaatgaatggtggaaaaagcaaaggaaggggaaacaattccatatttatgggcagtaaaatgggcgggaaatgtgggcatttaaaattcaaaatatccacttaaacactacaattccttcccccttctttgagcggaatgcgcctcacgaggggtcaaaaattacccttttcttccgatcgcgagttgatcggcgcaatgcctgatcaggcacacctccctcaggcgcaattttctgccgaatttcttggcgtggactcccaatcggaattggttgcggttgttgttcgtcgtccgattccgcatctgcctcactttccgattcggactcctgatcacaattatcagctgtcgaagtcaaatcagctttgagctgatcaaaatgccggcaccaaactccacgggcggtctttacacggaacattgctgctccaatcttttctaagattcgtccctgcatccattttggcccaccatggtaatttcgtgcaaaaatcggctgtccattctcaaaattcttcgctttaccagcctttttatcataattccttttcattctttcgccgcttttactttttgccatttcgggttgattcccctgtgggtttggttggactaaatccaataatgtcctcaatcgccggttgaaaagcatttctgcgggcgaaacttctgttgatgcatgcggcgtgactcggtattgcaaaagaaattgcgaaactgccaaatccaaaccaatggaatcgcccatcatgtgccgaagtccatttttaaaagtctggacgaaacgctcagccaatccgttgcttttcgggtggtatggcggcgtcagtgtgtgttcaattccgcgtgatcggcagtagttctcaaattcagccgaggcgaattgtcgtccattgtcggtgacaatttgttgagcaatccgtgtgtgccaaacacaattcgaatggcctctatcgttgcattggccgtgatgttcttcattttggtcacttcaggccattttgatttggcgtcgacgatgatcagccacatgtgtcccatgaaaggaccacaaaaatccatgtgaagtcgctgccaaactctgtcaggcgttccccacggatgcaatggaaccttcctctcctcaggtgcatcagattggcaatttctgcacctctttcgttccatttcgatgtccttgtcaattcctggccaccaaattttctgtcgagccaacgctttcattcgaacaattccagaatgggtggcatgcaaaagttctaacatttttccgtgaaattttctcggaataactgttcggtttcccaacatgatgcatccatttaccaattccatttaccaattccaaactgtttttgttcggctcgaatggcttcagctgatcactttcgacctttttcggccatcctctttcaatgaattctttgaccttcttcaaaatttggtcttttgctgtttcactggcaatcgattttgcggtgacaggcagcgagtcgatgttttccaattgtacggctctcacttctgcactgtccaaatcaatttttgctatctccggacatggtagtcgcgatagaccatcggcatttccaaattcttttgttggacaatattcgatgtcaaagtcgaagttcattaaaattagtgaccaccggtgcagccttctcgccgccaccacgggtatttcactttttggcccaaaaactttttca

SEQ ID NO: 4952 - DNA, 1016 bp, Heterodera glycines
gaaattcagacattcttccaaattttaaatgtttatttcagggattcaccgggaacggatctggcgcacatttcgcggacaattaattatgctggttttttgatgtttgatgtttcatttaatcctaaacttttaatcgcactcaatactattttttctcacattcatttaaccatcgttaacggatacctaactttgtttttgtttgaaatattcatttttgccaataaatatatgcatggataactgtatcatgtggtgtagagcattgagtatttattctttatttatttgccgaattttataaaaattaaaaaaaattgttttcggcttgtgaatatttaaactatcttctaaacaactaatgctattttgaaatgacactagcctttgttgacagagaaaatttgttttgaactagagaccggcgcgggacgggatcccgcgcgggattttgcaggatcccagtccgcaatcccgcattttttggaaaatgcgggatttgcgggattaatcccgcgggatcccgtcccgcaaaaggaattgagttccaatcccgcagcgggatccgcaaatttgattttttgtgcgggattatgcgggattttattgattttttgaaaatttttctaagacagaatgccaaaaatttttaaataaattaaataataaatttaattaaagttaactcatttttcatcgcaaatttcattcaaaatttgtgaaattttcccggcggcacctatcggcaccgccggaccctaaaaatccctatttttcttgcaaaatttgctcaaaatcgcaaaattttgtaattttttggacaaaatctgttaacaaaattttcccggcggcgcctatcggcaccgcaggcccctcgtttccccaaaagttttttggaaaaagcgcgccgtaaaaaacgtgtaaatagtcaagtcattccttttcccaaaaatgttctaaaataatgaaaaatgacaaaaaaagattttgataaaataattgaataatttttt

SEQ ID NO: 4953 - DNA, 2807 bp, Heterodera glycines
tgtacagcagtgcggttggccaaaggcgacatttgtgcatcctgtggcagtgttcagtggaccgcagcaatggaaagcgggggtgagtaaagttcataaaacgggggcgggggcattcgtggagggatggaacaaaaaaaggactgtcaacatttaaaaatggaaaatggcattttctgggaatgacgggggcgggagagatcggttaacggataagcgggtactgctccaccccgacctccattcgtccaccgcattcccccgctcccactcattcatttggacattttctaacggccaatctgcaccgctccccccccccccccattatttcatactcattttaaatgaaattttgaatttaatttttaaatttcagcacaaaattcacaaaatgttcaacggtgagcaacaaaacgacggaaatgacaacgggcgagttgtgcgcaaaccgccacgccgctctcgcaatgccaacggcgacgtgccggcaagttcaaaattttaaaaattgaaaatttcattaaattttaattttaattttccccttccttttcctaaaggaaagcgacattgtgcggaaacgggcgcggcagaacagcacgagcaacagcagtggcgccactcgaggcactacgagcagtcaaagtggcggcggcggcaatgactggccggctttcggcggcggcaacaacaacaacaacagccgccgcaccggcacttcagcgctggacttggacatgctgctgatgccacagatggtcagcagcgacagttcggcaagttttttttgtgggttcttggccaggttttcggggccgctgatcataacaattgggggtttaattaagccctctcctcctctgcgctctgctcaagcggaatttgtacaaaaaatttaatttttgagtttcagcgcggttcaacgagcgctgccgctgttgtacaacaggtgccgcagggaagcaacgcgacttcggctgctgctgctgtcatgccaatgtcgtttttggacaacaataacatcaatgtgagtgtttgggggtgcaattggtccagtgacttatgttaaggcttttggcctcattaatttttggaaaataaaataaatttttaaaatttacagttgccggtggctttctcaagtggcagcgatggaagcggcggcggcggcggtgcattgacagtggcggggcacatgccgtggggggtgagcattgttttttgggggcacgcgaatgaataatgtccccattttaactccttttcccccgttttcagctgtcgacaactggtggcggaagtggtgaaggcggcagtgtccagcatttgcaaaacttggtctacatggcgggtgtgccgcagagcgcggggcaagcgcaggccgtgacaatgacgacggcggcggcagcgacttggacggccaatgtagggtttgaccaggaatttggggggttgctatccgagataatggttaacctagagacttatttttgccgactctggccccccaaaatggggatgggtggaccttgtcctgagctgtcctaattttaaaaattttcaagtcgggcacatttgtcagcggcggatgtgggggcactgtcgttgctggcggcatgttcgggcgcgcgagctgtggtggcagtgctggtggtgctagtgtatttggaggaatgcaggtagttgggggagtgaacgggaacacagttggcaaaatttagtgtgaatttaattaaaatttttcttcattttcttaggccctcccaccccacattcgtgatgccatcgagcgggttcacgcaaggcaaatgcagaagatgatcaccgttcaacccgacttcgccgacattttgccgccgtgtgccgacaacgggatgtcgagcctcggatggctcatgctggactggcaagccgacatggtcatggggtaagccagaattttggtcacttcatcaaaatgtttatgcaatgccccccattgctttttaaggcgtgtcgttggcattgttgtgttgtgtggcccattcacaacagtcagcgggctgaacggcttcgatgtgcggctgatgttcgaccacaacaacgcgcaacaagagatggctgtccactgttgggaggagtgcatgccgcgtctcgccaacaacattcagtgcggtgccgtcgtcgaattttgtcgcctgaaggtgcgcgaacaagggaaaaacaacaaaggcagcttccccttcacgctgctctacaacaacgagtcgcggcaccgcattctctccgcgtccagcaacatcagtgcgttgctgccttttttcatattccaaattgtacgcatttcacacaaacatttccaggtgcgaatttgatgagcagcagcaacacgccgatcattgtggaggcggtggaacagcagcagcatcttgcgggcagcagcatcacagctagttcccgtccatcttctgtaaccggcaccactgccattgccagcagcagccatcacagcagcatgtccatcacagcggcccaacagaacacccgaggcggcggcggcagccaagacgtgcgcgtggcaaaaaacggtaagcagcggcaaaagcattactgatcagcctatgcaaagcgctcttactgatccgatcacattaaaaattatacacaaaaataaattttttcaggcaaagggaaaatgcgaccggacgtgccatgagcagccaaagtgaaggacgaacggaccgaattgcgaccggcggccaattttgaacatggtgggtgcgcaacacgtcctcgatgccgagccccagcatgatgatgatgaa

SEQ ID NO: 4954 - DNA, 6283 bp, Heterodera glycines
ggaaaaacaacaaaggcagcttccccttcacgctgctctacaacaacgagtcgcggcaccgcattctctccgcgtccagcaacatcagtgcgttgctgccttttttcatattccaaattgtacgcatttcacacaaacatttccaggtgcgaatttgatgagcagcagcaacacgccgatcattgtggaggcagcggaacagcagcagcatcgtgcgggcggcagcaccacagctagtgcccgtccatcttctgcaaccggcaccactgccattgccagcagcagccatcacagcaacatgtccatcacagcggcccaacagaacacccgaggcggcggcggcagccaagacgtgcgcgtggcaaaaaacggtaagcagcggcaaaagcattactgatcagcctatgcaaagcgctcttactgatccgatcacattaaaaattatacacaaaataaatttttcaggcaatggaaatgcgacggacgtgcatgagcagcaaagtgaggacgacggaccgaatgcgacggcggccaatttgaacagtgtgggtgcgcagcgcgtcgtcgatgccgagcccgagcatgatgatgatgaagagggcacgagcgaaacggttagcggaaaataaaacgaaacgcaaagaaatgaaacgaaacgaaatgatccattgtgacatacacacacatacaacacacacgctcgcatttatcatgacaataaataattctgtcttttcacactttctcataaatcttttttttacaattttgctttgtaaatgtttttttgttgttgtggaaggccatgaccgttttttttggtgcatgggttccaataatgcgggcgtgttgtggcggtcatgcaattttcggaaatcaaaaaaaaaattcgttcacattttcaaaatgctcatttctctgtaggcatggctgtccacagcacgccccccgccgccatcatgtacaccggttggccgccctttttgccaccgccgccgccgtcgtcgtcttcttcacagcatttcgccgccggctgggcccagtcatggtcgtcgttcgtcgccacctccccagagggcctgttcaatcagcgcccagcgcaacctgcacaccgtcgtgcaacgaatcaacgaccttgaggcacaagtcgcgcgcgatgagcgcaacgcgcgtgaacgtcgtcagcgcgctcgtcgtcaacaactgctgttgcagcagcatcagcacatgcctttgtcgtcgtcatcgtcgccgtctccgtctcctcatcatgttgccaatgccgccgaagcggacgtcatcaccattgacgatgtcgaaccgctcgggctcgcgcagcaacaacagctccacaggggtgatgcgcggtattttgcgcacgaattgatgacactcgaagatgaagccggagcggcggagatgatcatcctcgacaatgagccactctcggtggccgaccgagagtggctcatctcaacagccttcaaaatgcggcagcttccgtcatctgtcaaaggcagcgttgaggtggacgagaatggcaacagcaacatcagttgttgcatttgccgcgactggatcgtttcggacgcggacagcgtggtccggctcgcctgccagcattttttgcaccgcaagtgttttgctcaggaagcaatgcggcggagcatttgtcctctctgccgccggcactttgtgactggcgagacaatgccgacaaacgaggacggcgggaactgagcgcgcgaaaaattcttttgacattttattttttttcatttgccaatcatttttttaaaatttttttggacatttctcaaaattttgttgccatttcaaattttctcatcacttaaataaaatttcttgttaaaaattgtaccctaacatttaattaatccatagcgagtgtgtatgtgtatgtgtgtgagagttttctgtctttaattttcgacataattaggacaatgcggaggagggaggggagggtattaagcatagggaattgtcgatttgtcattatcaataagccgtttagcgtcgcaccgtgtggccacagattgggcgggggcgaacaccgaaggaccaccaccaccaccaccaccaccaccaccaccaccaccaccaccgacaatggcactggcagcgacagcagcaatgcagaaaccgctgagaaccacgaggacgacagtgcacagctgggccgttactgcaaggtggttggcatatgggagcgcaccgagtgccgaagtcgcaacactcggtgtgaggcggttgaagtggcactgaatgggtgggcgagtgcgcggcgcccggacactttgctggcgcaatgcattgcgcatctgttggaccgagtattggccgggcgggtgcgtccgctgcgcattggcatgtcgtgccagccgccgcagttcgcctcgccctaccacatcccacaccgcgctccggagcagaacaccgccgcagcaatggccgctgagttggagcggctcgccgcgcagtcagccggcggcgtcgacctgttcagtggcactgtattgttccgcatcagcgccgtgtggccattggagcgcaacagcggtacaaaggaaggggagggaagggtggaagtgggtggggaggggggtggcagctgattttggtccacttttggcactatcatttgaccgcacaggcgcgggtgcttgtgccgcggatgagcgagaggcacggggcagtgtccggtgccgctcattcttcccggtggtgaacccggatgacgcgtggtgccttgcgcgtgccgtcgtgttggggttggccgaccggcacttccagcacctgtacggtgccgacagccgacaggcgttcacgcacctgcgcaccttttggctcgcacaacatgggcatggcggtgagcaggcggcccgtcagttgcttcaatccgccaccctgccgctggatcggcccagctacggggtggcggaagctcaacgactccagcacacactcgactcgcggctcggcgcgcagcaagtgcgactggtcatcttcgagcgggagcacggctgtcgcgtgctgtggaaggccccgaatcgggcacacttcaacatttgcctgctgctgcaaaggagtgcccactacggatacattcagcgtccacaacaactttttcgggtaaaaaattttcatttcattttgtaaagaaacgaaacgcaaagcaacaaaacgcaatgaaaaaattcaaagaaagaacgaaccgctaagaaacgaacaattaattaattaattaaatacgaaaagcaattcaacgcaaagtaaaaatttaaaaaataaacgatagtaaagttaattaaaaaccaaaaagccaagtaacgtaaaaaagaaataaatgtaaaaagaaatgagtcttaaagagctatcagaaattgagaaaaatgtagccaaaaagtgaaatgaaacgaaacaattgattaattaaatctgaaaagcaattaaaagtaaagtagaaattcaaagaaagaacggaaacgaaacaaaaaaattaattaattaaatctgaaaaaacaatcaaacgcaaagtagtaattcaaagaaagaactcaaacgaaacgaaaaaattaattaaataaatctgaaaaacattaaacgcaaagtagtaattcaaagaaagaagcataaacgaattttatttaaatttaattgttgaataacggaaatgtaaagcaaatcaaagcagagtgtaaaaaaagcatggacattcggaatcaaaaaattacacttctttctgtttctaatttcaaactatttccccaggcgaaacagtattgcgtcgagtgcgagcggcccgtgcacagacgctcgcatccgttgggctgtcgcgccgtgtgtgggctgtgtttgcgctatgatgcgctgcacttcccatgtcgccgggatgcagacacgccgcagggcgggctgttctgtgcacagtgccgctttgtgttcccgaatgcggactgttttgcgacgcaccgtcagtgcgtggacccgccaccggcgcttggtctgctcggtggcggtggtggtggtggtggtgcagtggtggaccggcgccgtggtcgcccctatcgctcaatgtgtgaggagcgccggctgtgcgcacagtgcaatgtggtggtgtgggcccgttccggcgcacaccactgtcgtcgacatccgcagcagcagcagcagcagcacgtgcgtgccattgctaccgcatcaacagctgctccaatggtaccgccggctgctgctgctaccgtagcaacggttgcagcagttggacaacaacaacaacaacaacagcaacaacatcattgtcaaaaatgcggaggtccacacgatgccagccgcacgccgcactttgtccagcccaagcagttcgctcgccagtgtcagtggcaacagcccaacaccaacggcattgctgatgatgctcaaggggagcaggacgaagacgaggaagacaatgaatcggacggtgaggaggaggagggggccgatgccacccgtggtcagcggcagcaacagcggcgcgacaacaaagcggtccggttcatcttttgggatgtggagtgtgcccaggagcgggtggtgcagcagcagcagcagcagcagcaaatgttgcaggaaagggtcgcggacgaatggccagccgaggggggcgacgattacgacgacgacgcggacgtgggtggcattggtgatggagaggcggcaccagcggcattcgaccacgctgtgttgctgaagcacgtgccggtgctggtctgtgcggaagtgatttgtgagcggtgcatcgcgcacggggtggagctggagcgggagccgttgcgccgagcaccgcgctgtcagtgtggcgtgccgtggcggggcgccaaccgtcgacgctggtgctcacgcatcggtgaacagttgttcgacgacagcggcgtcgacattggagcggatgagctcggtgtcgtcggacaacaactgccgttggacgggctgaacccgcgtcggctgcgcttcttctgcgacggggagccaggcaccgggcggggcgcgatggagcaatttgtcgactttatgctccacaccggcccaaaaggtgtgcgcaccgtgatgcttgcacataacggagtaagctttgatgcctttacaaatgcgttcataatttattgttatgctgcttttctctgtccgcttagggccgttacgacatccatctgttgctggaggagttgcagcgtcggggtgagcggccgcgaaaggcggttcagcatgggttgcgcgtgtacatgttggagttgcgcggcacgcaccagcgggagctgatctgcaaggactcgctgaactacttccactgtgcgctggccaccctgccgcgcacgtttgggctgcgcggggtgccggacaaaccgttcttcccctaccatcacatccacgcgcgcaacctggatgttgagctgccggccggcacgctgccaccacctgctgcctacgacccggacaggatgcgccccgagcaacgcgagcggttcatggagtggtacgcgcacgagctgcgccggcccgggcgccagccctttttgctccgccgcgagctgctccgctactgttggaatggtaggggcgggggggggggggggggagcacaacaaacacatacggctatacccatttatgcatttagatgtgaaaattttgcgcaccgcctgcctgcgcttccgcgagctggtgggggagtgtgcggacggcatggaaccctttctggccgcaacaacaattgccagcctggccatggctgtgttccgccagcaccacctccgccccaacacgatggtgcacacgccggagggcggattcctgcgcggacgccgagcatcggtggagtctcggcgcttcttcacgctgctggccgccgtacggcccgacctgggcccgcttcgcactgcccgctggtccatcggcgaagctgttgtggggaacagcgggcgctcctaccaccgccgccgccgcgacaacaacagcaccaacagctgtgccggcgccgacgatgacggattccggctcgactgcgtggcctaccgtcatccaccactgcgaccgttgtgcatcgagttcaacggctgctacatgcacggtgggacacacacacacacacaacacacacttacaataatgttttaatttctgagctcaattaaggttgtcgggagtgctaccccgaccggcaaatgctgttggcggggggacgcagcgcggagttgctgtgggcgcgcacccagcaacg

SEQ ID NO: 4955 - DNA, 2738 bp, Heterodera glycines
cagcttttccattgtccattcgttcaccaattcgaatggcaccatttgtattgacggcgcacgaacagtaaaacgaatttcgtaattgacggaagaaatggcattggcacgaagaaaatgctaataaaaaacgacttttttacatttccttgaattttcttaataatttttttcgaatttatctatttttttttgatttaggctaggtaactaaattttaaataatttttttaattaaaataaaaatttgcggctacgttttgtcccccccccccccccccccggaccacacctccttgaaattgttgatccaatcagtgttcgtttgtgcgttgtaattatcgcaacacaatcgcttgggttgtccatcttttctcggagagtgcaaccatttggacaatgcttggccagcagaaattgttgaaattggcccatcaaaaccatcaccaatcgcagcgggcaacagatcaaatgaatggattgaaaccaattggttaagatcgatgagaattgtcggcgaaatttgacgaagcaaatggtccaaatgatcacgacgggaaaagcccaagtggcgaatgttttcagaaaaaatgggccaaatttcacgaacaaaaatgtccaaaatccgctgggtatccatgttgagtggtgaagaaggaagccacaaatataaattggtgcctcttttgtcgaaaatttggtgatttgaacgaagaaaagcgatgacggagtgatcaatgtaactgtgaaaatggaaggaatgcttttattgtcatagctctctgatttttaattactaaatccgaaggcgcttaaaacggattttgctgggcaacggacggtcgcgcaatggaaatggcaaagatttgtcaccaatttgtacataaagtttcggttctggtcctttgtccttgcgatgaatttcgattggtctccaaattgtcaattcgcttttgccattgaaatgtttgtccaccaacgcattgaaacgtggcgaaagaagtgccaatttgaggccgagttgggcatggtcaaaacagggcaaaatgtccatccaaacgtcgttgcaaatccaactgaaataatgaaagtaaattagggcaaataagaatttttgacttttgaaattcttttaccgtcggttcattttttggtaattactaattagcacaatttggccgagttccgaatgaggtcaaacaaatagcagaataattaattaattgcgttggataaaacctggtttttagggttttcctatttttttacggattgtatttgatgaagaagcaccaaaatcacatttaacgaattttttccaaaaaatggaaaatttttgacagaaaattattcataacttcacccaaaatgaaaccaaattttaaaatattgatatcattcaataggcccaactgttttctattagcctataaagtttcaaaaagttccgttaagtttcaaaaaagttataacttgagaagctcaaaaaaccaagttttttacaacatttttggtcataactttcttgaaacttaacgaaacctttttgaaggcacgataacatttcgcctactaagccaagatctgacatttcgcctactgacacttcgcctactggacatttcgtctactaagccaaaggcttcacatccatggaaaacaaagagtgattaagaagctaatggagatgcacactttctgtgttctttgaaaaatttatttgttttttttggctaaatttgattagcattataaatatagcgaattatatgtcaaattagaatatatatttggtgaaatttgctgtcgaaagagctaggtattttaggttagcaggcgagatattcaataggcgaaatgtccagtaggcgaagtgtcagtaggcgagatgtccagtaggcgaaacgtacgcacaccctttttgaaattttgcatgctaatagaaaacaactagagctattgaatgatataaagaagtaaaaatttggttgattttaagtaaagatattgaaaaaaattgctacaattgatggttttttgaccaacatcatagcaccgaccgaagaaacggcgagcagaaaaagggaatggcacagtgaattggaatggaacgcaacagaggagaggaggaccaccaaagagaatattttgcaaaattatgaccatttgccgggcgttttaccttatccccccacccacaaatcaatcaataaaataatcaattggacggatagagagagggaaaggatgaaaatagcattggggaaggaggagagacggaagagaaagagaggaaaaggaaaaattcgaagcaagaaggaggggagaaagaggaggaaaaggatgaaaatagcattggggaaggaggagaaagagagagagagagaaaaaggaaaaattcgaagcaagatttttgccatttttatacgtccgatttatttaccaatttagacattattcatcaaaaaaggcatttgatcactgatgattatgaccggtcggtcattacttaattaattcatttcttcttctatgcccccgtgtttttttgtgtccgtttgcccctcactcatttcgccctttgtgatgctttgtcccgcttcttcgtcttctcttgctggtggtggcggagacaaaggcctaaattaagcgcaaaattcaaattcggataaaaatcaatgtttttaaattgctcacccgatgcaattagtgccacctaaaagccaaaagaacacatt

SEQ ID NO: 4956 - DNA, 3065 bp, Heterodera glycines
ctttgagcccaatttttttaagaaaaaataataattttgggggccccggcggcgggaggaaaaattggaattttggtttttttttacagattttcacggaaaattgttcatttaaaaatgccttatcgttttaattaattctatacaaaaatagttataataaaagaaaataaaaaagtacataaaattattattatgattattaaaaaattttaaagctaaaataatataattttttttgactatatggcataaggaaaaaaattgaaaaaccccgaacgatttggtcaaccccgaaccccgacttttccaaccccgacggtcggggtcgcaaccctagttcacatcattggtcccataattttcgactttttgttcaggtccggtgtttggagttggtcaaaatggatgccagattcatgatcagcgacaccgaaaagcccctaacaaatttttcatgactttcgaaaaccaaaaatcttcaaaaaggtggcactagccctactattaccggcatttgattttgtacatatacaaatttgaattttgtgcttaattaaggtcattgtctccgccaccggaagaagaaacgggacaaagcatcacaaaaggatgttctgacaaatgagtgacggacaaacgaacaaaaacaatgattcagcagcagacgaaatgaattaattgagaatgaacggccgatcataatttatcagtagggttataaattatatggactaaaaagcccgaaatatggactaaaaagctcaaaaatggccatatatggaccaaaatatggattagaaactgccaaaatatatcttttaaagcctaaaaaattcagtaaaatgtatttatattcaatatttgctaaaacagactcaaaaataagcgaaaaactgcacaaaaatggatttaacatttaaaaaattccaattttattaaattctagcttcacaattgcaagtcaaatactttcaaaatttttgtaataatctcattctgtttgcagcgaaaattttcggaagtgtggacaaaatagctaaaaaaatttcaaaatttcgaaaaaattctctttttaggggtgtattttttatttccaaaacatagatctttagtggtgtagattattcatactacatttagttattttcgagatttttatgcttcaatttaacaaatttgaagaatttgtgaaaattttgcccccaatttggaaaaatttatgtgcatatttttcactttttatgcgcatagtttaagattttatgtgcatttaattaccagccctagtaatatcatgattcattttcagatttttatttaaaattttcttattttaaaaacaaagttgtgtcaaaatgtttccatcccttccatttttggcaataatttttcgtctcccattggcacattgtctaacccatcggtccattttcgtgccttttttcaatttttgatgcctattatatgtaaatagtccttttttcgcgattttttggtgcctttttagtcgtgtctacaaataacttattgaattaataatcaattcgaccagttcacgggaagcggttaaattctgaaaatggggtgtgtcctgattttaatgacaagcactgtactgttattggaactataaattgcgtatgaaaaacttcacaccctgaatttttctttttaattgatacataccagggatggcattccgaggccctaaaaattttcgaaaatcggaattccgaccccaaaaatgtcggaattccgtgccatccctggtacatacccatgggatgcatcgagacgagagagaaaatttatattttaacggaaaacaacaacaaatcagagagtaaaaacgagcataaaaaatggtcagatcactcttattcatcaccataattcaaaatgatcgaacatttctcaaatgcattaaatcaccttcaaataattggacaccatttgcgacgtggcgacaaaggcctaaaaattcgggaaccgcccaactcgtcgcggccaactcgccgcggggccaactcgccgcgcgctttctcgccgcgaggccaactcgccgcgccttgttttttggcaatctcgccgccagaattttttcgtttaataatacattaaaagcaaactttattatgtatttaataagttatatttcatcaaagtttctctccaatttaatatgcttcaaattgaaagtcaacaaaggaagcaaaaattgcagaacgaatgattcctctatattttcgaaatttaatgtggatatctcatgactagggatgatatttttaggctctaaaaatcggaattcagcctaattgtgctacaaaaacatggcaataaaagcttcttccatttccacagttacatcgatcacttcgtcatcgcttttatttgggatgtttttgttcgtgaaatttggccaattttttcggcaaatattcgccacttgggcttttacgatggtgatgatttggacaatttgtgtcgtctcatttcaccgacaattctcactgatcttccgggggatggggtattccgaggtattttctgaaatcggaattccggctccaaaaacgtcgtaagtctgaaatttctgaaaatttccgaattttatcaaatttcggaaatcggaattccatgccatccctggtgtggccccacatttttggcaaatcactgtttttttgttttcaaattgtttagcattttcttcgtgccaatgccatttcttccgtcagttacgaaattcatttttctgttcatgtgccatcaatggaaatggtgccatttgaattgatgaacgaatggacaaatgaaaagttgacattggccaaagcaaaagaaaatgaattggacaaaagttggataatgaaacgatgcaaatttgggaagaccgcggcggttcattgggaagacggaaagtgggacaacaattgtaacaatgtgttcttttggctttttagtggcactaattgcattgggtgagcaattaaaaaaggcatttgtgtaataattagggctatcatttacatggaaatccatatttttttcctggactg

SEQ ID NO: 4957 - DNA, 1437 bp, Heterodera glycines
  unsure (1)..(1437): unsure at all n locations
tgttcgtgaatttggccattttttcggcaaatattcgccacttgggcttttacgatggtgatgatttggacaatttgtgtcgtctcatttcaccgacaattctcactgatcttccgggggatggggtattccgaggtattttctgaaatcggaattccggctccaaaaacgtcgtaagtctgaaatttctgaaaatttccgaattttatcaaatttcggaaatcggaattccatgccatccctggtgtggccccacatttttggcaaatcactgttttttgttttcaaattatttagcattttctccgtgccaatgccatttcttccgtcagttaccaaattcatttttatgttcatgtgccgtcaatgccaatggtgccgtttgaattggtgaacgaatggacgaaggaaaagctgacattggccaaagcaaaagaaaatgaattggacaaaagttggataatgaaacgatgcaaaattgggaagacagcggcggttcattgggaagacggaaagtgggacaacaattgtaacaatgtgtccattcgtctttttagtggcactaattgcattgggtgaccaattaaaaaaggcatttgtgtaataattagggctatcatttacatggaaatccatatttttttcctggactgtgagaggtctgaaacgtacgaaaaacatgttttttaacttggtttgaaactgctaggatggatttctatatccatatttttccatatttcgcgatttatgtccatataattgaccccccaagaaattttgttttcaaaagtcattaaaatatgtttccaagggttttctgcttagctgatcactaattcgtcacccattttgaccaactccgaactccgaaaaccggacccgaactcgaacaaaaagtcaaaaactcaaatttcgtaattttgtttaaatacatgaaaacgaaataaagtcatagtgcttcaataaaaagtcatttaaaccatttttagactaaaaatggaaaatcgaaaattttgaaatttttttcgagaaaaaatgatattagtggttttaagggtcggagaatccgaatctgacattaaatgatttttcattgaagcactgatgactttcagttcgtttctatgtatttaaacaatggttgaccaataatctggaaaccaaaaatctgaattttcgacttatgcgcgggtgcttttcttttctcaaaaggcattcattcatttcacgcttttttgatgaataaaccgagttagcacacattttgttctctgttccattacaaatcacatgttcatttgatgatgcattcattcattggtccctcccccccttcctgcagaatgggcatttttttttcttccctgaaaatttggttcgcaagtcccaccgtcatttgggtacctctcctttgttagggctaccgntcctttt

SEQ ID NO: 4958 - DNA, 968 bp, Heterodera glycines
  unsure (1)..(968): unsure at all n locations
aaatttattaaaaaatttcaaaaacgaaaaatttcaaataacttctttttgtaattgtcaaaatcgccatttatttactttgacgagctgttccaaattcgcagtgtactgaaagggggcggagattatccaatggcgacaaagaaaaagatgctttttacatcctccatcattttcatcatttggtccaccaaagagccggacccactgggggaagggaggcaaattcaaattatggggaggggaggggtgccgacgtggagcggaggttggcattgacaatggccttcatccgcttaatgttcgggcgcatttcggggatctgcgggtggagaagcaatggcaaacattggccaatttggtcacctcgagccaacacgcctcgattgccttagggacaattagcaaaggcaactcataattaggccaattcttaccgaaagcagttgcagattgtacgcctcttcgttggccgcgatttgattttggttgggaaaagtcggccgaatgatttggtcattgtccccagccatcgcaattttgttcaataattctgtggccaattctgcttttccatcttcccctattttccccactgtttagaggcaaatttcgttcatagaaaggctccattttgaacagaatttggtaaaggaccatgccgagactgtacatatcggcggattgagagccaaccggcaaatgtttggtgctgagaaactcgcgaatcacctcgggtgcttgttggacatattctacagggatggcaacaacagaaagaagcgactgattaacagacaaatgccgcttaatcactttttgaccgggagagagagaaagagagggggagagagagagggcgagaaaaaagggaggggaagagagaaagggagagaagagagggggaagaaaanaagtggaggggaagagagagagaaggngagagaaagagaggaggagagagaaag

SEQ ID NO: 4959 - DNA, 1588 bp, Heterodera glycines
tttctcttcattatccctctctctatcttccccccccctccccctccttttctccacaattgccttgttcaaattctcgttctccatgatcttcagctccttcagtctcgataggtcattctttacgggaaatgatcaatgctttccccccccctccattgatttgtcactttgttgaaggaaatgcttcggttctgctggtaccgtttgaaggcgcacttcactccgttggccaacgcctgcttggccaagagtctcgagttcgctttggacccaatgctttcgtctgcgaattcaacgctaattggacgaagggattaattggccttgccgtaccgtacgagtgactttcctgcgaccgacttcgaatggacatggactttgtctgaacaatccaaggaatgtccgggcttcgtcgccctttcccttggcaaattccgaccttcgacctctgctccaaaagtctgactttctcccgtgggattcgccaggtcatttcgtacaatatgcgctcctttctgaaagcctttgctccattcgctgcttttgacttcactcactcttttttgtggaggaaatatccgagaggaatggtcactaaacggcactctttcgcccctttctttggcattacggttcacctccgaggaaaagaatgacaccgaacagaatgtagatcagcgtgtagtcgcagagattgccgtcaaagccgcacttgggcatgtccagtggcattgagccgtccccggtggagtaataatgggacatcgtttcgtgcgccaccttttcgggaagagtttggccctccctcccctccccccccaattagtgacgtgttccgagcagtcattctctgacatggcacacttcagcttgtcgcccaaccgagccgtcagttcgaccacgattttcattgtgccttcacagttcggcatttctttcctcttttggcatttcccccccccccaccatttttggtgtgataagtcgcgtaactcggcactcggattgccttgttattcatcagcacttgccccgtggcgccttaatattctctgttttattccgtttttttgtccattgccaaaaccgatgaattgtcgtgccgtcatttttttccaaatgtaaagtccgtccagaaaaacgctttggtttttcgtttcttcataagcatctcttacggccaatccgtacagaaacagcgcatcgtacagagacatataagcgaggatagcatactgtaaaagcaacggtgggcagattactgtaggacagagagacgagagatgagagagagagagagagagaggaaaaaaagaagaaaatattattggggagagaaataaagaaaaaaagataaagggaaatggaaatggaaagtgaaataagaaaaaaagataagggaaagagaatgaaaaagggttaaatgagttggacttacatacgaactgatcattccggtgacctaaacaaatccaaacattgtttcttctatcagttcataattcggaagactcaccttattcagacgcaattcgaagtcctcgatgaatttcttatcgtagccatgggcagtgatcaccaattg

SEQ ID NO: 4960 - DNA, 4104 bp, Heterodera glycines
atcagcgtgtagtcgcagagattgccgtcaaagccgcacttgggcatgtccagtggcattgagccgtccccggtggagtaataatgggacatcgtttcgtgcgccaccttttcgggaagagtttggccctccctcccccccccccaattagtgacgtgttccgagcagtcattctctgacatggcacacttcagcttgtcgcccaaccgagccgtcagttcgaccacgattttcattgtgccttcacagttcggcatttctttcctcttttggcattccccccccccccaccatttttggtgtgataagtctgacatggcacacttcagcttgtcgcccaaccgagccgtcagttcgaccacgattttcattgtgccttcacagttcggcatttctttcctcttttggcattcccccccccccaccatttttggtgtgataagtcgcgtaactcggcactcggattgccttgttattcatcagcacttgccccgtggcgccttaatattctgttttattccgtttttttgtccattgccaaaaccgatgaattgtcgcgccgtcatttttttccaaatgtaaagtccgtccagaaaaacgctttggtttttcgtttcttcataagcatctcttacggccaatccgtacagaaacagcgcatcgtacagagacatataagcgaggatagcatactgtaaaagcaacggtgggcagattactgtaggacagagagacgagagatgagagagagagagagagagagagagagagagagagagagagaggaaaaaaagaagaaaatattattggggagagaaataaagaaaaaaagataaagggaaatggaaatggaaagtgaaataagaaaaaaagataagggaaagagaatgaaaaagggttaaatgagttggacttacatacgaactgatcattccggtgacctaaacaaatccaaacattgtttcttctatcagttcataattcggaagactcaccttattcagacgcaattcgaagtcctcgatgaatttcttatcgtagccatgggcagtgatcacaattgtgtcgtcaaaggctgatctgcggagtgatttttcgtctttgtccccctcaacttttccctccatcggtgtgatggatgaacaatccgtcaatcttccccccccccttttgccaattgtccccttccgcctcccccattttcccattctttttgcctcgtttcctgcttttcaatgtttgatgcctcccacggatagtgatcatgaagctgaacatggagaggataaagcataatttactctcataattatttgctcacatgggcaagccacgggataatgtacacgtaatcgggcgttttcatgtgggagcgaagtgcagcgatcataaacgacttggcactgtgaagatccatgcccatctccagcataatgactgaaatatgccaacaaattgagttggtccttcccagaaatgacttcgcgcgcgatttcgcaagtgccgtaggcgccccgtggcaataatttcgtcgggtgtcatgtacgggtccaactcgatctccacgttgatctcgatgttggcatctttgaggtaattgcgcagggaatgcagggaaaggcgctcgaagtgcacactgggccgaaccaagccgacctttggcacgcatttgcgaataattgattataattaattaaaattaattaatttgcatttactccttcaaaaaatgttcacctgtttccaaccatacaattgtaaaaaggtcaatctgaacagatggaaaataattgacaaaacaaacgcatcgaattccaagcacattgcccgcgccatttcagtggccgaagtgagcgcaacggagccaagcgtatcgaacactttggaagaagtgaaatgtgaaaaaggaaaaacgaaatggcacgggaaggaatggcacggaggagagagaatggcatgtaagggaatggcacgggaaggaatggcacctgcgcgatcggagagagcatcgtcgcctgacaaatgggcaatgatcggcacattccaacgagagaccaatcgaccgatgattagcatttctaaaggacgaaaagagcggagaataaatttgaaatgataaaatatctggctttatgaaaatgctgttgcatttccaataaaatgtcctttttgttcgattgacttgccattgttgcagccggggccgaaataaacgcttgtctaagggggggggacgggtaaagggacggaattccgtggctttgccccactcacatttttcatgtagtgcaaataggcggcgtactcaactccgctgaatcggttgcacgattccatcgtaaacaatctgaagacattaattaggctgatcagcatggtcaattagtgctaattgggcgtactgtagccgaatttcgcgcgggagaatggccctctctttcatgtcgttgtaacacctgcaacttttgacagttcgttcatttgttctttttctgtttgttcattctttgctcacatttccaacacttgcggttcgttaatgatgctcggattgttcggctgaagatgggcgactttgatgacaatgtttgggtgggccgaaggtgcccaaacggagaggagcagaagaagcaaactgacaatgagctgtggcacgaaggccagcgaaaaaatcattggctgaggaaacggtagaagagtactgtacgagtgggagaatggccaaatttgaggtagagaaacaattttggtgtcggcaaaagaaaatgctgaaaagcagattgatgccgccgccttttgggcggagtcgactggagcttaatccgtcaattagcacacttttaatccttctcttcattcctgctatatgaagaagacgcattaacttgaaatgtgatgttttgttgaaaagcttttgctggacgatgccaaaaaggggcaaagggaagggacggcactttaaaagacattggaaataattaagccaatgaaatgataaaataagcgaatgatttttttcaatttaagtgttcgttttcctttttttgttgcctctccaatttcaaagtgcttttttgatttgatttgaccacctttgcgcttctccttctatttttgtttcagtctgtcatcaggtaattctttgcttttcgcttttccttggtcatttatcccccaccccaatttttcacctttgtccccgcgttccgttggaaattcgacctttccctttccctcccccgaaagtttcgtccccataaaatggcccccattctccgctcttttcgtcatttcccctgccgatgttctgctccgttttgtgcttttccttcggtccgtttgtcgtccattttttcctcctcagttccgtctccattatccaagttgatcccagagtgagtggatgtccgaatgtgtcccaattcgcttttaatcgcccaactgtctcaggggagaccgatcagtctgtacgatcagccgggaaactttcatcgcggccccggtgacattgccaatctgtggagcggattcacttttgggctgcctctgtaaattggccttttcctgttagggttttcttggccggtttaagatttcgaggccccatgagaaatgcgataaagccgaactcgcccaatcggtggactcggtactcaaacgacaggggccaattcatcatcccttacataatcagcggaaaattcggtgccattgcatttgtttttccaattcgaaagacaattcagacagttccgagcacatgatcatttcacgagctatgatggccattgctgagaatacgtgcatcaaattcgaacggcgcagtggcgaagcggactatgtggacttgcggaacgaacggggcgaagggttaggggggaaaagcggaagtaattagtaaattggaactgacaggtgctatacggtggtgggacggtcggcaggaaggaatacggtaatgctggagacgaacgaagtcggtaagtgagcaattcgcactggccgatggcatttgctgacaaaaatgccgaccgaagcgacctgcttggagttcgacattgtcatccacgaactgatgcacaccatcggcctttggcacgaaca

SEQ ID NO: 4961 - DNA, 990 bp, Heterodera glycines
cgggggatatgtgaaaaattcaacatatacgcatgccacacttgcatgtggaattcagttcactcccggacaaagccgaccgacggaaggccaaaaagtggtcactctcgggccaccgactatgccaaccccggggacaactcccgagacacttcccacccgaacgacaacaaccggtgagtgagaaaacgagaaaaagaaagaagacacgacaatttcagagccaagtacaacatcccctaagggcactcccgcaaaggacagaaaagagggcgatcagacacgaccgacgccggcacttccgatcattttaccattaatcaacaacaattggtggtggaagaacacgccggcaccacccctcaggagagaaaggagcgaaagggacggggagaaaaggagaggcaacaaggaacagaagggagggaaagaaagaggcaaaggaagagagagaggaaaaggaaaaacacagaaacgatcgtataaatcctaaatgaatcacaaatctctctgttggcaaataattcgttccgccttaataattttaaaaaaattcaaggttcggaattgatctgaatggatgttgtaaattttatcactgaagcaactaagaaaccccagtgtttaatttttgacttaaaaaaaattatatgatttcttatatttcgaatagtttagagaaaaggaagcaaagactaaatgtcaaagaaaacaaagtgaaacagaatgacagaatttgaacaaatttgtcagaaaatgatgtcaaaaacaaatcgaaagaggtaaatgaaagaaattagaaacagagagcaaaaaatgaagaaaagtgagtcattcgattagaggtgaacgaaggagaaggacatgctgaaattccaaaatcggaagccgttaaacagaaaataatccacgacgaaaaattggaggacgaaacgctcgcggaaggcaacggcgtctgaaaagggtaaactaattacgaggtcgttgcat

SEQ ID NO: 4962 - DNA, 1470 bp, Heterodera glycines
tttgatttccagcgtttatcaatcaattcgaaaaggtgcccgacacggacagcacaacgtacggagtgaagtacgactaccaaagcgtaatgcattacgcgaaggacgcattcgcaacggcagcgggcaaaatcacaatggaaacattggacaaacaattccaagtacaaacaaaggacacgcaattggccaacgaaatgaaaggacatttgcggagggcccttttaattgacagaaaggagcattatcacagcactaaaagagaaaaaagcaaatttaaatggcaagttccataaaacatggtactttcgccaccattatgaacatttagctgaatgaattaaacgagaaaatgccgaaaaaacatggaaaacgcacttagttttacttttcaaacagaaaatccaattaaatttaacttattacattagaaaggtttttagcaactgacttatgttggcaaattaagtgatcatttcttacgctttttactgttttctttttgcggataatagttttgtttttgtaactgttgtgagttacgcattgattcataaggcccgtcctccgtcagtttaaataggcgtccgcaaatgtctgatagccgagcagaaaaaaccattttgaggatgttatcggaagagtaaaggacgcctccccgggggactatgtgaaaatatgcaacatttacgcatgccaaacttgcatgggaattccgttcactcccggacaaagccgaccgacggaaggccaaaaggtggtcactctcgggccaccgactatgccaaccccggggacaactcccgagacacttcccacccgaacgacaacaaccggtgagtgagaaaacgagaaaaagaaagaagacacgacaatttcagagccaagtacaacatcccctaagggcactcccgcaaaggacagaaaagagggcgatcagacacgaccaacgccggcacttccgatcattttaccattaatcaacaacaattggtggtggaagaacacgccggcaccacccctcaggagagaaaggagcgaaagggacggggagaaaaggagaggcaacaaggaacagaagggagggaaagaaagaggcaaaggaagagagagaggaaaaggaaaaacacagaaacgatcgtataaatcctaaatgaatcacaaatctctctgttggcaaataattcgttccgccttaataattttaaaaaaattcaaggttcggaattgatctgaatggatgttgtaaattttatcactgatcagcaactaagaaaccccagtgtttaattttttgatttcttatatttcgaatagtttagagaaaaggaagcaaagactaaatgtcaaagaaaacaaagtgaaacagaatgacagaatttgaacaaatttgtcagaaaatgatgtcaaaaacaaatcgaaagaggtaaatgaaagaaattagaaacagagagcaaaaaatgaagaaaa

SEQ ID NO: 4963 - DNA, 1721 bp, Heterodera glycines
  unsure (1)..(1721): unsure at all n locations
cgtttgtttgggaaaatttggaaaattggctatctctttttctgctcaacagtaataggaattccaactgcattctcagaataattacgccgatactgattgttgtcccacggggcgtggacggcctccttaagcttaactacccgtgctaagcgttccctccatgtttttgatgtccaaggtcctccctcttccatttccttgtcaaaaagctgtgcctttatttccgtaggcaattttgttgtcatctaagttattgcccagactttccaattgtcggcaaattcggtcaacattctcagaaaaggctcttaatgatgaggaatgccctgttggcttagctaagtggaagagctcactccttaggcggtccgcccttttatcatcgtcgccataccgcccttttaaaaggtcaacgacgatcagataattggggtcggttagtgcgaacccatccaccaaagtgcgggcgttaccccttaggcgacccactaaataggtgagtttttgcgcgcccgtcagagaggcattatcgtgaatggtatgggaaaaagcggcccagaatgagggccagttgccttcgtgcccatcaaagtcaggtagctgaagcgcgggaaggttaatttgggggcgaattgctggcgcaggagaggacccttgagtggggggcggtgggggagccaaagaacgaattcggtcaattttgatgtccaatttcgtctgaaccccatggcccttggcgatgatctccccgggggatttccctcccaccaaaaaattggaaaacaaagcattttcctcatcccgaatttccgggttcggggaggctaggacatacgtccactctttcaaaagctcctttgtcaccgccaaggtacgagcgagattttcgctcgttgagcctatggcgtccaatgagcaaggctcattgggcaaagcctcaagtggtggcccctgggcaacatccgccaaaatgtccaacaacaaaggttggagttgttggcgaattatggcggacataattggaaaaaaggcgggtacaataagcaaaaaataaaaaagagggtacggtaagcaaagggaaaaagtactgcaggcaaaaagagaaaggaagaaaaaggcacggtaagcaaaaggcagaaaaaggagataaataagcaaattaggagttcgggagtctcccaaaaaggtaaaactaaagttgcccggttagctcaattccgtgacgagagcaccagactcttaatcccctgtgttcaacagctgggaatcggagggggtacgcccaagagaaggggggggggccctcaaattcagcagaacactcaaaacaaataagcgccaaaaaaagcttccgtttcccgaggcagtgagtgctaaccaggggaaagggataggaaaagggcgacctaagggaaaagccaagcggtcggccgacgtaaaggtgagaaaaagcaggcaaatgccgagggcgaaagtgccaaagggttggacgaagcaaaggcgagaaggcaaagggatggccaaatggctgaacgccaaaattggtcaacgcaaggcgagaaaggagaaaagcaagtgggccaaatggcggagcgccaaaattggtcaaattgtaagcaagggaaaacaagggaaagggtgaacaaatgagagaaaagtttttttttgttccaggggggagattaaatgaattcggcanaaattgggagagaaaattc

SEQ ID NO: 4964 - DNA, 2346 bp, Heterodera glycines
catttgcggaaaatcgcactgaaaagcacagtgtcatcgcgaatcagaaaggcacagaacggatggtcggcgacaaagcgcagttctctggccgccgcttggtaacatatgccggtgactgccctggcagtcgtgccctcctcgtttacctaaatttcgttttataaattaagaggattccttttctgcccgaaaaaacaattataagcatttttgcataatttttgggagttttgcggtcgctgatcagtgctcaccattaccctgatttttacgtagctaaataaggggtgcactttatttccccccgccgtcccgacatcaaaaaataaaaaacaattttttaatggtcttacaaaaaatttttcaaggatttttgaaaaatttttaagtttgggaattttaaaaaaatttcgggggtaaaaacgatgcgcgggagagggggaaacgacctgcccactaaataagcactaaaaaatggctaaataagtgttaaaatcacaaaaaaatcccagcttaaattggttacaaacaccgcacctcaatgaacgccttctgcaccacttggccaatgtacaaaggtttcttgtcggaaatgccctcaaaattggcgttgttggtgaacgcggtggccatgcccatgttggtcaacggtttattcagttcgtgcgtgacctccaacgtgaacttgggcaaatccacctggaaaagaaggggttcggctgtgatacaactcatttatttctccatttatcgttctctcccggaaaggacaattgggcgatatggacacgggtgcattacgtcccccccccgagaattttttttttattttcaaaacagaatttttcaagaaaaaaaatttttttggtgaattactaagaagcgcaaaaaaaatctataaactcgcccagttgaccaccaccgttttcttcacacccccccccccaaaaaaaaactgtttttccccatattttttcaccgactaagaaaaaatatatatacttttaagttttcgtgggtatgcttgcctaaacgaataatcgtaatacaatgtcaacaatcaatgcccatgtgctatggtttagttcggtcaccccacaggtcgcaatctttcgatgtttggggtcaacgatctaagaaacgatggcacatgggcactgtgttaggacagttcgtttatttaggcatgcccacaaccaaactccaaaattagacaatgccatgaataaatgtttttttttgtgatttttcttaccgtcacagtgtgtttgtcccgcattttaatcagttccaccagctttttgccgtccaattgagccaacaatttggccagtccaaagcgttccgtaggcaacagcacaaacatgaactccttttcacctttgtagggcatgccgagcagttggagctgtacaagcaatcagaaaagtgaaaggaaaaatgcatgaaaatgtgggaacgacctgagtgtcctcgaaataaatgaagctggccatcaaatgcatcatttccagctaaaaaaagtcagcgttggtcgtttatggtcaaaatgagattttatgaagttttaacccccacaaattttccccatattttttattgaattataaatgccaatataaatgttttcatgggcttcaataaaaggtcattaaaacggcttttagactaaaaatgtgaaattcgaacattttagttttgactttttgttcgagttcggggttcgtaatcggtcgaaatggatgccggattcgtgatcagcgacgccgaaaagctatggaatcatgttttcatgacttttgaaaattgttttttttttgaaaaatgagtgagagagacaaagtccttttttgggacctgatctaagcgattgccgttttcatggccactgatcataaattcggcacccattttgactgatagtgaatgagtcccataatcagctgttatccttcttattcatcacaaatttcacgcttaatttgtaatttgaaaaatgaattttttaaagaattgacttttgttctattctgatacagtggttcgaaatggatgccagattcgtgagcaaatgctttgataactttttaattggcattttaattttaaaattgtcctagtaattgtccgccacctctttgaagtttttcgcatccatgtgaaattgcgcctttttggtcaatgttgcgttgaatttgtccgcccatgtgcccttgaagtaaagcgcgttgatcagcaccaaactgaaagaaaggcaatgcccaaacatttgtattatttgcatcaaatagctttttataaaaaaacattttttaaggggcaaaagagaggcgagttcgtaaa

SEQ ID NO: 4965 - DNA, 901 bp, Heterodera glycines
ttattcatcggccaattcgcctttttcttcttccgccgtcaaatcaatggccaacgtcactttgtcctcatttttgtcgtaaaatccgttgctcgggtccatcaatttcttaatttttacaatttattaagcgaataaaagtgttttaaagccactcactgtaaaagtaatgaaatgaggaaatccccagccggcccattccttgttaaaaacatggtcatatttgaaagtcaaatcctccgttccgttcttttgtgaaacaattcgtagggttgccgaacattcgcagctccaatttccatctttggcaatcaaaattaattaatgcaattaaaaattctcctatttatcaccatttttcggcgcggagcacaaaaggtaaaagcccaaacatttatctgtgcttttcgtccttatttctgccaatattttccatccaaatccatttattcgaattgcataatcactaaagcgtttactccccacttccttttgtgcaaattcagaaaatttctcaatttccatcgcgagtgtcactctgtttcccttggctatgttccaatcggaaattcgtccatgccatggaaattccaatgggttaagtacgggcacatcactaggattgggatgacaatggaactgataaacggagatagcttcataggttgtcaaaacgcgagaagtaactgcaaaaaaaaaacaatttttatcaattttacaaattgctaccgatgctgctggtaaaatcccttgttggtatgagaggaaaacgaattttgaatagtgccgggccaagcgcagcacgtcgattctcagcggaacattcgatggcattttgacggcacttttcgtcggcccaacggagtgccttaattagaaaacaaacaaatcaattaaaata

SEQ ID NO: 4966 - DNA, 1601 bp, Heterodera glycines
tcaattagcgaagatggcaaatgctcgaaagccaaccgggagaaatacgtcccgaacatcgcccccctctacaatccgtctctgtcgctgtccaaccgttcgaattcgctttcgtattggcctaactcctcaattttccactcgaccacattccggtcgaacagtgactgtcgctttgcttttgcctcgttttgcggtggagagacggccactcgactcgccgggcgaggggggcgagtggggggactgccgggagagccgaattggatgttcagggaagcgacgctggaggcgcgagagctccaagtgagcgctgatgaaacagagggaagtgattgatggcattacacggtactcacgcggaggatgagaatggtgcggagaggggtcgacggaacgcgtagacatgcgacggacaatgcccagtttggagggagggaccagcgccggggacagtcgatcggggaccggctcattttggagggactgaaaaacgagggggtgagaatttggcatgtgaaatggtttcggcaaagtgaacacaccctgtagacgaggtgcagcgcaacgatgaactcgggaaggtccaaaactgagacggaggataaattgccccgatgaacgaacattcggattccccatttgctaatgtccattcaccgctcactcacatccatccgagtccatatccgccaagtcccaaatctaaagccaatgaacagttttacccatcggtcgccccattttccttgacttttataggccaacctttgccagcgtcgtcttcggcaattgcgagttgagcagcaccggtttgcattggtcgccgccgagcttaccgccgattggccccaaactgtggaagatggcctcgtacttgcgctgttcctccatcccaatgggcaagttctgttcaccgcctcctccgctggccaaatcggcagagactgacggactttttgagtccgcggagggcggaggcggcacggggggcagaggaggcggcgtggggaaggacagacactcaaattggggcacggcggacaacggcacgtcgagaacggagggcgcgagagggaagccttcacggtgaaagaaagacagtaccgatcagagggggaaaaagcaattggacacccggggaatgaaagacaaatttggaacctctcttcccccacgcccctatcctaattaggcctaattaccatgctgaatgccggcgaccaactgaaaatggaacaaaaccatcattaaaaaagaaaagtggtccccaattcaaaacctttaaacatataaacacgccaattttgttcagtgcgcttcgatttttgtatccgctcaattcgctcgcaatttcccaaatctgagaatgataatgagtaaggtctgaatggcatgttttgattcttttgtcattgtttgcctgagagagttgtgcgacgctaacgccgtgtgccgttttcagaaaagcagcgatagacgcggcatcgacttcggcacttccggagggattcagctgaaagtgtaggcaattggtcaatggcaaaggctcggaattgttcaaaatgtatgccgtcgcgatgactgacgaccacaaaagt

SEQ ID NO: 4967 - DNA, 1978 bp, Heterodera glycines
gcaggccataaatcagcaaaaatggaaatccgaaaagtaaatgaccaattaaggatttaagggtcaaaatttaaaggaaaaacaattagtgaccaaagaggaaaacattaaaacaatttaatttttcatttgttttttaaattttcattcgagggagagaaaaggaaataggcctgaaaaggggcacataaaaaattaaaacagaaattgtgaatacctaaataagaaagtaacattcgagaacagcacatacttattccttcaccaccccggcttgcttggccatcttcgcaaacatcgattctccgtcggccaaaagcgcagtcggcgtgtcgaactcagcaacagcgccttcgtccatgacgatcacacggtcgtagtccaaaatggtgtcgagacgatgcgcaatggtcaacaccgtacaatggcttaaaagcaattagccgtgctaatgacaataaagcaataagagtgttccgacttgaaatgggttcgaatgcactgctgaatgcatgagtcggtgtatgtgtcaactgaagacaattcaaatgcatttcctttttaaggacccccgaaaaacccgctgcggtggcttcgtcgagaatgagaatgcgcgtcctttgacggagaagcgcacgggccaaacagaccaattggcgttgtccctcactggaaagcaaagaaattcaatgcacaaaatggtatttcaatgccaacctgagattcgatcccttttcagttaatttgtagagcaaagtgccttccaatccgctaattgtgtccttaagttgcgccttttccagcgcagcccaaagatcgctgtcagagtattggtcgaacgggtcgatattggagcggagagagccacagaagagaaccgggtcctgaaaatgaaatataatcaatttattatataaaaaaagtttgaattgtctgacctgtgggatgatggtcaacgccgagcgcaggtcatgcagtccgactgttgtgatgtccgttccgtcgataaaaatttggccagaagcgggctcaacaatgcgaaacagtgccatggtgatggatgatttgcctagtcatagagaaatacagcatttcccggaatgatcaccggttggtcacctgcacccgttctgcccacaatgccaaccctttcagatgaagcaatttcaaagttgagacggttcagcaccaaagcactgtcttcgcggtatcggaggcacaaatcgcggaattggatttgcccgcgggagggccattccgcgagacgttcactcgcgggcgcacgccaatcggcctcccatttgttgttgatgtactcgttcacacgttcaacgcacaccatttgcacctccgattcacgccaaaaacgtgcaacttcgccaaggtaaccggtgaactgaaaagggatggggaaggacattacttcattttcagacagagcacaatatgatttgtccccgtagcctgccgacttaaattccaaaaaaaagaccgtatatccgcagccgatgaccaacgcaagaacccccaacgaaatgacgccttgacttgccatccaaattgcaacagccacacaaataaaaacggaaacatcggcgacaatgtcaagccgaatttggagccatctgcagagaaatgtttaccaaggaaaggcaaaaaaaaaaagaaagaaattacctgttagagaatatttcaacgataaagcattcgttgcaaatgtcagaaattcggtagcctttggccctgaattgtttgatcgccttaaaaatgcgaatggaatcggagccggagtaagcatcctccacaaaagagagatgggaagaacgcgatttgctggtcaaacgacgaaattggaccgaagaaacgttgtaaaagtgctaaaagaatggaataaaagaacaaaaattacaggaattcccaactttaccgtaatacataggaagataaccatcaacggaacaacgacaaggacaataaa

SEQ ID NO: 4968 - DNA, 4436 bp, Heterodera glycines
ttcgtcaattcggtcgatgtcattgccaattcggttgagaatcgggccgaggggagtccggtcgaaaaaagccatcggagaacggaaaagcgagtggagaagtttgtcgtgaaaggccaagctggcgcggtacgcaccgactgaaaaagtggagaaaaacgcattaaaaacatttgcaccaagaaaaaaccgtacaggaaaggaccaagctggacagagcagcggaaaacactgaaaagaaaaagtttatcgcgatagaaaaacagcagagggaccacacaaccacataaacccataagaaacattctcttttttttaatttgagtcgtcaagtttcttacaattaaataaagttaagtaccgtagaaaaaaataagtcttcgggcttactacggtttctttttctgcgactgattgtgagtagagttttcatgaaacgaatcactcaccgtaaaccgagctgaatgctccataaatgcccaaattccgaattgattcctccgggcttgtcgaattgctggtcgaccatttggcaagccaaacgttggaaaggcccttaaaaaagcaaaacaatttgtactggtaaaagcaaggggcgtatgtcgtcacttggaaagtgctggacccaatgaataaacaaaggaggtaaatgacggtcaacgaaatgctaaaagccctggcgtagtccaagtaaacgcgtcgcttcacctaaattaaacagccaacaaataaatgcattgttaaagtgaacggaaaagcggacggaccattcccgtgcagagttcctcttcatccgtaattcgaccgacgaggtcagaagcagacatcgcattcaaattgtggggactgtcatttgtggtgttttgttgatgctcctccgatggttggggatgggcggatgaagcgattggatgctggcagaaaagtattggaaatgaacagaataaggccaaattggagtccatttagggacacatggcactaccagacacaaattgctgttataccacaaaacttgttgccgaaacttgccgggacatatcatccgcaaaaaataaaaatatttcaataattaaaatttttttaattatttaaggactaattgtaagtgataccaaatttatataggttttccgacttacagttgggaatgttcccttgtgaaaacaaaatttgctgaattttcaaaaaaaaaagatttattttttcatttccttgaactttcttgatatttttttattttctaaaacaaaaaaaaattgcgttaacttttgtcccggcgacagttcggctggcaactgtggcggcggcgacgttttgtcctgctccccaaaatgcggggacctcccccgcccccgccaaaaaattgaaattcgttttacctgctgttctgaggaattcgcgggcagagattgatggccattactctccgatgactccaaccgacgacgcatttcgagaagagagtgactgaggggtgaaccggcgaactgttccaacacctggtcaagttgacgatgagaggtcgtttcttccgtgtcgtcctctgaaatgtccattttcggtccaaacccattaattagggataattagggttgtacctctgctgctgtcaatgcgactcttccgtccctcaaagtgtttctccatgtgttccttcataagttctgcaaatggtccctccgtgtgctgtttcaattcgtccaatgttccgaccgagtcaatttgaccatctttttatgaaattattagaaggatattgtgagtcattgtcagccggcttaccattcatgaccacaatcaaatcacagaatttcaagaaggacaaagagttaagcgcgaaaagacgagttttgccagcaagaaggcctaaggaaattgaaattttgagcaaatatttgagcggatattttacctttttggttactgatcacccgctcaaaaatgtgagcccccacgtgagcatccaccgctgaaagggtgtcgtccaaaacgtacaaatcagcgtccatgtaaactgcacgtgccagtgccactcgggctttttgtcctccggaaagattaatgccctgaatcaaggtttaatttttcgactttatcggtccaattccagccaaaatatatatatatatatatatatgttctgtctttttaacatttggggtcaccttttctccaatttcggtcatgtctcccgctgccaacagtttcaagtccgctttcaacgcacacgcatccaatactcgccaatatttgtcctcgttaaacggaccatcaaagagcacatttcttctcagggttttgttttggatccacggcttttgaggcacatatccaattgaggaagccctcaccatgcatttgctgccctcttcctccacccgttccatttcgcctaaattcaaaggaatatttgacataaaattcccaatcagttggaaaggcaaagaaatgttggacaaactgaccgagaatggcggacaaaagcgatgatttgccactgccgactttgccaacaatgccaaccaatttgcctgcttcaatctcaagcgaaatgtcgcgaagatggagaatcggagtttcctttttggcactttcccaagtgaaggaacagtgacgcaaaatcactgaatggacgcaaaattcttacacaaaaaactagtttacaaaacaaattagtgaggagttaagctaaatgctaattgtcaaacatttaatttagccaacctgaatttgtcgaattttcggatgaataatccgtgccaatttggcgttcgtcagttgtaattttgccatttcgatgttttgccgttttgtttttctcaacgccattcgctgcttggataatgtgactttgctgctgctcatccgcattgagaaatttcaacacgcgccgaatactgacgaaagcttgggcagagtaagaaatggtctggggaatttggtagatggcgtaacgaagcatggcgaaaaacagaagcgaaacgaaagccacgtcgggacgcatcgtttggtggtaaatgatggtgaatgcggagaaagagacgagagtggcctaagcaaaaaggaaaggcaattcatgcattcgagaaaaaaaaattagaaaattttcaaattttatattttgttaccaccccggggcgcatgtatgggagaaaaaggattttaatttggttccaatcctcagcccctccccctcccaaatgatgccaaattatgcaaaggaccgcacaatgagcggagccagcatgaaggacaggttgatgaagacgtcgagcaggaaaatcatccacagatttttgacctccctgtggcgcagttcgaaaatgcgcttttgcatggactcctcccaggcgtacagtttgaccactttgattccaccaagcacatcggtgacaaatttgacacggtcatctttgattttcatttgcttattctgaaaaaaacgagaaaaaggaaggaataaacagaaattaaatggataaaagcgacctcaaagtgagtcatcagtttggtaagaacggcgttgatgggcaaagtcatggccaaaacggcgaaaccgaacacagaactcatccccaactccatccaaagtccgaaacttgcaaagccaatcttgggttaagagagagacaatttcaagtggacttcttcaaaaaattaccatgaaagggcaatagacaaagctgcgaattgtgagccaaaagtaagaaatgcgaaactaaaatggattctgacaatgagacgcaaatgaaatttggaaagaaaaaccaaatccgtggacaagaaattgacgacttcgccggtggaaaaagactgacgagcggaggaggacaatttgaacagcttaaaaagagtggaaatgtgaaaaaacggaaaattgaggagaaaaaccttgtcaagaattgcacaagaaatgatggaacgcaaactgagcaaagcaatgaaagaatcgaagtcgcgacgcgcgagcatcactttgccagtaaaatccacaaaaaagagcacacaaagagcggccatggacagccacaaagggaagccgaggtcaacgaatgtgacgatcactctgcaaagcattgaatggcagttttaattttttttttttttttttttaagaaaaatggatatttttttttaatttcctcaatttacatatttaatgaatttgaaaagggttaaaattcccgtttttcgtaaggcaccaaaaattcaggaaattatattagacacaaaattttttgggccggaagagcaacaaaaaaaaaaagctcttcgagtgccccacccaaaaaaatttctgcttatggacctgctcgcggaagttattatatttttattgtaatgtagaccgattgtaattgatttacctgagaaatacggcgtttgcgtaaagacaaaagacaacgagaacggacagcaaaatggagcaaatt

SEQ ID NO: 4969 - DNA, 1626 bp, Heterodera glycines
aaacgcagcaaatggtcaaagaaagcacaaaggaagggagggacctgtggaagcgtaagaggggggccgaagaggagaagggcatggcacgggagcagggagacgaggcggaggaaccaggcgatgtgcaaggggccggagctgacgaggccagcccggacgcattgagcataagcaaaagtcgaacagagctaaacggggagacggaatgatgaaaagaaacgaaaattggagagaaagggaagactaaagacatacggaaaagacgagatcgatggtcgaaccaacacgttgttcgggaagggagatgggcagcacgaagaggaggagggagaagcgaaggagcgaaacgaacaagtcgagcgtggagagggcctgaaggaaaatgtgccgggacattcattcaaagcaatgcgcacccctttgaggatgatcagccggttaattgggaggggaatggcattcggacgaaagagccgcgcgtaaagaaacagacaaagcatcgagaagacggagacaacggctgggacgaagggaaagacgacattggccagacagggcgagacaatttcggacaaagtcgaatttgggaagacgggagactgaacggaggaacggaatatttggagggagacggaattcaaacgcactatgacaggagaggaacagagaaagggcggcacggaaatggggctgaaggcgagcggatttaacggatgcaaaagagtaaccatcaccaaaggacctaaaaataaaggaaaacagaaaataataattggtgttggctcttcatgacaaatatatgtatatatacacaaattcccttcaaataaatgtacgtagccaaggaaacggaaaatgatgacaatttgcaacaaaatatttttttattaaaattagtttgaattaattaaaataataaaattgggggtctttggcgccacgacgcatacataaaaattgaaaagttgaaattttgaaggttacagtccaaaaatcgagcttacgttaaaacgtgggagtcaaaaagaccagttcccaacgagaacgaggaaaacacatttattaattgatttccatagtaattgaataggtacataagtagggcgtgtaattatatggaaatccatattttttcctggattattggaggactgaaacgcacgaaaaacatgtttttagcttggtttgaagcttctaggatggatttctatatccattttttccatatttcgcgatttatgtccatatttccatattttggcattttcgtccatattttatgtccatattttgggatttttccaaaaaacctctattagaacggccccagcagctaaatttgcctttttgagcccaaaaaccggaaacttttacaaaaaattattttttcgctaaattttctcgacaatattgaataaattcaaattttcttagaaattaataaatttatgtcaaatataagcaaaaaaacgaaaatttcgcttttcgggttgatttttcgctaaaaataagtaaattttagcttatcgtgttttttttcttctaaaatgatttttaataccatatttagccatttttgaaggtaaggtttatatttaacaaatttaaagaactttgggaaat

SEQ ID NO: 4970 - DNA, 1567 bp, Heterodera glycines
ggcaactcacaatcagttgattgctgattgggggggctttgcagttcgacgacgcgtttatgaacacgcactatgggtcaactccactgtgcagagaaaagcctagtactatttcgtcgttttctttttctttgtaatttctctctgtttggcgtactatctctttattttaattatgtaaaaaacaacatttacttctctccatataactttttttctaatgcatacagttgcaccaaattttgcataccgatagagaaacaaattctgcatttttcaatcgcttttttaaacaaaacaatcgcttagttcaatagttatagatagggatgccaaaaatatgcatataaaatcgtaaaatatgcgcataaaatatggaccaaaaatcgcaaaatatgcacataaaaagtgaaaaatatgcacataaatttttccaattgagggtataatttctcaaaatttcttcaaattttttaaacataaagtaaaatcttcaaaaatggctaaatgtggtattaaaaatcattttaggagaaaaaaacacgatacagcttaaaatttactcattttagcgaaaaatcaacctgaaaagcaaaattttgcttatttttgacataaattaaccatttttgagaaaatttatttattcaatatttttcgtgaaaattttgctaaaaaattattttttggaaaattttccggtttttgaggtcaaaaaggccaatttgtctgttgggggccgatctattagaggttttttggaaaaacgccaaaatatgcacataaaatatgcacgaaatgccaaaatatgcacaaatggtgtacggacatttcgcctactcgacatcatgacagtaggcgaaatgaccgattttgggttagtaggcgaaatgaatgtttttggcttagtaggcgaaatgtcgagtaggcgaaatgtcatgtagcctgcacaaatatgcacataaatcgcgaaatatgcacaaatatgcaaaatatgcacatggaaagtcatcctagaagcttcaaatcaagctaaaaacatgtttttcgtgcgttttcagggctcccgcagtccaggaaaaaaaatatgcatgtgcatatttttggcatccctagttatagaacaaaacataaaaacatatttctttttctctctttttggcgtactattttcatgtctctagcacatgtaaaaatcgaaattcgcaaattctactagttttggttagaagagtacaaaaccactttggacttttaaaatcaataaaaaagtgattagtttccgcattttggttgaaaacagcggcctcggacctgagttataacgtaatgaaaattttaaattcccacaacttttttcatatgagttaaattgcttagcatttgcttagaaaaagattctccttttcaaaatctttttttagataccaattttgttcagtttagttggagatgaagcgagttatggaagatcgaaataaaaaatacaaaaaaggcatttaccagtgtaacttttgaattagcgcgaaaaatttacgccaattacgctatttggcattatgagcaa

SEQ ID NO: 4971 - DNA, 6474 bp, Heterodera glycines
gtgccatgttacaaatgtttttcttgatttgctgtccatgccttcggtgttcccctcaaatccgtccaattccgtcaacatttggttcaccattcgatccgtcacgtgcgaattgtcactgcctcgttgcggcgcaatggcatcgatctgacaaatttaatgaaatctctaaaaacattaaatacctcatcaaaaatgatcaacgccggctttgatgcctttgctctttaaaagaaaagttaatggataaaaaagtcaaaattatcacttggcaaagagttggcgaatgttttgctcacttttgccaacatatttagacaacaattggggaccctttaatttaattggtgggcactcttaagaaaaagaaaattcaccctaacactgaacacagtggctcccattgacccggccaatgcccttattaacatcgatttgccacatccgcttggcccgtgaaggattgcgcggtgtcccacgcgaacgccagacaatccaaaaagggatggatactgtaagaaaacggtaattgcaacaaaaaagaaaacaattagtaccctggcaggccaaatgaaaatttcggtcaatttgcttttaacggactccaatccggcgatttggtcaaagcgaatggacaactctccttcgccgaattcgttccgtttgcaaatgtaagcgacggagagaatgtcttccgacgattctattgaccggctaaaatcgtaagactatgaaaatgccccaattcacccgcgggcgttcgatttgtgccaattcgcaattccaatctctccaccaaacggcacagttcaccgattgtgccgaaattcgctgattcaattcgcagatctgttcgcattatgtctccgtgcattgataatttgttcaatacttccttttgtgtgcatttgtcttgatatttgcgtattgtaaaacaaaataaacaatcctaattaacgcccaccgattggaccaattcggtgcgtctcccacttcaaaggcggtccttcccatgccgaaatctcttcggacattttaattccgccagaaatggcacaaacaattggcactttccttcgtcggaattctccaaataatctgccgaatatttctgaactatacacataattctcttgagttgttggtctttgccactttggtaaatcaaacgtttcgtctgttcttcgttttgcatcgacgaagggtcgcctccgttagaaaatttcccaatacaaatgtcaaaattatccagcaaaaggacggaaggccaccgattgactaattcagccatcgcagaatcaacggaatcgacaaaacgaagaagcgaattcccttttaaaggaggaaaaaatcaaccgaattcaaagaaggaccaaaaattcgcatttcgaattgaaaaaatggcaaaagaaaggccggactttggcattctttttttttgatcgctcaccagcatccgaacaatcgacaatatccgctgcgactggtacaaatgcattgtcttcgtcagttgttcgcagtttgctcataagttttgccaacaaagttgacttcccactgccgcacggtcccttcaacaaaagtgccaatggcaccaccgcttcttcgccggcactttgaccttttgcgccaacaacggaaggtaagcagcgacagcgcaaaaacgttcgaatggaatgcgaaagagaggaaagaacggacaattgagcactacgaaatgccaaaaagggaatgaaagacgacggatgaaagacccacgggaaatcgaccatttgcacacacttttgatggtattgcgtcattgcttcatctttttcattggcttcagaatgactttcatttggcaaatgccaattcatttcttcgtcattctgaacaaaatgaaatgacatttcgaaattaagcattgcttgaccctgaattttatggtcattttaggcgagagaggccaaaaaagacggtgagtcccaattcgatcgttggcatttaaacgcgttttctcctcatcatccattaatttcagaacaatttgtttaatcatttctgaatatgtatgtacatattattattgagtttttaattgatttgttagtttttactgttttggttcagcttatcttccgtttcaacttttggtaagtgtaaattccaatgggatttatcacgtgacaatagccacggagcgttcaattgtcgggcagaagcaatcaaatccatgaatgtttgtttgacttctgccaaatggacgcgacttgttgaaacgattaaattgtcaatgttcttgagctgatctgatgggattgggcgaagtttaatccatcgcaaatcagcagagcgagaaaaaagacggctgagagactgagacagccaacagtggatgaggccggaagaaaggcgaaatcgctgaaaatggcagggcatgggaatacaagatttaaatgaatttgctcgtttatttgctccgctgattgactgattcacccgctgatcacctcaatttgaagtgccagtcgttcacagaaatgcccaaatggcgtcgtcgtttgttgcccctcttggggaagtgtgacaaggacagcttcggccaattgactttctgttgtcccttctccatcgtcaaattgcacacaaacgcaacagaagcgaatttcgttcgattcgctcttttttatgagtgttccatgaggcagaaaaatgaacggaaaagtgttgagcaaaagacgaagtcggcggtgagaagagaagaaagggtttgaggaggaggagggggcgagggggagaaagcggacgatggaacagcaaagggcccgagcagagacatcgaaatgggcagcagggactgaaaggaggcaacgaattactgtaggacattcagcagcgtttactgtaagatcaattcgatgagcaaaaatggatcgaatttgtttctagtgatatatgcgattctgatcataacacatgaaacccacccatcgatgagtaaaaacagtcggacacttcggaaccaatccccggcacaaaagcccttccaagtgacgccgtcccttccgccgccctttcgctttcttttcgcattccttttacgtttccctccactaatttctcatcagatgcagcagcagaatgaggtgcattaacgagaagacgagtgccataagccatcagaaaagcgggcggatgagaaaggaaatttccatttgcgaagcaattggccatttgaacgcgggggagaatttctgagcaaatgctaataatgttagtcgccgaatgttgcttttctcgccccaatacctccaatggtaaaattggccatttgcccatttttaaaatggacacaaattcgcatattcgtctgaattacgcggagctgtccgaggaggagttcttctatttgttcggttgaagacacctttaaatagctgcaaatgaaggcatataattccccttttcatagaaacattttgaaatttccaaaaaacttacaattttttcccagtcgccgttatccaaaggattaatcacaactgattcacaccgatttaaagcattttcagagagcggatgtaaaaataccttaagctatgcttttacattttaacaaacaagaaatgggtaaaatgttggtcattggatggaagtcgaacccgcgtctccacgcttccgtgaccattgagctaccgagattcgagtccggaaccgggatttcgttattcagtcgggatttttgcactaattcaaaaaatattcaaggaaaaaaactgaaaataaacaaaaataggcaaattacgttccaagtctcaaaaccaccctttattggtctaatctaagcccgctagttttccacttgacatttggacagactaatcttctcattttttatttcgcccaccttttctccgtccttcaatttattggcactggcgaacgtcccattcaaagaaaaagtttgatgagattttgaagcgaaaagagacgatttgtcagcaaagaaaatttgcataacaatggcgaagtcgatttcatctgaccgaaatgtacgaaccaaaaagaaaccgtaatggccctaaacgaaacatgatgagaatgacagatgttctccattttcggacaaccgacaagaacgacggaagagccgaaaccttcacaagaattttgaagatcatcgaacaaactgccgaaacaatttctaattgaattatcgcaatggagacgagcagtgattggagacaatgaaatatcatgggaagtgccaacagttgggtgggtataatgcatctcggaagccctataagaatatatgtaagtggtaaaaatctaattattttaggacgataattgcaagaaccacattgacgaagcccactctcctgattgctttaaaaatattttttcaagctatttttttttctaaattatctgcaattgtccgtccgaaaatgtccaacttcgcctgttatactgcaagaatacccatttttttggccaaattatttacaaagcataatgctattgaattcttttattatttaaatttttagtaaaataattggccaaatgttttttgtcaccaaaagttagccaagataaataacttttatgtaggtagtacaataaacatttaaaattatgccacttttatacagttagttggggtcgaaaaccaaagggggatcattttgatttgcaacaaaagattattgcatatttaaaggtggttgattatgaattgtgcaatttatttttgtcatttgtgactttcaccaaaaaaacttatgtttttagtcaaaagggggtccgtcctttagtgtttaaaattttgacagtttcaaaagaattaaaaaatgaatgaatcaaaataaaatttagccttaagggagcatggctctagtgcacttagacatccaattggctttttggcatccaaccgatgacttccttcagtttctttggcataacttttttcttgggtcagtgcttggatcaaacgaagcttaaatcaataatttataaatacaagaaaagagagcaagaaccggtaataccaagaatgtaggtattgaccaagtaagaaagatgatttaaaaacaaggataattttgattgtacgtctaaagtgcactagagccgagagcgctttggactgatataatttattacaaaaacctaacgtttaagtgtttacccttcgtttgatatgtaatttctctaaataattaaaaacgcagtttttaagttttattttctaggtcacaatgagtaacagtaatgacagtgacgacctaattatttatgacgacaatgaagacattaaagacgtttcatccgattcgggtgacgaagtagcgatggaggaagtcaccaatgcaggcacttctacagctggggccttatctaacgaagaaatcagggactaccaagtagagtttcaagaaaagttcacaataatgacagaaattacaggtgctttctcagacggagttggtcgacgaactgaataagctttcatctgaaacttcagcagtgttgcgtttcaatggctcaatttgcaaggtacttcttcatcacttcaaatggaacaaagtcacactaattgagaggtagctaattttttttattgttgactcaattaatatccagattcttcgaatttcctgagacttcaaacaccgattcattcttccgcaatgcaaatcttctcgatcctacaaagcataccaaaatcgagggaaaggttgattactgcaagatttgctacgatttaagacagctgactggattgctgtgcaaccatttgttttgccgtcagtgctggtccaattacttgtcgtgcaaggtgcttaaacaaaaaattaaccactaattgtttattatagattctcggcgagggtcgaccttatgtcacttgtcctgaacttcgatgtactattgttgcggatgatgaatttgtgctcaaaaatgtcgacaataaacaagcgttgcgttcctatcacaaattggtcctcaactcttttgtggaggttgatatctttgggagcattcagctacaaattttgtttagtgtaacaccttgattaaatggtgccccgctcccgaatgtggtcgtgctgtcaaagtacctcattcagaaccgcgcaaaattctgtgcaaatgtgggtgccttttttgcttcagctgcagccaggtgggcgtaaaactttattctaattgtaattttatcattttttattctacagcaatggcacgagccaataaagtaattgggattcactcgaaataaagaaaggaataaattatgcttttagttgtgaccttctcaagaagtggcagaagaaatgcatcgacgacagtgaaacatcgaattggttgagtgccaacaccaaggactgcccgcattgccacgtgttttatttttataaaacaccgtcactcattagaagaggtgaccatcgaaaaagacggaggttgtaaccacat

SEQ ID NO: 4972 - DNA, 3488 bp, Heterodera glycines
atatttgcactactattcacgcttcactaaccaccagaactctctcaaactggagagaaaggtaaattcattgacacttatattcctattgttataatttagctctttgaaaaagtgagcgaaaaaatggaacaaatgcaggtcagacgttgaaaaaagcaattctaaattaaaaaaatgaatttctttaaaggtgctcggcttttcgtggattgaaacgcagtttttgcagaaggcggttgaaattcttgtcgaatgccggcgtactttgatgtacacgtaagtttcgtaaactaaataaaggtttaattcgtattttcagttacgtgttcgccttttaccttgtccaaaataacatcaccaaaatgtttgaagacaaccaaagtgacctcgagctggcgactgaacaagtgaattttaatgttagttaattgttgtgacaatgtttatgttttagttgagtgaatatttggagagagagcttccgaatgagaaagttgctgaggtcaaacaaaaggtgcgtttgttttctttactttttctacttcaattactgtttcaggtccaagacaaataccgttacgtggaacagcgtcgccaaattctgctcaaacattgtgttgagggacgcgagcgcaacgaatgggagttctgtcaggccacgattgagaacaaaacggactttagagggatgtaagaactgcggggggcgtgctatattcgatattctaattgcggagagttaaattgccgctatgtatcatttctatgaacaccttaatggatctgtcaatcaatgtttctcacaatgtcttcactgttcttttcaatgcatatgttatgatgcactaatgcttttcctatggcatgaatatattcaggagtcctctcacttttggcagtttaaactaaaaattattattccaatgtctacttttttaatgtgctttttgttttacaaaattcgtagatgggaaattactacagtcctcctaaacgagtggggcagaaccctttgtaagttgtttcttccctaaataaaatgaccgagaattatgcagcactcgttctggggcgccgccgcctaaattggtcattaggaaggacaaggatgtgccgatgcaccgagtcaatgacccggtaagagcaacaataactaacggattaggctttagtccaaatccactttcttgcccatatacgcgtgcgcccacccacctgattaaacaattggaatatgcaatatttctttagatgagtttgcagctgcatatggcgggtattaataccctatgctatatttgaatttgaattaccacagatgaacgcgttcggactgcgggactctcgaaggcggagagagagtggagagagtgagtgacaattagaacttcctccaacaaaaagttactcaaatatctattttagaaaatgggttcatgaccagagtatgcatccggatgagcctatccatgtcgacgcggtccaccggtagccatttgttctattttatatatttaaaaattattaacccaatcaaatgtatcttattagaaaaattcagccaactgaatccaatcagagtgctttatcgatggccaatggataagctttacaagcatttcttgcgaccaacttttgggaattactgggcaacgattatccgtgtctatgttcccaagttcttctggttctttatgacattcgaatttttctactacgtgtggaaatacgaatcgaaggtgcttgaaatttttattttctttaaataaatgccataaatatggtaaatgtttattataattagggttataagttatatgcactaaaaaatgccaaatatgcactaaaatatgccttaaaaactgccaaaaatggcttttagccctcaaaaaatgccaaaaattgtgtataaattaagaattgacttttaaaacaccaaaacaatggctaaggagcattttttagacaattgcaaaaatattgaaatttccaaatttataaattttattatatgctaaaacaacattacattttacatatacataaattttttttccaaaatttcttacaaaaatttaaaattttttcgatttttaagggcgtatttttaaaaaaattccaaaaagtcgatccttaggggtgtatttttcgcttttatcgcatttttcttatgaaaatttccaaaaaatgaccaaaatatgctctaaaaatgcaaaaatggtcaaatatgcacttattctcaaaaaccctcaaaatatgcttttatatgcactaaaaaccttcaccaaatcaaaaaattttaatgcagaaatgctatttttgagcccctttcttcatagcatatgcgcagaaaaaatatgcaaaagcatataatttacaaccctaattataatcattgcagagttggcaaaaacgaattggcttttccactatcaatcgaccggatcgttatgtgcttgtcaaagaccacgatgaggagacgcttaagcttggcctgacagactacagccgatctgactattttgacaaggaattctaccagcgcattaaaacggccaacatcgacttcggccccccgaagaggccgtggtgatcgctgcgatggtggcaatgcccattcagaagagagaggcggaatagaaaaatgaaattaggttatgatggcagcattgttggatttttgtttatttctgtaatgtatggttttcgataaaagtctggacagcgacttcctttgtctaaaaataaagggccagaattgttccttaaattgtttgagttttttatgttcctttttattcacttcaatcaggagcttacttatgctcactcatcggaaataccgtctcttgcaatttgcatccgtttctggtcgggcactaacaataagtccggaattcaggcagctcagttctgtttcgtccatcccatctaattcgcataaaacctcaaagtcagatggaaaggcgcccaaatcgagcactctttgggtcagtcatttgttgtcgtgctttccagcagatcttttgttgtaatttcagcttaatttgccctccaatgctgaagaggatgtgcgaacacgtgttcggagctctttcttcggcacttacgtcgctttggtacattttcgttcctacttttttcatataaaactagtgttggtatcctaccttttttcgatttaataattgtgtttcattcatcggcaactggcatttttcgtccattaatttgcataatttccccagttattcccagccgccacttttgctttgggttgttggcaatggaaaaggcacaaatggaagaccgaactcatcgaaaaactgaaaattgcaacaaaaactgcacctgtggaattccctgtggacaagtgagtcttccggagcaggacaaaacatcgccgggaaatatattccaaaatttatgaactaacaaaacatggtatttttcgcttctcacctttaaaggtatgattggccagt

SEQ ID NO: 4973 - DNA, 1851 bp, Heterodera glycines
  unsure (1)..(1851): unsure at all n locations
aaaaggaatagattagtcgttattttaaaatactgcaaaactangatgtctatgacaatatccttatacttccgattcgcccatatttatggatatcattgttgctgctaacttttatctctgatgtcctcataaataaattagagatccatattgacaaaaaattatcttataaatgattgtcacggttggaagtaaacagttgagtcataataacaatggctgagttcctgtaaaaatacaaaatataattaaatttattataacccagctttggaataaataaaggaattttttgcttcgtgttgaacgcgcctttgggttcctataagcaggaagccttcagatttagccagaattgttcagcagcgaataattttgcatgttttttcgttttttattttgtagcctaagacaaaaggaatagattagtcgttaattttaaaataactgcaaactacgatgtctattgacaatattccttatactttccgattcggccatatttatggatatcattgttgctgctaacttttatctctgatgtcctcataaataaattagagatccatattgacaaaaaattatcttataaatgattgtcacggttggaagtaaacagttgagtcataataacaatggctgagttcctgtaaaaatacaaaatataattaaatttattataacacagctttggaataaataaaggaattttcttgcttcgtgttgaacgcgcctttgggttcctataagcaggaagccttcagattcagccagaattgttcagcagcgaataattttgcatgttttttcgttttttattttgtagcctaagacaaaaggaatagattagtcgttaattttaaaataactgcaaactacgatgtctattgacaatattccttatactttccgattcggccatatttatggatatcattgttgctgctaacttttatctctgatgtcctcataaataaattagagatccatattgacaaaaaattatcttataaatgattgtcacggttggaagtaaacagttgagtcataataacaatggctgagttcctgtaaaaatacaaaatataattaaatttattataacacagctttggaataaataaaggaattttttgcttcgtgttgaacgcgcctttgggttcctataagcaggaagccttcagatttagcccgaattgttcagcagcgaataattttgcatgttttttcgttttttattttgtagcctaagacaaaaggaatagattagtcgttaattttaaaataactgcaaactacgatgtctattgacaatattccttatactttccgattcggccatatttatggatatcattgttgctgctaacttttatctctgatgtcctcataaataaattagagatccatattgacaaaaaattatcttataaatgattgtcacggttggaagtaaacagttgagtcataataacaatggctgagttcctgtaaaaatacaaaatataattaaatttattataacacagctttggaataaataaaggaattttttgcttcgtgttgaacgcgcctttgggttcctataagcaggaagccttcagatttagcctaaattgttcagcagcaaataattttgcatgttttttcgttttttattttgtagcctaagacaaaaggaatagattagtcgttaattttaaaataactgcaaactacgatgtctttttcctcccccccccccccgaaacgaaggtcctggctacaaccttgatctcatttagctaaacccacctgacaacccgagtggagccatcgcccgacgccgcccaagtcaaagcgatgagc

SEQ ID NO: 4974 - DNA, 1855 bp, Heterodera glycines
  unsure (1)..(1855): unsure at all n locations
tttttggctttttgtcactattttttcacttttcgacatttttgaaaatttgttaccaaaaatgcaataaaaacaaaaaatacaccccttaagaatcgacctaaaaattttcaaaaaataccagttagaatttgaaaattntcataaaaatttttcccccaaatttttcttacaaaatttttggtttaaaaatttcaatatttgctaaaaaaaaatgtaagaaaggaatgtcatttgtaactgcaatcagtgaataaagatttttttgctcaatttttggctgaaaattatgtcactattcgtcactattttggacttttttcactattttgtcactattttggcactttttcgtcactattttagttaactatttcgggatttttcgtcacaaagtcggttccctactaataactagtgatgctcgagagcaaaaatttcccgagaccgagacttgaccccgagactcgagaccgattccgaacttaatcccgagactagataccgagaccgagacccaaaaaacccgagacttttctcgagtcgagaccgagactttctccaaaaaattttcttacacactaaaaaatcgattaaaaatgaatcttttgaggttttttctcataattttttgcattttaccttatttaagctatcccatccattttttttttcatatgattgacgtctttacaccattttttgtggtgctcatttttcccggcggtgcagataggcgccgccggggaaaatattgaactttttaatgcactttgtgaaaaaaaatccaaaaatgacatattttaattgttaaaaaattgtgattgaattcccatcgaaaaaactactaggtcgttgcataaaaagttgccgcttatgtttagtgtactataactattttcgtttttattagaatagactaatttgatgtttattcgatacattaaagtgttctctacattttgataccaaattcattcattttcatgcatttctaatttatttatgcttattgtaatggccgctgacaaggaaaatatccataccctcttacacattcaattccaacttggccacaaagtggcccaagcagctcgacatatcaatgaggctgttggagctaatgtttgcaaagaacgaacggctcgacattggttccagcaatttcgcgagggccgcaccagctcaaaacgcaagggagggtcggggcggccgctgatggttgacaagaacgttttggcacagcggttgcgacgacagccggacagttcaagtgcagaattgtcggcgcgacattgccacaaaacaacagcatggcgatggcttcgaaagtccggtcgtcggccgaggaggaccaaatgggtggcacaccatctgacggatcaacagaagcagcgacggctggacctgtatctttcgaacatcgccagacaccgaaggggccatgtgctcaaccggattgtcacttgtgatgaaagctaactacatatgttatgacggcacaacgcagaaaattgtttggcggaagaagaatgaagacccgattttgacagatagtttcggttcctgtcctttgtccttgttaattacgatttgtctccaaattgtcaattcgcttttgccattgaaatgtttgtccaccaacgcattgaaacgtggcgaaagaagtgccattttgaggccgagttgaggacggtcaaaggatgggaaaatgtccatccaaacgtcgttgcaaatccaactgaaatgggaaaacagtttagtcaaataaacgacgaatttgtgacttttaaaaattcattaccgtcggttcatttttgtggcaattagcacaattggacgagttccgaatgat

SEQ ID NO: 4975 - DNA, 1162 bp, Heterodera glycines
  unsure (1)..(1162): unsure at all n locations
atcagaataattttcaattttgttattaataaaaagtaaatggtagaagaatggtaattagaaacaaaaaagaatcatcgcccaactcaatgaataaaaacgatgaatgacaagaaagaaagaaatgcataattgttaaaagcttttaaaaaaataaattatttaacttttattgatgaataaattgatacaaaatgcttagaattgtcgttcatcaatgtaagaaatagaactaataatattgttaaatcaaataattaacaaaattgttaatatatcaacaaaaaataaaaaatataccgaaatactttaattgacattaattgctaaaaattaatattgaaaaaagattataaattttatttagctgtataatgcttgtatatattaatttgagtgggaacgaaaagctgaatctcacaaacgcgcccacctcaaactggcacaagaaatcattgaatgccaaaattactataaatgcattatgaaaagttaacgctttcaaaattgtagcaatataaaaaacaaataaattcataaaattaataatatttcataattgtttatattggcaaatgataatattatcattcgttaattcacttgatagatttcattatttatgttaaaatctcctcaaaaaaaacaaattcgaaaattatttgaaaaatttgaacattcatggaaaggtaactagacgtacggcatcttatcctgactagtttaaggccattgaaatataaaaataattcgttaatgtttttagagccgcaattttaaggagccaactcactcatctaacattgcttctcctccagtccgctcttttggcnnnnccnttnnntgcgnnntttnnttggtttntnnnngctttntttgcnntgccngnnctttttttntttnnnggtnnnttnnnntttnctgctttgnctnnnngtnnnntnnnttnnnnccttttntnntnnnnnnttgtggnnntccctntttnncntnntntnntntttggtgttttcgnctnnttnttgncnncncntttttntnnnnttgtttgnnntnntttctngcgttcnnnnctctgttcaggttgcagattacaaaaattgcaaacttgttgcacctcagtagaagagtgctgattattaaaaaaatatattaatgaaaa

SEQ ID NO: 4976 - DNA, 6354 bp, Heterodera glycines
taattgtccactatatgctgcaaagagtgtgacgtcaccaccgcgaggggtacggtagtccggtgaaaattcgcaataaattctgccgcaggcaagcggattcgaacttttgctctgccaccaaaaccaacacacaaccactctgccacgcgaccagttgccagaaaaaggataattgtccactatatgctgcaaagatgatgacgtcaccactgcgaggggtaccgtagtccagggaaaaaactttgaaaatacgcaaaacaagacaaaacgccacaatatatacataacgccataatttattgagacgaaaacctttcgcattagattcaaattcaaaatttggcgggaaaagtggcttggcgtcgttttttttgtttctatccttaatcctacccttttttcaaaatcattcttatcttctttcattatttattaacatgaatattttctgtttctgtcttttacaatgctgtttagccaaaccaactatgaatttcaacaatttgactacgccgattgatgaacaaacaatgattgaaagcctgtctttggatgaaccatcaaacgagctacgatctgttgaggttaacctttattaatattatcaaatagaaagaatattttagaaaatggacgaagaactgaacaaaaaggaggagccgttcactctcgccgaatgttgcacagcatttgatctggttgcggttatgttcgactgcaaaattccggtgccgtacgaggaggagcagaagcgttacgtatacgagcaccaggacaagccgcgtttcatctacatcaccgaagatggagactagattgagttcaagggaattgtcaaacagtttggatacgtcctaagcgttgagactatctacttcgacaaagaaaagggaattgatgaattctataacttcctccgtaacaatgtcatgtgtttcttcagtgttgattcataaagtgaattgaaatgttcaattatttagcgtgctgtttactgtacaaatatttcatattttaattttcctcaatcttattttacgatttttattgaaaaaaatgaccgtcacatccaactccgaattccgactcatcgaatgtgtgccaatccttgaggaagttgctcgtgaatttggctgtattacgccactaccaaaccttgggcatgtttctttcgttttacaacactaactccagcatacagtagccatcgtgactatcgtgtaagcggatgtatgatgattcgcacgctgacatcgttgaatcgactctacattttcgatgctgaagactgtattgaggttaatggaaaatatgtttcatattttattgctattttaggtgaagggtttcttaaggcaagaggacggcacgagccaaaaatggtcaacgaatattatgaaaaatatgatggactaaatggatttgctgaatttattcggaattgggcctttacctttttctgtttacatgcctttgatgatgacgacacatctgatgaagactaatttcgttaatatttattgtatgctcttggttacaaaccgataaacaaatccatcagggttatttgaacgatttaaaatttgcataacattttcgaaacccaatccgatagacataaaataaacgaaagtaattacatagtgaccacaaacattggacaacaccgattgaaaccgcgtcttattatagtaaatgtttttaaaattatcggataaatattttttgatcaatctgataggcatctctccatatgagtcaaagaagtaggcaacagcaggagactgtgcccatatcgcacaccaatgagttcccggcatacctgcagggtcctgaatggaaatacgatgagcaaatgaagcaaaaattaagcgtaccaggttaacaatcagactgcacggaaattttgaacaccttggcaacccatctgcgggatatgtgccgctgaagtaccttttcgtcgcaggattctcaaagagaagtctgtcgatgaatctgttgtccattacgaattcttctctctcgcaggaataaataggtgcctacggctgccgcccctgccgcaccgaacagatacacaagacagaagaaaaagtttattggcgacttctcaataacatcggggaagcacatcactatcccgtccctcggaggcgtgtccatcagaatgttttcagaggaataattctgactcatactgtgaggtcactagtgatcgaacggttacgatcaataagaatgagcccgtctgcctctccgtacgcaatcaatgtaactccctcgttgggtactgcttcagtgaatcggatgttcactgcagtacagccctctttgatcagctcaaagcctggcgagtcctcctgcgcgttggtcatttggaagacatagaggcaatgtgaaaaaacatatttattggacaattgaaaagatacctcttataattcgcaaggaaaataaattatttataattaaaaatttgtttaataaaaattataaaaaaatgattaaatataaagtttttaataaaaaaaaattgtacagccttcaattcgaaaaagaattttaaaaattataaaaataaacgcaatttatggctaagacaatccctaattaaagaaaaacgaatatacaaagtaacatttcgaaatgcaacaattaaaaaagagcaaaataatagaaaaatgttaagaattttaaagaaaaagatataatattatttgttaaacaataattattaaattatatataatctttagaacaataatattatttatttatgaaaaatagaaagaaagcatttcatttttacagtgtattaatacaatacacttattgcttaaattaatattcttatttttgctataatatggattcattttttaaatgggattgaaacttttgataaatatctaaaaatcaagttaaattgacaaagctttatattaacaaaaataacttatattatgtaaattaaacataattacagcaataaattgcaagatataaaattattattatttttttaatttttactaaaagatgaaaatttaaacataattcaaaataacaaaataatactattaatatattcatatttatacgaaaattattattaggatcaaatatttaatgaaaaaatataaattttaatatagtaagaatatttaaaattgtaaatgtatagctgcaaatttatttccataacactataaatgcaaaattcataatcaagtataaaagtaaagaataaaattgaagaacattttgaaaaacaaaagcaaaaaagatgcaaactaattaataataattgaaaaaatgcttgtataaaattattaatcattcattttttacttattccaatttttatttacgttataaaatattcgagatttcgaaaaaatcaattattttgaaatgaaaagaaataattttctgaaagtaactttttacataaaatttaaaattaaatttaattaaaaaatatttttaatttcggtgcataatccaataatttgcttcaaatttagacatttgataggatgaagtttgcatacaaacaatttttttttgcttttatggatttaaatttttaaattattcatattttatacaatgaatttttaagcatagcttaatttatttagtcaactgtattttgtttgaataatttattttagtttcaataatataataaatatataattttttaatattttatttaatttttaacttttatgcatttttagcggaaattcattagatatcatttaaactttattttcgtgaggcaagtttctaattgttccatttttgataatcgtttaaaataattttgtattgcaattctaggatttttctttcatattttagatatattttttaacacttattctatattttgattatattagcgaaaaaacgaaaagaactcgtatttagattaatgaaatggtttgaagcaattttttatttttgccttttttatgatctaaataatttattaattttttttttcatttaatttttggaatcataaaatggaataagatatatttcgcttttactcgtacttgtgatcgaatattttgcgctggttttgaacatcaatagaaaaaataatttatgatgtttcaaaattaacatattttttgaacaatgtttgataaatccataaagaaatcaattttaaaaagtttattatttttataatttaaatctattattttgaatgaaatttagattatcaattattttcattaaataacaaagactcgccattttttttattttttttcattttatctgcctattttttggttttcaaaaatgttaatcatttaacgactgatcaagtagatcttttttcatgtttttcgtgttgtacatgagaacttgatctcgattcgtaccgttttggctcaatggtttatataactaattttcaaaatatatatttccgcatgatataattaaaattttgctcgttggcgaagaaatctccaattatcttaaaaataaaaccaaataaagccaaatttataataaattaaaaatgaaaaaattcatattttctttataatggatagaatttatttaatttggtttttttttaaacacatacaaatattagttaactaaaaaactacaagttaaatagttaataaattccaaaaattgcataaaagaaaaagcaataaaattgtaatattaattcattttaaaaatttttatatagagagtatccgcatagaaaaaaccaatatcatggaaatattattgaaatattttaggatattaatgttacaaatttattttatagattttttcctttataaattgttataaattcattaggttattttaaataagctattttaattttctatatttataaagggtagaattagaatttctcttaataaaaaaactaataaaccctaagtttggtctttttatattattgatgatttatatatttaaatatatttatttaacagattttttggtatatataaaaacatgaatatagattatagataaattgaaaaaatatataatattgatttttggaatataaatttaaaaaaattaaaaacttaataaaaacctaattgcctcaataatgtcttgagcaaaaataattattaattacaaaaattattaaatttttcttattaaaaattaaaaattttatcattaattcgctttttttaacaaccagagtgaaggaggtcttggaacgattcaataaaaattatatgtaaaaattaggagtttatgaattaatttatttcataaaaataaaaggaaaatttctaaaataaatattttcaatttttgattaaatatgattaaaaaattttcgaaaataaagcaaaacttcaatctatatttaataaaattagaaaaaaagaatatttgtagaaataaattcataccgacaaaatatcaaaaattattaaatgcctacaaaaataaacaattttcaaattattaattaacatttttataaaataaattaaaattataaagaattaacatatagatcaacgcaattgttcacgttgaaaaagcttggtgaattaacctatatgaacacaaaataatatctataataaaagtatgcgaattcaagagaagtaaattaatgtcagcaatttttatacaaaatttttaaatacatataatgaaaaattttaattgaaaatagaataccttttcttctaattctagtcctaaacatgaattcgataaagtaaattgaagggttgttctgcgcctccacatttttctaatttttcatcttaaatttggcattgtcgtttgtttttataaaatataattcgaaataaaacccaacaaaattttttggaaattttgctctctttagcttttggttaaatttatttctcacatattattatattttgtaaaaataaataaatattataaatgttgtggaaaatgagaattaaatatatttattacagcattatgcacagaataattatttttaaattcaaatattttatgtaattatttttcttattcaaacggacattttattacttttaatttcaaaataatgaaatttttttgctggctttttttacttaagtaatattttaacatattcatatacatcttatgatagtttttgtgtatttatgtttacacgtttttgtctaacaatcaactatttaatattatgtatatataaaattgtttattacaggagctggtaatcttcagtttttcttcatcattagaatcactctagatacccagatcttcatatttcgctgctcaactaagttgatatatctatctctacatatatgtgggtatata

SEQ ID NO: 4977 - DNA, 3756 bp, Heterodera glycines
  unsure (1)..(3756): unsure at all n locations
tattttatagcccaaagactccaaataaccactgggcatctgaatttagagaaatgcgaaggaatcttatttaaatttatacataaattgaaaatgattagggcttaccgaggtcaaaaactcgtccagctccaggttggcctccttggacagctcgttcacttccatttcgacgtgtgccttttgttggtgcgcctcctccgtgtcgatggtcctctcgtcgtcctctccgtccgttagcattccctcgccctctgacaagtcgcccgcccgactcttttccgagtgactccgtctgctgacagaggccgagtcggccatgtgctcgtgcaaaagtgaggtgattttgtccgctgctcccaccagaaaattcagttgttggcccaatgcttttcgtttcctcgactcaacaatttcctgaacatttccatcgttgaaagaagagatgaacactcagaattgctcacagttgcccgaaattcgacgactttgtccacatttgtccagaattcccttatctttttcgcgaccgtaccacaaatgcgtttggcctccttctcctcctgctccttcttcttaacttcgttggttgaactgagcaaccggtgccattcggccttcgctctgactgctaactgaaaattcccttccttttcgtccgatttttttggtataaaaacgacctttcgggcccactcctttttcgcctttcgctcattggtaaaatctgtcgctatccatcgcacttcttccaacaaataatcccagtgcaatttccgtctcggcgggtcttcgcactttggcagtcgcgtcgcgctccacagccccgcctccctaagttcgcgtatcctcgcgtaaaccttcgcatcctgcaaaagtcaggtggtcagcctatcattcccgtcgaattttgaatacttggacagtctcgggatgggaactgatcagagaagaacttgaagagggctgttgaacaatctcctgaaaggggagatggatttgtcaaaccaatgggactcggaaaagcataattaattcatttttagagaaaaagcaaataaaaacccacagcgtcatcaccaattacaatttcaatcggcttatactgttgatcattggcctctgctgatgttgatggacgactaaaaaagcaaaatttgaagaatcttttgccaaatgttgccttactcatcggcaaccaaacgaagcgtcccacccgacaattcaccgaacgctgctttaaattcatttgtttcaacctcagcaaatctgtaatttgtagagaacggaactcttatcgtcttttaaatttgaattagaagcaaatgaaaattacctttgctcaattgaaggaattgaggaaacagccttttcttgaattgaagacgactcggaacaaaaatttcgcagaagcacctcaaacaaatttggcgtatttcctcccgtaaaatccatgataaattaagctcattaatgttaacctgaattcgaaaaagaaaattgagacaagacatttccctaagaaaaatgtaaaatcgaactttgttaaatagtacataatttggttggtttcgcattgacaaagcgaaaaaaaacaaaggaaaaggaaaagtattcgcagagaaaagaaacgaacgaacgcttaaaagttagagaaatgatggggagagagaaaacaaatggaaaagtgaagaaagacagacacaagacaagacaccacacacagccaatacgacataaaacataacatttgcaagaggtgggagcgcaggnaatacgaaggcanaggcatagaaagcgaatgtttacncaatcagaaggacattatgttaccggacaattgagtacctcccctcggatagtgtttaactccaaacttcaacctgtagctgtatctatttgttgtccaaattatttgtattctccgcttcttcatattctctgctcttttttccattccttacgaattggtaactaaaaatggcaaagagaaaaaatgaccagtaaatgagctaataacaattcgactaaattttaaaataatacagcaccacagagtacacatttgaattttctacccttaaccaatttaatcaaattaaaaaagtaaaaacaaatagtgggttttctttctcttcatcatcgaatattttgagcattagcaattgtttggcttagaggaaatggactaatctccggctggacaagttaaaagggaggacaatcataatggaaatatcttgttagactttcaatattgcacttaagaaatgtattcgtattcgtcgttttggtctgttcgttgtaggtagtatttgtcaatcagcgattcgatgttctttttgatgaactaaaccatttccgaatgcaatttttagggaaacaaatttcaagaacctgaacatcgggaacaaatctcagctgcgactgctttatgacctcttccacgagtgcaccgtgcttcatcactttccctgattattgttgttttttttgttttgtttttttgcccttcccgacatttccgttcttactggatttcattattcgcacaatggcacattccgtgtaatattttctgtcctgttgcactgtgttacatgtcgcttccgcctccttttcctgcggtttgctcggaaggggcaacatcactttgaatttctgccgtttccatgtgaattccgtgttcagatgtagcattgttttgtccgtcaattcctcacccttaacgacagaatttaattcctagaatttgttgctgttagtaccttttcttctgttgtcagaatgctaatgtccaccaaacttctcgaggctctgatcaccgctgggacggataagctgcaaaggaaggcaatttgtgcaagttgttgggtgttttggtgggagaagagcaacagaatggacagctgataaacgctcattgtgacttaacgaacaaacaaaaaattattcattattatgtccccaccttggtataatttgtcaaggtaattgaggtgcacttcggctaaaaaatgatcttattaaggtcgttaattttccaaaaaccggtcgaatttccgtataaccaagtcagcttccttccgctgtgactggtcgtgtagaactgttcgaacagtttgagtgaattttgcagcaccggaggcggcacatagtcagccgttccaagtccatggagaaggacaaattcgctatctgaacaaaatgtattggtttagcaaatcatggcaatttaatttcgaataccaaacgatttgagagcatttttgagtagaatttctggaacaagtccttgtcgtcgatgaagcgaaagatgagaatagcctttgacaaaagtgcgtcaagttcctgctcactctttccccgtttgctgttggtacgcattaatgagataaatgccacagaacggagagtccaattgcggtaatttaaaaacttagagtcgttcaaaacaagttttaggggtcttcagcggctttttcggcaacatggacagttggtacaatttgcgaaccgctgattggctgattgctgcagtgtccaagtcgaaacaggtcacatccgacggaggctcctcgtagagatcaaaatagcttaaaatgttcagcaaacattgtgttaatgaaatgaatgttaaggcatccttcctttttttttaaattttactaaaaatgggtctaggaaataaaatttttaccgaataaaaaggagaagttaccaattttgaccgtgaatccgagccggccatgcatg

SEQ ID NO: 4978 - DNA, 2739 bp, Heterodera glycines
tggatccctgaatcgtgatcagcgaccccgaaaacccataaaaacttgttttgaacgcctttctaagtttttaaaatttccaccaaaaaataggggttaccatcttaactattaccgcggtttgaaaagggaacgacgaaagtccaacgaaggcaagggacgactcaaaaagttgagagggcgaaatggcaaatgcaattggaaatttttgcgatggcatcaaaacaggaaaagcaattttaaaaaattcattaattgcaaaagaaacacggattaattaccgaataaaattaggtaaatggacaatcagagataccgaaataatttatccgtctctaatacatcatctgagaagagacaattacataaaacattcaaaatatatcacgagtgatacattcaaaaaaacagtcagtgaaacggaagaacaacagcaatttctcaaaacatccaaattttccacctcaatcttcggcattaacttcttcgtcagatacagtctgaacataacatggaatagaaaattaaaagaaatcaggaacataaattcatttacatgtgtagggaaaacccaggcaagcaaattccaaatttcaagtttatcagtttttctttgttacctgcgacgtgtcaatcggtgacgttctgcccaagcggtacagacgagccaactgacgacgaatacaaagcagatctaaaaaagatataattgcaaaaattgataaacataaaatatttactttcaatatgggccttgcattctccttcatttgcccttataacgtcatcgctaatgttttgagcatagaccaaaaccgagttgatacaatgaaccaattcgattttctaaattatctttttttattgacaaaaatttgtttattttgtttctgccttggacttgtaaaaacttttatgccaaaaatggccatattttcctagtatttagcctacttttttccttcctgcgttcttgcggattagctcagctctaacccatgaattttgtttctgccacacaaaacaatcataggccttggaaacccgggtgaaggcccatcgaatgtcaaacggaagattggaaatgagttcgaaaagcaattcggatggaattctcccattcttactccccattttttgaatggaaatcatgggagaaaatggcgcattttgtacttttcaaatagaaaaatgaggcggaaagaaaaaaagagagaggccgtgggaaagggataaaaaaggattatagtaaatcatttaagtattttctaataaaaataatgtacaagcgtcatgttaaaattaaatcccttcttacttttgaaatggaagaagaaacgggcgacaggcgacgcttaaaaataatttaaatagtattacaataacttctcagatcgtttaatttcaattataaaaaagacgaaagctaaaattagcggagttatccaatcacttggcaagtaagggcaactgaatctcctctgtattattcatttcccacactatctactatatctctctcttcttttcagctagccttcctccccccttagttaatttagttggatactgtactaattagattttataagttagatgctttttttctaacttttttaatcggcggagtgctcgtgtcgatgcccatccgttggcgcttccattgcttatccccatgatccatccgacggactagcatcagcaaaatgcaatcgttgtgctgcgcccactcgggcaaaccgacaccgtctaacggcaacagatcgacatctgaaagaaataacaaatcacagacggcagtttacaattaaacaatttgttatgaaaaatggattctcagtcagtacaagttaaaacaaacaaaatttttctcacgtggcaacggttcgcccgctttcagcgtgaacacataaccgtctttgattgtcgggtggtcgacaaagtccagcacaccaatttggttttccttgtcgcagaaagcaaaacattcggtgtatttgtccaaaagttgccctcctataaaacaatttttgtaaaacgacatcaataaatggattgagagaaaagcgggaacgaaaacaagtgcttaattacataccttcgggtttgttgatgaccatcatacacaccttctcatcccagctgtccctcagctccaccacgtacttccaaacagcgcacgagtccgtcagtccgatcaaaaagatgcgtcctcctccgtcaccgcttccactctgttcgccttccgacacggttgtcatcatctcacgacccgcttttgacactgtaggaccaccactcacaggtgtgcacgtacagtcgaagaattcttgttccctccatatgaactgtcctctccacacgtcattgttctcaatgtatggaggcgttggaagctacaaaaattttttaaaagaattttaatagaacgttaggggtaatatcaaaggaagaacagtaatttactcccatctgtgctgccagacagacattttatttcgttgttaaattagttccattggcaatattttccctccctagcctcacccaacttttaaaatttaaattatccctggggacaaccagcctacaaagcacaagatgagaattttgtgataaaactgacttaccgacgcttggggactgccttgggctacaaaatgagtggcggcgtcagtggccacagcagcggactccagaagcaacggtgacgaacggtctgattcggccacagcagaa

SEQ ID NO: 4979 - DNA, 1724 bp, Heterodera glycines
atgtttttttcctggattctccatagcctcctaattacttttaaaacactgtcttttttgtgtttgcgaacaaaagttcgtactttttatttacatatttcgggatttttctacatattacatatgtacatatttttatacatattttggactttttcgcattttttcaaacatattttgaaatttttgaggatttttaaggaaattttcattaaatgtccccaaaaaaacacaaaatttcacaattttttgtacatatttttaggatttttgagaagtgatagaaatttcatatggaaaattttaaatttttttttgaaaatatatatttaggtcatttttagggcattttgtacttatttcacccctttacgaagatttttttccaaaaaacaccatttaaaaaattttatttacatattttaagtacatattttgttcttttgtacatatttcatacatattttagcattttttatacatattttatttacatattttgcgatttttcttacataaaaaaagaatccctgataatgaaaaatgcgatcattttttatgtgagaataaatgttaaaaaaaggggggaaaggggaggaaattccgcataaattttaatgatgagaaagtttattgaaataaaacaataaaaaggaggaacgtggaacggaagaggatgaatgaatgataaatgttgaaaacagtgattgaatggagccaaaaaggaagggccaaatttttaatgttattattattattccaaaccgagaaaatttcaattccagacagatgatcgacgcccaatcaaaaattaacgagtccatgatcagttcgagtttaaaaaatacttcaatttgagagtaatttatttttattgcctttcccatccggggaacgcaacaagtacaaattcagtggttgtaagaaaaaacatcagcaggacactggacaaggttgagaagccgaagaccctttgtttttgggggatattcgcgaaagcaattaacaaatttacccaaaaaaggaccaatttccttcaactaagtttttgtttttaggttttagggggcgtggcccccagcttggccatgcccttcttggtgtttcaagtgtttatccgttcgttcatgtcatgccatggcatttgttccattgccctccccccgcttcccattttctttccgatcagtccacaacattcattcaatcaatcagtcctcctcgctcttcagctgcttcagcttcactcgctccaacagtcgctcgcgcagagtctcctcctcgccctgctcctccatcgccaccgccgccttctccgtctttattggtgctgtcgtcgtcacttccatcggagttgccgtcgtctcatcctctgccaaaatgggtgaatttggacacgaaaaaggccccaaaaaaaagaaaaaaacaaacaaaaatttatacactttaaaggaaaaataaattaacaaagcaaaaaattgcaatttgtctctgtccaatgcaaatgaaatgcctttttcggcctttttctgtgctttcattcattcctttcatttaccgctggcgtttgtccgttccgacggcggcgtttgcggctctttctttgcctttttgggcgaatggcacaaatcactcgaggaactctttttgctcttttttgaagacttttcctgaacaaaatgttgtgataagcaaaagcaatgtaaaaaaaacaccaaatttca

SEQ ID NO: 4980 - DNA, 1008 bp, Heterodera glycines
  unsure (1)..(1008): unsure at all n locations
atgaattgaatattnttttttcataattgaccccagaaaaagctctaattggacacattcggtcaaaatcatacaatgagctaaaaacatctttgactgggccaaattttgaaaaattacttaaaggccgagaaattgacaggatccctacaatactaaaattttattttccccccgttttgtgtctgtctcatgtctttctcccccctcccccacactacctcgtccttgtcgcgcttcttctcccgcgacctgcttcgctttcgctcctttttctccttcgccgtcgtctctctgtccctctcgcgctctctctcccgctctttgtcttttttgctgctcttctccttgtcgcgctctctgctgctcctgtctttgtcccgtttcgatgctttgctgccgctttctctggtggaatggtcgcgtgaacgagagctaaacctttttttggcaaaaaaatttttttttaaatgccgaaacgaaaatgtccgtagaaattagcacaccgtttgctggcctttttgcggtctttgtcgcgcgagcgagaacggcgacgcgaccgcgagcgtttgcgatcgcgcgaccgtgaacggcggcgacgcgaacgggacggcgaccgggtggagcgagaacgggaacgacgtcggcgagaacgagagcgggaacgacgactgtgactggaggacctgtggaaagggaaaaattggaggccgataggcggatggatttcggatccaactaattaacgtgtttaggggggaggggcagggccgaggagccatctcaaaatctcataataaaaattccatcgacgtctgtcattccgcttggatacccaccctttcaaccacccaccccataattcttcgcagacttacgttgaacgtgagcgggtggagcgtttgacggatggacgcggtgaggtcggcacaacgcgcggggcgctgaccccgggacggaacggcgaatagccacggcctgtcaaaagcatttgcttaacttttctcg

SEQ ID NO: 4981 - DNA, 4474 bp, Heterodera glycines
  unsure (1)..(4474): unsure at all n locations
aagtaataaantggttctnnctttttgggaaatcanccggcctgcatcatgccatggaatgtgcccaactgctccatgaagccggggtttggcgtgatgcagtccctcttccgcttgacgtactccaacgcctcgtccagtccccagccgtacgctttcattgcgtaagcgatgacagtggacgcggaccgactgatgccctttttgcagtggaccaacactttggcacccttttctctgtggagtttttgaatttcaaattggcatatttttggcaatttgcccacttggcctccttgataaagtcgtaggtgcgttgccaatgcatcaaaagttcggtggtcgtctcgtcggacacccaaattttgaggtaagtgaactgagtggggaagaaattgtccacttccttcgtcacgttcagaatgtattggacactgaaaaacatacatatacaaggggtgtctcagaccaagggccatacgacggacgattgggacagggggggagggtgtctcgggaccgatttttcatacgaaggtccacaattttctccggcgatgacctttttttgttgctattcaaaccatcttttttttgcggcgcctttttccaaaaaaaacttttgggaaagggggtggcgggcggtccggcggtgccgataggcgccgccgggaaaatttttaaaattttgtattgatttcgctaaggaaattgtgcacattttaaatttttcctgcttcgttacgaccccctccctcttttacagccgccccccttacgacgaacgagggggggggggggtgtccgaggcctcatacgacgagggggggataagccaaacccctccccctccatctttacgcccctttttttggcccacccattcgccttcagctcctcccaattggacgcgttccattccgtgccaaggtaaaggtaatcgaagatttttgagggcagatccaattgacctggaaaataagtgtggataaattcaggatcagatatggtatatctgaccaaggatgacgagcatttggtggtcgatgaactctttgtagcgccgctgatccaccgaaatttgttcgctcaaccgccggcggatgtcctgactcgtcctgcaaatggcgccttacgtattttttcaactttttccgcttttacacgtcgtccaggtccacgctttgcatgatttgcttcagtgccgttttgatgcgctgctccgtctccaattgctccacgttggcgtattcccctaataacatactgttagtaccagtgtccgtcgttgtgcgcccgtcgctgccgcttttgatcgcttcctccacctcctcaagtgcctggtcagccgttttgcgttgcggttttatgatcgcaactttggaatgttggattctgaggggatcatatttaaaaagtggattaaaactaggcccggaaagttttgttcatttttggcaagccctaatgatattaagggagatattcttgagaaatttttgaagattttcattgagaattttttgagttcgagcgagaatcccaactcagtacccgaagctctaattaaactaattgaatatgccgtttaaattaggattttaatcctggcaagcatgtccgtgtccatctctaaactcatggatcctgcgcctgttccgtcaaaattccgagtgctctaataaatttagttttcttatttccagattccaatgaaaaatctaacaaatgaaaccctacttttataaattatcctgtttttacacaatgttgggagatcccattcgaccttaatggacgtccctgaaactccaatgagtcgctgttttgcagtgccaatggcaccgacgactgctgactgaactcgacgtaagcgtagtcacagggcaaatagtcgttgccggccgccattcgcaaatacatcacctgagaaattgagaaaactattaacaaaaagctaactgttttgaaaacaatagctgcagaacggtgtgcaaaaaaaaactatctctgatgtttttctgattagttgttttaaattccaatccccccccccctcccgcggggctttcgttggccctctcacctcgccaatgcacgcgttgaagaagttgagcacctcctcgccgtcgcatccctttggcaaattgcccacataaacagtgcgtcggatttcctccactttggccggctctgtcgttggcggcaacggtgggtaggcgggcagaccgagcgccgccaaattggggtcaatcgtcacaatctgtggagggtgggtttttttcataatttgacttatttgggtggatgggtatgtatgtaaggggaagtgccatttggagaaatttaaatgtaagggattggcgcgagttaaagtattgttggctttttttctaaacggtttcattaattccatctttaccctcaaattctcaaacctgaatgcaaagtttcgaaataattgaccctccccttctctaatcgctctccgctaattgaatacaacaaagctttcaaaatgtgacccctaacggctaacggggacgaaccatttgctgtccttcgcccatgtcctgcagttggttggtgatgtgcggcggcagttggcgttggccgggcaaagcggtgatgccgctttgcaacgctgtctcctcgtcgggaatgacatctttggggaaatggcaaattgttaggcaaaaaggacaagcagtagtgatggcaaaaaggtaagaaagctcaaagcagaccccggaatacaggccaggaaatttttcattctcgggtctgataccattatgttttttgtcaggaaaccggcaatatcggaccggcacagttaatatgtctcgaagcaactgaactatttatcggggtttttcaggaaatcgttttaacacggtctaattgtaaggcccctttgccacttaattgtgcgccctttccatcatcccctatcacttgtctgtgacggaatgcagaccaacgctcggtccaggaacaccgtgttggtcaaatgttggccaacctccacgccgcgctcgtcctcaaatttgatgtaggcaaaccgaagctgctgactgttctgcaccatggacaaatcggacggataaatctgaagggttaattcacgaaatttaaatcccattttatttaaaatgttttgtgtaaggaccaccaatttgtgttcagaaattggccgacaaaccttaaactcctcaatacggccgacgtaagaaaagagcatttgaatctgttctttggtggcaaagggcgaaatgttgctgatatgcaacacttgggtagaggtcatgtcgagcaaaattcacaacaatttgctgaaaattacctgtgataaatgaatacatatgtgcttatgttagccttaggcaaaggcaattcgattgcaatttctcattttctttcatttccttgtcaatggatggaatcaaattttaaatgagaatttgtcaagagaaggattagtcattaatacatacataatgtctcatttttaagacgtaaatttttccaggaaactgaaaagcacgagttcaattacatacatactttcggttttgtttttaattatttttttattttttagtacctaaagcatagagacagagaaagaagacaaagttagtagagaagcagagaaaaagaattaggaaaagagtgaaaggaaaaggaaaaaaataacaagagaaatagtgtgtaaccttttgctgttattctttttttatatcgctttattttagagtgccacgggaccgggaatttttgccaaaaccgggaccgggacttgccgggacctgagaagccgggaccgggacctcgattttttttcgggaccgggaccgggaccgcaagaaaaaccgggaaccgggaccaaccgggaaattttaaaaattcaaaaaaattttaaaaatttaaaaaaaaattcaaattttaatttatatcaagtgaaaataatacaaaattatttggttttttatttaataaattaaattaatgaaaattttcaaacaaattttcttcaattttgggaaagaaggggtccggcggtgccgataggcgccgccgggggaaattttaaaaatttgggtgcaatttgttaacagattttcaacaaaaaaaggttggtttttgcgattattaagctcaattggtaggattttcatttaaaaaatgataaaatatgtatcaatttaaaaaaaaactatgaggaatcatattttgtcgatagtaaagccatgagcctacaaaaagaaacttcaaaatattttactttccatagagggattgaacaaggggaaagaagaaaggaaagtcaaggagactagccattaggccatttgcacacttgggcagtgttacttttaaagaatatattaattattattttttatttttccctttgactccaattttcttaaataatttttcaccangaccccccattcttacctagtgc

SEQ ID NO: 4982 - DNA, 1671 bp, Heterodera glycines
  unsure (1)..(1671): unsure at all n locations
aattttttaaatgaaaatatgctaaaaatatgctcaaaattcttaatttttctcgcggcggcaccgccgggaccgtaaaaatccttaatttacaagcaaaaatttgctcaaatcgcaaaatttggtcatttttcggacaaaatctgttaacaaatcgcattcttttaatacatttatttggcaataaaacatgaatttctgccttctcgttaacaatttaattgatgttaaatgacattttgaccattttttcattccgtcacttttcctgggcttcggagacttctcttgggaatgccttcgtgtgcaatgcggtggctatttttaggccgtcactcttccggaagatgtcggcccctgtgaaacccattgtttggcctctccggttcacaaatgcatcaatcagaatggtgtcacctaaaaagaacccagcaataaatcttgtgttttttttttcttttttacgtaaaataaaatttttcaaaaagaaaaaattagaaaattggatggcatttaatttcttttccaacttttttttatacaattacctaaccaatttttgctggtgccaaataatttacagtcaaatccacgctgacaccggccgacccgcgccgtgtcgcgcacaaagcagtcgttgtcacaatgtccacctgtttgatataccacaatttttgttttcatttttcctgaccaatgtcgcggtcagtccgccgtgcaaagtgccaaaagtgttcgtgtgctcttcctgcacttccatttcgactttcactcggccttcgtctacgtccacaactcggcacttcaaaaaaaaagaaagaaagaggctgtcaatgcttcaatcaaatttcagctttactttggcagcagttctctgaaaattttgcatcgctgcataacttttgtagaagccggagaccaactcgaaatatttggatttggaagcagctgccatttaaaattgttggattggatatgcaattaatgctgttcttaatggcctgggagtaaattaaattaaatcgtcagaaccggttcggaaaacaggcaaaaactcgtttccccccccgccctttttttctcacatttctcattttttgggtaacaaatttgtgctttaatgtactttatctgttagctgagtacgttctttcaaattctcaattcaccaagttgtttccgctctttttgagcattccttcccaaatttacctctgtcaaatgcattttactttaaaaggaaaggggaggaaaggacgcccaaagcattatgtacacaaaacataaattagaaaggacaaatcgccgcttattgattctttatttgctaaattcgcgcctcaatgcgttggaatgggaggcgagtgcattttttccaatgaaatttcaaattttcttcatttttttcttctttggcctactcattctcgacagctgtgacaatattttgactaatgcctttccaatcctaagattctcattaaaggcttttccaagcccacccatggaaatgggctgttgtttgggccttcgtccgctatttttccaattgtttttgtctatttttgtcgcattttccgctgccatttcagtgcgaaggttacccggtgaggaagtgaagcggtttgacatcgcaaattcanggtcttgcaaaaactatccaaaaaaata

SEQ ID NO: 4983 - DNA, 1561 bp, Heterodera glycines
  unsure (1)..(1561): unsure at all n locations
gttgttgtccggccccgcgttttgctccgatcgcccatttgaagtggccaccaaacggcggcggccgatgctccgtccgtccgcttttgtcgggtccatccgggccgtctccatccctcgcgggccattccttccctccctcccaaaatcccccgtcgttcgtccatcccgataatccactttacacaaaacaattcatcatcaacatgcattactaggattggatgatggatgtgattggggctgtttgtcgtcgtcgtcgttctgcccggaggggaaggacttgtccattcattccatccgccgatgacgacgacgcgacgatcgaacgcattttcattcattcttccgccgcccaattgtcgcgccaagttcattttgtttttgttgttgtttttttgtaactttttttatttattggcactttttctgctgttgatcatcaccatcatcattcattatttgtaatcggatttagtccgatcagaatttgaaaaaattgtaccaaatggacggattattaattaatgggggacactgcgaaaagctgaaagctgacgacaaatcagtcatttgatcacagaaatgcgcaattttaaattcatacgatcctcgaagcaacgtgtgcttttcctccgcttgctttcattcgattattccgtcccttcccaaagtcacatttcatatcgaggccatcatccccccccatttcatcccccgtcttctcttccccttcccctttttccaaggtcgccgcgaatcgcgacgattcatcccaattttattgccccaattcgtcagtcagttcagtcccaattttctgtctcttccattaaactggttatccgtcgcggcacagaatgccaatcggcggctccaatttaaatgggtgcgacattcgctttttgtgccatttcctcgctcagccaattaaatgcaaaactttctcatccaaactcacgnggnctgagcattccattcgctgatcgatgatcagtcaatgctccgttcaaagaagggataattatggattcattaataattattttgcgatgacaggcgacgattcccataaaactgtttgtttcgtttcttcgtttaaaaagcatccgatccgatcagtccgatcactttatgcttttcctcaccccctcacctcgctactttcccctcctcctccgttccaccaaattatatcattacattacgatcattcgtctctctttttatgagaggcttaacatttcttatagcaaaaagagccaaaaatgagaaatttatgtgccttcggggaaatgctaacattgacttgtgctacgggaggaatggcatttcgcaaaagcattcggcttgctttgcctttacttacaaatattcaatcgatttttgctcttttaaattgtgcttcaaattcgcaatttccaaaagtttcttcgtctctatttgcgctgtgttttacccacacaaataaatccccggaaggcgtcgccaaaagccaacccaaacacaaattaaagggggggggggagggaatcgatgggtattcattgcaaatgccgct

SEQ ID NO: 4984 - DNA, 1598 bp, Heterodera glycines
ccacaatttccatttccatcccctcgggcgcataaattgggtcttaagggaaggcacagtttcattcattcaattgcttgtgaattgatgctttgcgctttgaggtgccccttcaaataaattcaaattttgcttaatttttccgattttccacaatttctctcttttttttgacatttcgtcggatttccgccactttttccaattatcctttcgatgctttgcggtgaacgaatcgatggatttgtgtgaatttcctgacaccgccctcaaatatttcctgttcttttcgcacattgtctctttttagtgcttacttttgttcctccatttcccctcatttttctttaccgaaattcccccgaggggtcaaataaagggggggggggataaagcacatccttaaagcataaataattagcaaatgcggaaacaatcgtttaaaaaaagtcattgaattaaaaatattaattaaatcggaacttccaatagaaaattaaaatttactttttctttccattaaaaaagcaattttattcctttctcatttaaaagttttcaaattgtattcattttttgaatattttttcgtttgtttggccttttgtctgtcatttgatcgtataaattccttccaaaatgctaattgcccaattcttttgaattcttctcacaaatgttgagagtcagtcgccagtcgctgctccctttggtcatttgagccccatttttgaagcacaaaacatttggctacgaatttgggggggggggcagacaaaagcatccgttggaggacagaagaaggaaaatttaaaaaggcaattagggaaattgactaattaagcacttaattgcttttctaaggggccaacaataacaacaataaatgactgttttaggcggaccgaaaacaaatcagacacagacactttaatctcaaatatctctaatcagattgaaattttttaatattttggctctgagcgatttgattaatattttcattctttctgcatcatttttattttaaaataatttaaaataaacatttaaaagtaaaatgcaatttaaaattttgaaaaatattctttaaatccgtcataaatttcaatttcataaggaaaatgatgaatgtttttttgggctctctctctctttgaccatccgtcgtcacttttgctcaatccgcacacatcgaaagccaatgaaagcattggattaatccaatttgttgtgctctctttgctccgtttgccgacggcgttatgccccgagggaaaagcgacaaaaattgcgcattattttattaatcactgcgtaatgccccgaggacattttctgtccataaaagggacggggctttgttttatatgcttgttaattcaaatttaacatggattttttatttgtcattgtttacttgttgagaatttgatttattttatttgaatgggccttttgaccatttaatgatgggcttaatttaataataaacactttcggctcttctaatgactattttgttttctacaaatcactgctgattactctgtgctaaacatatggttttaccgtcagcgtgctgttgcttctgtcag

SEQ ID NO: 4985 - DNA, 3765 bp, Heterodera glycines
  unsure (1)..(3765): unsure at all n locations
tttaattagcaatttatgccttgaaatgatttgctacnctatgtaaatgcgtcgtatttgtgcttcacaccgtcgccaatgtctttcccccgccctccctctcttctctgctcccttctccgatcactctttcttttactctcctcctccttttgttcaccgccgcttcagtcccggctaattcgtcttcgtccaattccccacccgtcgccgtttcgaaatgcgtcgccgtcgtccggccaaagtgcggcgccgttgctgcgttttgagcctttccgcgcctcggagccctaccgttgcggaatgttcgcggaacagacaaacccaagcggacccggcgatgcgcgtgttgcaacgggcacagaacgcactgatccgcacactgtcgcgcccatttccgcaccaaagttcgaaattggcacattaaactgaactgatcagatcgcattgaagagcattgatcagagcagttcattgttttccatctctgaacattttgctttttccagaacttctttctgacgatgctttgcttggaaacaccgaagcatggaaacagtcatttgttgagaggagggatcaggtggatcagcagtaaccgatcaaacttttatttgttcattatcgaaaaaatcttctttgttagcagagggttttcgtgatgccacgggaaaccaattaacgctcttaattaccccatgccccccccctcttttaattgctaatcactccccctcactctttgatcagtgggtggaattcgatttttggtggctgatcggttcgcttctgctcgtctctgtgccgcccctcttcactctgctctatttgctctaccgttgcgtgtcctgctgctgttgcagttcaaagcgatcggagaaggcacaattcgccgaccgccgctttgacagcgtccgtcgattcgtgctgaacgcactgctcggactgctcgtcgtggccaacatgtgagcaggaacaattaaacacattgattggcgaatcgtttgaaaagcgaatttcgaatgaaaaagcgatatttttggcattgtgcccctttttgccatttcctcaattctattcaaattttagcttttgtgccgccgttttgctgatcaacactcaatacgcccagcacggactcgacgaattgcccacccgtctccattattgtgccagcgacgtgttcatctaccgggcagagactgttgaggcaattaaaaattctagcaaaaaaaggaattaaaaatgcctaaattaaagcgaatccgaaaattgctccgcgacgatttttttgtgcttaacggttcactgaacttggcattggacggggccggcgaggcggtggtggaacgactgaagaaggcgactggtgccggactgatcagcgaagtgattgacaaagcgaacagtacggacggagggggacggaagcaattaattaataattaattaattacttaattgaaaccaatggaatcgtcggtcaaaatcaaaacatttttgtcgggcaactaattacataattaattgacctatcgcagcggttttaatacacttaatttacggtaaatccatttcaaattcgcagatgttggcccaatgcgaaaacactttgatgagttaagccgagagcttccgcatattttggatgcaaggcattcgctgcaaatgcgactgctgcggttgcgacaggcgcgcgacaaactgcgcgagtgcgaacggaccgccaaagtgcgttaaataacacaacgccaaaaaaccatactattttttgatttttggcggataaatttctcatacattaaataaaaaaacaaaatttaattgctgaattaagtttttatttccaactataaattaaggacggcactcgcgtcgccctctgccaccaggcgaaacaggcgctggcgccggtgttgcaactggcgggcggcgcggaagcggaggacaaaacgggcgccgattgggaaagtgtggaaagggcacgcgaaatggtgggttttgttgtggcatgtgccggcccagccaaaattgggtggctgatcaaatcaatcatttgcatcggttgattgatcctgcttagtccgatttgttgcccgagggagtgccgccggcgttgcgcgccatcgaacaattggacttggaagcaaagtttgcgccggccaacgagggaatgctgctgctgcagcggggcgttcagcaggtggtcgactcgcgcagaagcggtgagcggacgggaacaattgaattttcatttacttttaagagattgattggttcattaattcagtttatttcatttattttttgtctaatttggcagttttttggtgaaaatctgttaacaaattgacacgaattttcaaaaaatttccctgacggcgcctacctaccggcaccgtcggcccccccccccggttccccaaaaatttttggaaaaaacgtgccgcgaaaaaaattgcgttttgaaaagcaataaaaaaaaaagtcgtcaaattgcatggccggaccccttcgcaaaaatttcggttgaccccccccccctttttcatgtatgatctagcgtcagttctctaactgtcagtcctcttctttttccgcgctcttcgtcttttccccttttctccgtgttggtctcctcgtaaaggttcgcgaatattgggagagttttagtctctaactgtctgttccactaccccctcccctctctctctctctttctctgttttctttctcctcttgccttgtctggaaggtgctatgacgttagtcaaaaaccagcataatgggcgttagtcaaaaaacatcaaattaaaatatttattgatataactttgctcaaaagcatctaaatttttaattcttgatatcattagatagccctaagtgttttctattaggctacaaaatttcaaaaagtttcgttaagtttcaagaaggttatgactaaaaatgttcaaaaaacttggttttttgagcttttcaggtcataactttttttaaacttaaagaattttttaaaaaatttgcaggataatagaaaacacttagggctatcgaaaaatatcaagattattaaatttgatctattttagacgaaattatgaataattttctctcaaaaattttccatttgatggttttttgattaacgcccattttgatggtttttgactaacgtcccagcaccgtctggaacaatctctcatttctctaactgtttgtgttcttaatttcccgcactctatcgcctcaacatcatacaaattttcattgaatgctttcccttaaattaggtcggtgtccaatttgtgcccgacgtgacgcattacgagataatgaagttgcgtctgctgaacggtggccatgccgcaattgcttacccggccgcactgctcgacatcaaattggcgcacaacgcaatgcaaaacaaactgatcagcgcattcttgcacaaattgcaggtggccaattcaattaattcactaattaccggctaattgaataatgacacaattaggcatgttactaaaaaattttccgtttcggttgccgattaccccccccccctcccaaatcatttgacgaagaaatattaattattttattatgtgttaattattaaacgtgtgattttctgttttaaagaccgatgaaattctgcccaccgtaccgccggtgcctggcattgatttgctcgactactgtaagcacgttcagcaaacggtttggcaacccgaaaattgaggacacaatccgacgtct

SEQ ID NO: 4986 - DNA, 3057 bp, Heterodera glycines
tggttggtttttagtttattatttcttttaaaattctaccattgttttgatttgccagggtccgggcttgtcgcctttttggcattggcactttttctcgacctttgctacggctgttgcggtcggcagcccaacgaatacgaagatgactgctgcgtccgatccaccggcgcttcctttttttcatggtccgttcactgatcagtaaattgatcaaaattctgagcgatcaattatttacatcgaaaagaacttaattagtccaacccaacaaaacgaatgatcaaaaaaaggaaggcactgatcgatgatcattgatcactctgtcaaaatgcattagaaacttgatgatcagataattatttgttctttctcagctccatttggctttcgttggctttcatcagtgtgtttggactgctcgctgcgcttgccatgcttttcggtgccaatgtctcccatttggtgtgccgtcctttggaggagccgctgcaacggccggactttctttcggtgtgcaatttgcgagttttaaattaattgtgttattcccgtataatcccagctgctcgaccggtttgtccatctgtacggtttggaccgtccttcgtccgtctctccccacaaatcctccccgtccgcttctgatcacttctcgcttgatcagcttttctcggctaaccgtcgcccggctgacctgatcagcgagtgtgcccagaagcacactttgtacacaatgctcgggttggacaagaagttcaagctgatcggacgtgaaggtcttcaggacgactaccaatacttggtcaatggggcaaacaaattgaaagcgtcgatcattcctttttcatggcattttttggggaggatgaatcgatggcatttccctaatttttgttttttccatcctctacaattgttgattctctgttcagcaacgttccatcatggacaacctttcctctcatcagctgatcgatgaggcactctctcgcggcattgtgccggacgacccgcggctgagcgctcgccaatggcactttttcagtggaccaatgcgcgacgcattgcaacgccttgggcaagtgcggatgccggaatggaacagcagcgacgtggagcaggtaactaccgatcagcagagatttgtttagtttgtatggtgatcattagcagggaattcttccattttgggaccgatcgattacttaaaggctggacgaaattaaattccgtaattatggagttttttcaattattgaaatcgtatggaaaattttgttctctatttcgccatttatctttctctctttgccctttcgttgttttaatcaattctctccactttgagccatttcattggccatttctgcttttaactcatcattcccatgcctctaaaaaacaatggcccagctaaaaaattggtcccaaagcgattagcactcgaacttttgtatgaaatcactcttttcatcagtccccgcaatgacttgtccagcttctgttcctcctctgctgtatttagagaatttatgtgtccacgtgtgattaagtggaatttattttggcactcagtatgtttagcgggaaatttgacaaaaaaaacataattaatttaaactatatcgttttctattccttttaggcgattgaaaaactcaagacgagctacaaagaggcgaaagaaagtccctcgtgggataacaccatcagcactgcttctctgttggcgaagctcggtgacgactcggtcttccgttttctttcagacgccgtgaacttggtaagtgttttttttaattccaatgatattaaaaaatatttggcggtcttttggagaattttatagaaaacttagtccatcatagaatttttcaaatttttttatgaaatttcctcagaatttttttggaaaaattcctttttatttttcgggagcaaacgaccttctctgaatgacgaaaagcaacttttttttgtgtgatagtcaacttgtccccctggcagttgccgtttcttaatacgaaaattcacagcttttaaatttaagtgtgaaggtgagccggtccgtttttccagtactcgccctgtcactggatcgctttgcatttctccgccgccaaaaaagctgaaggaatgaatggccaattgacaagtgtattaagggagaatcttttgttgttgtgtaagacatttttttgttttcgcgaaaaaacgtggctttaaatcatttcaaatccaattgattggtgcttcgtaaggttgacatccaaacacaattctgtgtaatgattcttcattaatcgagtgtgatgtttatggcattgcagacgcaattttttaatagtacatttttggaaaatcaattttaaaatatgtaaattgccaattcgtcgtgaaatattccgtcggctaattcagtgaattttttcctttcctcgtccgtcagttgctggtaaagttgttccatctcttcttgactcgtctcccctttcgctggttgctcctccccaagtccaattggcagtccggcattcagaattcgtctgtccaattcctgatcatccagcgaattgaattgctcgagcgtagaggcgaccattttggagagatattccggctcgtcgtcggaatcgaataaaatttcctcatccgcccttaaatttgactatgaatttttatttatgcgcataatccttttttaaatatcttcagggaaattaggaaaagcggcgctatttgaaaagggttcgaattttattaaaatacagggagaatcattttggtatgctttttgttgtacgatgattattaattgttaacttgttcccgttgatattgtgtcggtgatcggaatcagacaatccatttaaaccaattacgaagcgctaatctaaatttatctccccacccttttgggtaattaaaaaaattaagctctgcgctttactagcgcgaaaaatatatagaaccatgggtcctaactgaaaatttggtaatagtgcagtttgtcccccccaaagctttttcgaaaaattttttatgttttcaaaa

SEQ ID NO: 4987 - DNA, 1356 bp, Heterodera glycines
  unsure (1)..(1356): unsure at all n locations
atttatcgcacattgtataatctcaaaacaattgcaatcattaaatccaaatgatagcaaccaatgaaccgacaacaattaatggtcccaacataaacttaatgagaaatgagaaggcgtaaatcgtcagtccgagcacaaagaaaccgccaatcaaaagtaccaacatcagaatgatcgtgtccatttggcgcttctttcttttatttggtgccaacaatttgggatgaccatcaacgctaattccttttgctagcttggccgtgatcagctcgaccattttgggccacaaagtttggacaattggtccaaaaatagcacttggctgcattaatttgcttaatttgtataatattattgtgtgttccaagtggtaggtcagaaacgtggaattttggttagaccggaccgggacttgccaaaagctgaaacggttctaattgaactggaaataaatccgttatttttaatcgagaaatattttttcaaattgatattcgttgacagttttatccttaaatgtttaatttttgaaggcattcaggccaggcccgtaaccagggtggagacagggcggggcagttgcccccccccctcgaaatgataaattaaattttcccgaaatacgaaatttcccgttttttcatacagcgccgaacaaatactgtgggaaaaatttttggcccgaaaagcaaaaaaaaaaaagctcttcggttgctcctcccgaatttttttctggttaccggcctgattcaggcagacccccattcaaagaccgggacatggaatgacagtaatttccgaccggtcccggcctacccgagtttgttgtgctcataaaatgtttccaaattaatttctgccggcattttcgctgaaatttgcttcaatgattcacgaattgcttgtgacactgatgctttatgctcttccgaagcactttcttcatcctttttcaatttggtcagaatgtttcgtccgttgtccgtcagcgtttgaatcagcaccgtttgtccgccaaatgctttgatcaaattcgccttggcatttttccaatctttgccaacaacaccagtacaaaataggccaacaaacttgtttaatggaccaattaagacacttttatttctgcacactattgtatgtgcccattcagcatatttcctaatagtacattgtttagtcaaaaccgaagagcttttagattaaaaaaaactgcgaaataggtaagaaaatcatgcgtgaaatttgtagatttaaaattttgggacacacatttgggtncccgatacttttggtttggggatccgcacattagagggtttcttattaaaaaagaatatcggcaaatctttt

SEQ ID NO: 4988 - DNA, 2500 bp, Heterodera glycines
aaaaagaatatcggcaaatctttttcaagaactgttgcaaaaaatcttattttaaaaatttacagacaaacagaaaaccataaaaaagcatcaaatgaaatatattttcaaattgctaaatttaatcttttcggtctacctcagttcggcccccaggattcagcacccacggttttcggccccagcatgtttttccactacaacttactataaattttttcttcgtcaaccaaatccaaattgttggaatcattcgaaatcttaatgtgtttagtgctttttctaagctattactttgcgattagataattatcaaaaaagttatacatgaaaattgcgaaaaagtcgaaattttcaacttttttctcaataaaattttttccaggcttgaaaaactttccgctttttggtaagactaatagagcatgttaagagctttcgaatgttacgaagattgatggatttggataacaaataaaaaagctatagtggaaaagcatgctggggccgaaccgtgggggccgaatcgtgagggccgaactgagcggttccgaatcttttcataaattcatgaaaataataaatttcgaaattaccatttacctggtatttgccatccactcattgcctccgaatagcactgaattagctaatttattaactaatttgtatgagcaaattaccaagttcatcgctttctaatacgttttttaggttgttaatgatgtctgatggaacaacattgagttcattgccgggctttgctccgtttgttggtgcaattacaaataaaagcaaaaaagaaatgattcctttcattgactgctttaaacatttttttattattcattactttttttttgaaataaaatattataatgtggcggatggatgaataaattgctggattgatgggaaattgattttaaaacattcgtttttcgcacgtcatttatgctatttggaaatctctcaaaattgccaaaaaccacgttcatccaactcactatttttctaattctggaaatttcataatcagtgtgctttctctaaaaataaatttacaaataaaataataataataaagaaaataattaaattaaacttagatttttgattcaaataaaaaaaagaagaagaaaggaatatgctgtgcttaaaaattagaaatcttattaagaagataaagcaaattggagctacttgaaaaaacaaacttagagaaatgcattttgttcgcttttttaaaatttaaattaatatttcatttttccaaattgcggaaatacatatttgcttaaatccgaaacagttttttgtgatcaaacctacaaaatcagctgttttatgatgtttatagtaacgcgctctaatttaactttggacggagaaaattaatttttcttgccgtatatatctctaaaatattatctgaaaaggaaaaaactagaaatccgggccctgaggatggtttcagattatgccataccttctatttatgcggtccatctggcattgttcgacattatttatgacgctgattatgccaaccattatgacaatgagaatttcatcctactgattcacataattaaattacaaattgcgaattttccagtaactattacgagtctctctctcctttcttgaataattttcctactgagtcctttcttttttatgtttattaattcttcaaataaaattttttcacattgcccatagccatatttgctttagtttattgaattttaattacctagatatataatatgtgtcaaaattaggagtgtcggtttttcattttaagccatcctgaaactatgaagaataaatattttgaattaattttatttgcttacaagaagaacatttcacctccaatctatgaacgggtccaaatgatgggccttaaaatgaacaacaaataacaaatgtataaaacattataaaaatttcgctttattaaattcgaaatataaaataaatcgccaaaaacgggattcaatatcaaaaaattgtttctgagtgaaaccattatggatcatagcaaaatttatagcttaaaaacctattgaaaccttataaaaaattctcagttttagttacttttttaaaattttaatactgtttgaaaatttcttaattaaatattttttaatatcaaatgttcattcccttagacaaaaatgataaaatttctggttatcgacttccgaaatccggcactttttgtaccgaaagacttttttattttagatttttttcactttttattgttgtacacagcggcccaattttaggctctcagtgcaaataggtttattatttatttagtaatcagaacgccaaaactttgcaaaactttaaattttcttgggattttcccttgtaaaaatggaagagccgatctcgagttaaaaacataacttcgaaaaaataaacagggattcgatagagggggtcaaaatatgggcctatacaaaatttcaaaaaaagt

SEQ ID NO: 4989 - DNA, 4483 bp, Heterodera glycines
  unsure (1)..(4483): unsure at all n locations
ttattaaanttcgaaatataaaataaatcgccaaaaaacgggattcaatatcaaaaaattgtttctgagtgaaaccattatggatcatagcaaaatttatagcttaaaaacctattgaaaccttataaaaaattctcagttttagttacttttttaaaattttaatactgtttgaaaatttcttaattaaatattttttaatatcaaatgttcattcccttagacaaaaatgataaaatttctggttatcgacttccgaaatccggcactttttgtaccgaaagacttttttattttagatttttttcactttttattgttgtacacagcggcccaattttaggctctcagtgcaaataggtttattatttatttagtaatcagaacgccaaaactttgcaaaacttaaaattttttgggattttcccttgtaaaaatagaagagccgatctcgagttaaaaactagacagctaaaaaataaactgtgattcgatagagggggacaaaatatgggcctatacaaaatttcaaaaaaagttacccacaggaaaaaatgttttcccatggcaaacatttcaatactttaattcttttttagccaagtgcgcaatttaaggccaaatcaaataaaactaacaatattctctagaattttttttattaatgaaaaaataattctgccttcttctttaaaagaagaaattgaaattaacacacaacatagggaggacttgaacctgggaccccccttttggtgactaactcacagaccactaagacgaaaaatccagcataattgtacttggagcccaaaattgggccgctgtgtgtaccaaatacaaaactaagatatcatatgtattttaaattgaaattttttatttaaaactcttggaatttgaccttttttcaaatgcactaaaatatgagcattacttaatatttaggagttagttacatatttcttaacaatttcggggaaaaaggcacgaaaaaggtattaaaggctgttccaaaattacgtgcccggcattatgcaccaaaatcgcagcaccaaaattagctgactgcgtgttcactgaggtattgtcatatgagattgtccactgactgatagttcgctaaccatccattagcaattctcaactcgattctacgcaaaataatccgagttttttacctgataaaaaccgtcaaaattttccttctacgcttatttagtgatttgaagccggattttgttcaacaatgggtgaaacaatgaatgctgtgatgctgagaaatttttgatctcatcgacatctgattgttttttggaatagccgattttaaacaagtccatcagatcacgaagttgattcattgggacttgaactttctgcaataaatacataatcatctattgcatatttttcaaggcaaaattatattttttgtgaagcccattaaaaatttcctggaaccataacggaaaacgaaaaaagcgcgacaggtttcccgcttttttccgttgccgccaaattcccgtcaatttttgcgcaaatcccgacgcaaacataaaaaatttgaatttttcataaatttatttaaatattatcaggttgaaaatatttaatattaatacatttctttgaacatagtcttattttttaaatcttacatttttataatcaagcaatcgagcctccattgaaatcactttcctcgcgactccaatcgttgttctaatgttttcgaaattttcatccatttttttgtggagctgctggagtgccttgtattcctcggactccggctaaaccaaaaacaacatttataaaaagaaacatcagaattaataaaataccacaaaacatgctaagaacaaggaaactcctttaattaagagaccaaataaataatcggaatttcaagtggatcaacactttatttgaaacccgaattttcatatatggatattgactcacttttgttgcaactttttaggggataaatttttctacatcttctgcgggataggtatggaccgggatccccgctcccgaggatgagaaaacgacggacatcggtaaaatccgcgaatcccctactctgtttgacctgctgaagatatttcgtccaaatcatcagtatccaattcatcggtatcataattctgatcatcgctttccactcaagaagctctcacaaatgcaccaagcagtgcaacaaatattgtagaattattttccacatagctaaaaattgacatgatttttttgcattaaatttgatttttgatataattttttaaaactgttcatgcattttatttaatatcgaacaaattaatataagtgaatttatttatttaaatgctatttttctaggttttctttttttctatttctctgctgaggttccacctctcatgatatcatttacaaaaaaaaattttttttgatacaatacttttgacctgagtgtatttttcaattatcgaggcggaaaagtccaatttaattgacaaatttcaaaaatttttaccgacgcatattgaaaaaagcttctcaaggatatttggaagacgaattttatttaaatcgaatttaccgctttcaaaatttcaaattcatcactgaacaacaaacgatcattatcgagaagattgcacaacattttctgatcagtttgcaaaaataaatgccatcaccgagtaaatgaatctcaactttgaacgctgctggttcaacgtcggggatctccaccataaggcaattagcagaggctaattgaaaattaactaaggtaattaggatagactaattggagaatgaaagctgattaaatttttcttttaaaacaaattttttaccgttttcgctttgttttttcttggcgtcaaacaggaacattgcctcaaaaacatagaaagcattcttcaaaatgagttgatgtgaaggctaattaattcaaattgaaaaataaaaattttaaattagactcgccttttttgcgtctccgttcaccaccaaaaagtgcaaatccgaatgtttacccgtgctcaacaaatgattcatccgtcccattaattaaggaaaaacatggctaatttttgtaattaatcgcaagaataaggagaatggaaactcagccatcgcctctcatcagctgacaccaaaaaataactgctttcttccacttggcctgagtgatcaaagaatacttcaattgtgatggttttccgtcccaattctcgactttatttatcgccttctcactctttttgaagcaaagtttttgggaaggcttattttgaggactaatgtcgtcatagaaacccagcatttcagctttagtttagcttaagcaaattaaatgctcaatgcagcaaacgaacatgaagcagaaaattaatatatatttggctcctaatggacgtaataattaaagcataaaaaaacttttgtttatgaaaaaatgaaaaatctaacagattatggtatataatcaatattaaatttgttcagttgtatctgaggcgaaattttgacagtttgacttttttctttttccaaatttaaggtatatttttttaagcacgtatagtgcaaataattaaatttaataaaaaaataatttaaatgtcccatccctattaatcaatgtttcattacaatacatagaattttttttaaatattatttaaatttaggtaataaatatttttcttttcatcatacattaaaatatatttgcgcgttaataaataaattcatttaataaaatatcttaaaataaaaataatttatcgcgaatgaatgatatccgctgcataattttacaattgatgggctcaagaatcacttcaaaatgattgatggaattataaaataaaaaatagtcgaattatgcacagaagaatagccagataaacaaagatttacattttataaaacaatctaaaattaaaaaatatcggaataaattggcttttaaaaaattatttattaactgaatttctttgccaatgcgcaacaatgttttaatacgaaattaagaaaagtgtattatttaagtgaaagaaggtgcatatttcttcaatgaatccttgagaattatatgattgataattaaaataattattttagtcatccaaatttaaatttaaatgaaaaattaatacttcataaatattatttttatttaaaataattctttatttgccctattcatcacgttaaaaattgtcagctaaataaatggaaaaaatttatatttaataaaactcattatgtatacattaaaatgcggaaaccagatttgtcgcgctttttaaatttcaaaaaagctggaaatttaaaataacgaaaacccagccacttaaatggatacatggcatttgtgcccggacatttaataggaggcatggcccatgcacaagccattatccaggatccggattttctagttttttttcccaaatttttaatagcattttat

SEQ ID NO: 4990 - DNA, 1114 bp, Heterodera glycines
  unsure (1)..(1114): unsure at all n locations
acacagcggcccaattttgggctcccagtgcaaataagtttattatttatttaggaatcagaacgccaaaactttgcaaaacttaaaatttttttgggattttcccttgtaaaattagaagagccgatctcgagttaaaaactagacagctaaaaaataaactgtgattcgattgagggggacaaaatatgggcctatacaaaatttcaaaaaaagttaccaatagggaaaaattttttccaagggcaaagttttttctttttctctcattttgacgtactatttcccagtctctaacatataaaatagcacgtcattcattttttttgctaataaactatttttttaatttttatttaactttgaaatattcttcagaattttcccttcaaaatgagcacaaaatggttttgtttggtctattattggccaagttataagctaaaaaaatttcataaaatcaagggtaaaatatagtgtgtaccttttactgtttgtatttgttcttttggcgttctgtatttattattattttatttatttgctttaaaaaattgaaatttatacacaaacacaaggaggaattgaacttaagagccccttttttggtgactaactcacagaccactaagacgaaaaatccagcataattgtacttggagcccaaaattgggccgctgtgtatatacacgatcaaaaataaaacaattacttcaaatatatgagttttgttaaaactaacaactacatatttatttaattgaataaataccaaacaagggattgcatgaaaatgatagagtaacatattttttttaatggattgaaataaaaataaaaattattaacctaaaatttaattgcaaataaaattttgtatttttgtgtgcttttgttaacagattatgcaccaagaatttgcatacactaaagatcaaaaaaaggtcgtcgcaggcaaaaaaaattataaaagtagtcgatcgcaaaaatttgcagctgaccctgaccccccgccctttggccattttgacccaaaccattccaacaactttgttttctcggtacttttgtaaattggccaaaantataatgtcaattgtaaaggataaatgtg

SEQ ID NO: 4991 - DNA, 1107 bp, Heterodera glycines
ttttgggcattttcctttacatgtcatcttcttttactacggtccccaggctggcctgacttaatttttacctcctaagaatggcatttttaaaagagaaaaaaaaggcacccacacaatgccattgatgcactttctgttctcataaaaaacacccgggcatcatttttacattttcatataaacgtcaatctttgtttctttttctcaattgtttggggtcaacaatttgccgcattcctttttttcaaatcatcattttattaatgatagaattattcttttttttctttcattagaaattctttacattttttgttacctgcaaatttccatttattttcaaatttctcttgatttttttttatctagaaaccaaaagctgagaatttatatcaaaaccacagacttttgcgaatttcaaaattccttttagcgaccagattattttatagtgaaatttttcagtgaatattcaaatcaattttttttttcaaaaatagcttaaaaatcattttattatatattttaatcttctttttttttaaatttccttcactatttaataacataataagtttattatgtcattttctaccaacgctgctacaattaatgaaattagccatcatcagacaactggtcagcagcaaagttagaaaatagttatataattcaaatgaaccggggcagaacttcggccctctgattcggcttcgctctttcggatttaagttttttttgtagttaaatcttgttttttgaaaattatttttcggagaatagtaaattcgtagttcactttctgtaccaaaacaccgccgaagccaaaaggacccaggcgccgagacggcggagccgaaatgtccagtcatttgagtgtgacggcatttgacgccttataacttttcttagaaatgaccaaattcaacattctggtatcattcactagctctcagtgctcagtatcctcttagcattcataatttcaaaaaattccgttcaatttcaaaaaagttgtggccaaaaatgctcgaacaagaaggttttttgaattcttctagccataactttttggaaacttaacgaaatttttcaggataatag

SEQ ID NO: 4992 - DNA, 2259 bp, Heterodera glycines
  unsure (1)..(2259): unsure at all n locations
tttantttgaccaattggcgaaacttatcaaagttggaaacgccgatcactgatcagacagtggacgtaattgtcaaaacactcaaggtcaatgcaaagtgtaatattcgtattaaaattagtgaagaattgcattttcagcttgttggccgttttctcgagaatgatcgtgggcctcaagcaatggctgagtttcttgctttgtttgaccggtccattcaggaaacgacgactgaccaattgagcgagtaggccaagggtcgattattgggataaactaatttagaaacttttaggccggcgagggaaaaagtgcgatgtttgttcaatttgcgcgagaacaaatggggcgttgtcgcggaagtctgttttgaaacacttggtttttatttccgattctttttatagccaaatgtcggcgatggtccgctgaccactgcttcgacttcggtgggtatcattggcccggacgatgttccgttaacggaggacgaatgcgcctttatggaagaaaacttggacaattttgtcgacaattctcccggcgaatctcgtaggatttggactgatggttttaaatccaaacgttataactaatatcaaaccacacaaaaaaaacaatgtctccattaattgaatgttttcagaatgcttgaatgcatttgacgaggacaacgttgaggacgacttcgagaagttcctacaggtgctttattcattagaaagggtttctcttctttaaccattggctctccaacaggcaacggccattcgtgctgctgagaaggcgttggaaaaggtgtccattgacgaggatgacgacgcctcttccattgtgtcatcggtagggcgggccaactttgtaattataatttgaatcatcgaatcagcacaaattctcgacaagcaaatgacgaaaagtggagaaagacatcggaacacaaagagaaggaagaaagaaaaggaaaaaagagctgataatgagccagtcaaaaaagtaaactccgaaaattcgtttccgcacctccgcttcatgttttaaattaaaatggtatgctaacaccgtattccaatttttggcagttgtataatggtagcgcataggcagcgggacttatacataccttcttaatatctgtctaattattttgatatttttactcaatgttgaaagcgagtgatttaaaaacgataaataaaacgcattgtttctgagtctaataaaaaaaagccgtttgttttctaatatccgtgtgagttcttcacttcaggttaggggtgtcgttttttcatttgacaataaaccgagaaattgccaatcctaaacaggtcacaggacgggtgagtggccatgaaaaaatgatttttgtaacaattagtaatacaccactgcaaaacattcgtttatttacttgtccattattcggtactcattcgctttgggtcctatattttggtcaaatttttttttgttttttattatcagaattgcttttttaatgaaacgcttaaaactttttacacttgttatcatcatcgatttcgaccacctcgggatcccggacccgaattcaaacaaaaagtcgaaaattcaaatttttcaaaatttgcttctatgttagaatccaaacaaaattatcattttttcatgtttcaatgatttatgactacttttagctttatttatttatttattcgtaaaaataaaaaagtcatcagaagggtgagaaccacttactctgacgactattcaggtaaatgtgtagtagagtaagttacaaaatacagtcatggtcatatgtttaggaacacctcttttttgaataaattctttgaaaatattgcttctctggattgaaagaaaaataatcaataatctttttaatgcattttgtagcattttttcaaattcaggtaagaatggatgctgatcaaaaaaggtagcaacaccaagttgatcagatcactccttcatggtgatctgatcagcccattttggctgggaacgagggtaaatttcaaaaaaaatttctagggggttgggaaactttttctggaaattttgagtaggcccattttatagagcacaaaatttgctaccgaattgcctttggaatagtgggtctacgatttaggcccgctgagatacgtcgacttttatttcggtgcctataaaaagtactgtatttcttaagaaaataatgcattttacactacttcaaaattgaagtgcccatacctcagccggtataaagtcat

SEQ ID NO: 4993 - DNA, 3031 bp, Heterodera glycines
  unsure (1)..(3031): unsure at all n locations
acaatttgatcattcgctggtaaaactaagtctaaccacgagttttccctggtgggtccattcgtggcattgaaaaggaaagcttactaaaaaagtggcaaaaaatttcaccaaatttactcatagaaattggctgcccttccttccataccaggtctttattcggaaaattaaaatcacccaacacaacacaattattgttatagaatgtttctaaaaatttaaaaagttctttggtttgtctatgtgttgtcttaggtggtcggtaaacaagcacaaatctgattgattttagtttttgtaattgaaaaaccaaaatttcgcaattatattttgtttcagaaaatttaataaaaaactcgcaaccgcccccacgcgttaatttttgtgatttcctatgacaaaaataaagttatagttttcgcttatccatggactaaagaggattgagttttcatcctttgtccatgtttcagttaacagaaaaatttctatgtttttatttaccaagtttaaagctatttcatcaattttgttgtggattgatcttatattaactaagcaggctttaacttcccctattttcatcattggtttattgggcttaacatgcttaagaccggaaaagatattcttattttgtgaaaaatatgtatttgtcaaaagtgatttggggagaagtcaattgattttccggaaattgggaatgttcgaccgttcaatgaccgtcccagcgtagatcacccagtctccgccgtcttttcgcttctctgcacattctttctgcagttgtcaacgtacgtccgctgggctcagcgacggacgaatgttcatgttcttccatttgtcctgctgcatcattgccccacgccgtttgttccattcagccaatgccaggcgctggaatttacttgcggggaagataatcttcatcaaatgaagtagacatattcttgaactttgccggaaatttttggttttggggcaatggtaaagaattgtggttcctaattattaaaaaaactttattttgggctcgaaaccaactttataagggattttcgagggtgctgattacgaatcttaactcggatttatccaattccaaacacccgaattcgaacaaaaacgaaatttttttgcgttgatccatttttctggggtaaaaagcttctaattcattcaacaattattaattctgatgtaaaacaatgcttcaattgttattatttatatggtccctaaactgcatatgaaccannataaaatgtctcnaaaagtatttatttttcaaaaaaatcaacgcggcaaaatttcaccgccaatttttaaacttcaaatttaattcataaagcgaaaaagtatatgaaaatcatgagttgtcattaattttaaaggtacttatgcagtttacggggcagatttaacatacattttttaatgcctataaaggtattcattttacatgcataaaaacataaaatacggaatttgaatatttattcacgaaatttgataaacagaagcaacttgagtccaaaatttgtcctttttgtcgttgaaatatagttgcatgtcttttccgcattcacaaattttttttgagtgaagtaatttgcattctcggagccattactcagcgtctggtttttgcagaagagtaaataaatcatgaatattgaaagtcttttaaagtttccatgctcaaaataaaaatgtaaaatgaataaggcattaaaaaatttcttcgacgtatttcgactcgtgagtttaatgaatgcaaagagacgcgaattgcatagtttttattccatctaacatttgtccttcatctatttttaaatatttaattttgatcaatataaaagtatttccgatcaaattcctaaaatggatctcggcaaaactgtggatgctttagctgaagatgagtcggtggaactcttaaacgaatcagcagaatttcgggtaagacaacacatttaacagacagtgaaaataactcaaatttaattttgctttcagggcgacatggactccagtttcggttccgaccttcactcggtatctttccaggagatttcctccattttgcgtgccaaaccggacatcaacgtgttctacagaactccatgttcgggtgccagtcgattttcgcgtcgttcttcttcagcccgtacacaaattggtgttatttttcagaatgaatgaatggctttctatccattgaatgtttccagaagaccacttcagtcgtactcttcccgattcgcttttgctgcgcatttttttctatcttaacaagcgcgacttggttagtgttatgctcgtctgccgccgcttcggccaaattgcgtaagacaaattcaatgcgtgtcgggggggggggggattctgttgaattttaggattacagcttattaaagaactatttggtctgtatgatcaagggtcttgccgtacccttggcttcggggtggggcgttaaagaattaagtcccctcacaaatcaggcctcccccctctggctatacccttaatatggaacagtgtcttcatcatttttatttttctttaaaatttagaaatgacaaaactctctgggaatttatgaacttggccggccggcttctcgatgaagagtccatccatgctctgttcgaccgtcagctgaaagtgctgcggttggcatcgaccgaagtcaatgccattaaacaaattagctgaaatgaatgcatctgacaaattcagataaaacccctttctctgttctcgtggtacaactcgcagcagatgaccactgcgcagttaacgcatttggacctgagccaggccaaatttggctcaagcgacacactgctgcgtctgctcattcggtgcgagtcgcttcaggtcagtgagtcatcggcgagtggacgcaataaaagtgccatttaaaagaggcattataatagcatatttgttgtaagcaggggcgtatctagaaacatttttcgggggggggggacccgacctgaagactttttttttt

SEQ ID NO: 4994 - DNA, 1681 bp, Heterodera glycines
aagggagggggcgggggggtcgacccccccccttttccatgtatgttttattcccctctgaactttataatttttcagactcgtggaactgaatttgtcctgggctgaggtggatgtcgatgccatgctcgccgtctgccgacttatgccctccggcgttcgtcggctaaatctatccggcttccgacagctttcgtcactaaatgaccgcagtgagtctctctctgttgggtgcattacgttcccccccccccccccagaaaattttttgtttcttaatctacaaacatgtttaaaaaaattcgggggaaacggcgggggtggaggagaacactgctcccctctctttctgttcgtctcaattttgccctttatttccccaaggcgttgcccagctgtgcgaagtttgtccccatctcgtagaattggacctgagtgataacgcgttgctaactgaaaattgcttggattccatttgcaaccgcctcaaatacctccgccgtctcacactgtcgcgctgttacggcattgaacctatggcatttctgcagttgaacacccttgacgaactgaacattttcgggtgcattaccaatgacggggtgcgaatagattttgtttgtgttacatcaacgcccttttatcgccattttttgccaggtgtctttgctgcgaagtcggcttgccccgactttagtcaacgcgtcgccttattcaacagtggctaagccgacggtactgtttcaattgaatagaaatttttaccggtacttaggaggagactgataaaacacaactttcaaacggaaacatggtcattttaaaaagagaaattctaaattttaacaagactaatctagcaacaaaaatctctaacaaaatttgttttttctggattgcaaattagaccccattttgacccgataatgcgcaattatactggtaatgtgataattattggcggtattactttgctacttaatcccgacaatacaaaatcattaaaaggttggagacagtgtgtccagcatttggcggcatcgtacccgtgacctttactgaattggaatgacttggttcgttctttccgctttgatctcctttccctcttctcgccaattttgccaccattttcgtcagcatttttaccttcagtagttttgtcatattgataatattggatctctcaaaagcactttcaaaatcttttgtttctgtttgtgttttcagttaatttagtttttcaccaattttttctttttgtctttcattttttgtaattttaccttctttttggtggatattctcctgttttcttctggacttaccaaaaataaaattttgagatttgactggcagttatcatttttttattaaagtggaacatttgtttggcattgtacatacaatattgatctcttgttaaattcaataattttattaaatttcattttaaatattatatgaggctgattgtgagggcatccgacactcgtgttgttttctcgtatttggatttgatttgtctcccgtcgctgctttcacaaattgcgcctttgggctatttgctgctgggagtgcgttctgttcggtgttgttttggccacctgtcaaccgttggttggcattgctttggccaaagggccgtgccgacctttctccgttctctgtcatttgttgt

SEQ ID NO: 4995 - DNA, 7832 bp, Heterodera glycines
  unsure (1)..(7832): unsure at all n locations
tccgcgaggcgctttctttgcgcccccggagtgatgtatttcgtgcaccaactcggtgtatgaccctttgttcacaaaggaagcatatgcgatttgagcccctatttggaatgggggttcgttgttggattatggccgaaaaggaatgattcggctgaggagcgtttcatttccttccactggcctccaccgttcctctctgaacggccgggagaagcggaacggtgttcctctcccttggttggctctcccctcatttgaatgagggggaaaattccggggtttttcctctccccggaaaatttgagtacatctctgtacttcttctttcacttcaacgatggaagagatagctcttcggagctctgtgcagttaaaggctcctcctgccctcatttccttctcaaccacttgggtgagaaggtggtagggcagtttggacttaattgtggaggccatgaacttattttgttcattctctccatagtccaacaactgatggcaaatccgctcaatggactctgagaattgtctcagagactgaacggatttagctggtttggcaaggtggagcaactccgcttggatggactccaccattgtcttttcatccccaaaccgctttttcagaatctcaactacccttgggtagttttcatctgacggtgggtataagtcaattgctctcctagcaactgacttctctgggaggcatcccagcaaataaatgtgcttcttgaagtcttcaatttgaagactttcaacggaagtctcaaagagcttccaaaacaaaggccattctcggggttcccccgagaatttgggcaatgttatcggcggaagcgtcacatcatgacgctaatgcaccactggtgcctgctgcacaacttgtgctggctgatttggctggggaattgcatcccccagctccgagaggcctaaagccccttcaatggtgtcgacaagccctcgggcttggtcgacccaatgcatgaaggccttgccttctggtttgaagtctctgtaattttgctcttcatcttgaagagcttgtcccttcactctcaggaaaatggcttcccattttccattgtatttctccaaaagagaaattgttttgcagagattttgtctctctgcgatcagatctgcacggacactttggtccgccagctctttgcccaagttttcttgggctgtctcaatatacatcttgagacgcaccaccattggtgcaatggagatgcgcaagagctcactcattgctcttacgcttgatgaaaacacaataaacccctttgggttgtgtgtttgatccaagcgctcaggccgcgctttggattggtttggttggagggtaggcttacgactggaagccgacccctacggggctccaattttgtgggcaaaaagccacaaaaatttgcacttcccggcagaaggggaagcagactctcccggcagaaggggggagtcttttaagcaaagcgaatttctgtccaaaagacagaaattcactgaatgtccaaagggacgaattaaaggaggaaattcctctcctttactgaagggacaatttggaaggagaaatccttctcctttcctttgataagccttttgtgacccaacgggggtcaacggcttaatggtctgtattaaagggctcctgggtgtccctttaacagaaaatgataagactaagactctttcttaatctttattcaattcaattgcacaattacaatttaatgcaaatgcttggacagaaaactgtcccgacttaatgctgatcaagcagaagtgcttgtagaaatctcacaagatgaagtgaatcaagaagtgagaagtaagaagcaagaagcaagaagtgaggaaaatggagaatgggccgggcttttataccctcacaaatcaatgggggcggggccaggcacgtgaaaaatgtgcacaaacaaatggaaaaaaatccataaaaatatgaggaagagagaagatgactcataattaacgagcgagcgaatgcaaaattgatcgatgaaaaggattaaaaaataaatgaaaatttccaagaaatttgtgtcgcttttggcgacattctccgggcctcgagggtggcggcaactgttgctgtcctccgccaaaattcttttcatcgtcggttcatctgaagtcgacgagccacccttggaggacgattctccaaacgtccatctggtagctgtgcttggtcaggtggaggaagatgcggttcctccaccactgcaggcgctctccaggcaactccgactcggtttcggatgttgaccaattcgaccgggtagaggtcgacgagcatccctccttcgtgagggctgaagcctacatattcttgtaggcaaggcatgaatgggtctatttcgtgacccatgtcaagtgctgtctcgtaccatctgggttcatggtatcgctcaatccacgaactcagaggctcaatccggccatgaactcgacgttcacgccggagatgagcgtcattcgctctctcttcttcctcctcttccaatcttggatcgcgtagccggcgatcaacatgatcgggaaccaatggtaagactggctcccagtcttcctcaaaccatgggtcccgngtggggattctcatcgccaaaaaggcgatcattgagaatctcggcattttcgggtatgacaacccggctagcggagaagtacggcccttctcttatgggaataggcattccgtggaaggatgatttgaagagtgtgtttgggtggcaaatcagccacccttttataccaccattcgatggaagcgatgaatcattccccacaacaagggatgactcacaaaattttttgactgccgagaggataggacgtgattcaacaccatatccgaaggatcctcccccggccaagtacagtattgccaatactgtaggcacattaccgtacccctttctcgttatagaccaggaaataaatttccaaagtctatagaaaggagaaagtttaatgaaaattgttaggcaaacaatgcctacacaaataatcattatgaagatgagtgatgattggaggccaatcaaagaccaaagggtcgccttccaatcaaaattccagttaggccaactggattggctgtttatcactctttcagagtgatttggactgtaatcttctatttgttcgggttggacatagtgtaatgtccccctgagaacaaaagaagtgtttccagccaaacattttgtttggcaatttgtgtcaattctggctttatcaaaagccaaaattgtttggtaaattgatgcgttggaatcacattttgtcgaaaaatgtgttccatcatcgcatttaatttcggcaagagaattgccaaaatttgtcgagcacacataacggaattgtgctcccgttgaacatctgtaacacccagatatgttcaacggcaaaattgtgcaaaggctttggtgaagttccaaagccatttggagaccttcgatttgaaggtttaattggacaggactaaatcctgtcaaggcaattacctttctcccagtatttctgagttggtaatttttgatgtttaatggaagtctcctctctggactttccattaatttttcaaggttatgtgaacggcaattgcagttcactaaacctgatgaatggtcaggtatgcaatcagtgcatgcctgaacaccaagactgcaattgaaatcaattgcttcttgccgacttttacagttaaagtcaattgttaatggctctctggttagagccatgttgctcccgtcataaacaaaatctgattttaagacgggggcgggcggaaaagttactccgatcggagtagactgatgtgttcccatttcagtgttcttcctggatagaggaacacctgagttgacttggtttttcgcccaaggtttccaggcgaattattgcaaaaacaataaattcccaagaattgcagcccatgatttcatagactgtcttggacttttcctgagcataccaacgataaaaaaggcatgcactgccgcctaagaggcatttattgccccaaaaggctgtgctgtccaggcaaaatgaattgcctggaaaatcgttggcatcttttagctcaggaatggaagtattgtggcgaacttcgctacaatactttccttcacaggatcccatcttagggcaccttttagcggccaacacattaattgcgtatgaacgttgccactctttagtgaagctttggcattccaaagctaaagccttcagcaaaacgttaattgagccaaggagaacaccttcctctgttttcagaagaagagtgtttgtttggccaactggcagcaacgtaagcgttgctgagttttcgacaatgcatctcatgcttgtcgcatttttaaagcatttttccgatttggccatgactgcgatggtctctgctccagtcaaatcctggagagagttagccataaggacaacaaacgccattgttctgtaaacacggcgtgatgtccaattttgagaagctgttgcccttggcctcctatctttcggaggccgatttgggccagctaaataattattggcctgataaattgaattatcagccaaatgaccatataaagtcctgaaaacaggacttttaatatggaaaaagccataaagcttatgctcatgaatgataagcaaagtccccctgctaacattgatgaaatcaatggataacaggttggattcgctaactgttcaatgcaaaaatagcattcgatgagttcacactcatcaactgctggacataaaatgtccttcttgaacatgtgtttcgaatccatccaaaaatgaccttcgcattggaagtcatttaggaggatttcctttggtagctcataagtgagcttctttacattctcatgaatgtaacagttctctgcacagaagagctcaactttattaatttcctttggaatctttgctttaacgcctttgttaaagcaaagaagtttgcactcattgcattgattggttggataagcatttgtttctgttccccccttaacgggaagagggaacaaacatgctaaaattacagtaaacgccattatttgcaaaatatggcgcgctgtacaaaattgagggattgcccctctttgccttccttcttgaaagcaaggcgtgctctgatcctcaaaacaaagtaataatactttgagttggatcattagccaagcaatggttttacgcccaatagaaagggcttttaaaattgagagaaccatcaggcttatgctgatgtaaaaacaaagcgtcaatgctatgattgattgctctgttcgattaggaagagtttcttcccatttattgtccattcgattaatacgaatggaaaaaactgaatggctcacaacaccattcttttttatgcaacagccacagattttcttatctgtgggagttactttcggtgtcttctgctcaccgaaatgagagtcagattggtatgaaatctgactcggttgatcgaaaagaactgacttttcgatcattttttggtggtcgtgctttggcatgaccatggcacgacaaaaaaatgaatgtgatttatttgtcacatttttcaacccactggttgagctgcagtggaaagcaatactttcagacggtttatcctctactctagaggatacgcctgagtaaagggtttttgaacgaggaaactctcctctttgtttggaggactgtttcttctgaacagtccttccttcccttatctgttgaggagtgctcccaattggagcatctccatgataacagatcatatagtggtgctttccaccacacttcaagcatctctttggagattggcattgttgtgccttatgatctttcataaggcaattaaaacattttcgctgttttgcgagccgccttctgcgtgctcctggtgtggaatattggggacatcgacttggaggatgtcccacaacacaacaaagggaacaagtttgtcttgtccgtgtccctatttttctttgagaaaattggggacttgtcaatgtcagaaatgatctgtttacttgaggagacatcatccccacagaatcatttctgttgtcgggtctctcgtgaccctggataaactgattgggaggggactctgtccccatcccatggaaatcattcctctgcacttgcggaggaatattccattgtttttctcctccataacacaccataaagtggtgtctttcaccacattgactgcacctgcggggtgaggtgcagttcagggaattatgccccataatgaggcaattaatacacctgtcttggtccgcgaggcgctttcttcgcgcccccggagtgatgtatttcgtgcaccaactcggtgtatgcccctttgtttcacaaaggaagcatatgcgatttgagcccctatttggaataggggttcgttgttggattatggccgaaaaggaatgattcgtctgaggagacatcctcattgccgtttcatttccttccactggcctccaccgttcctctctgaacgggcgggagaagcggaacggtgttcctctcccttggttggctctcccctcatttgaatgagggggaaaattccggggtttttcctctccccggaaaatttgagtacatctctgtacttcttctttgacttcaacgattgaagagatagctcttcggagctctgtgcagttaaaggctcctcctgccctcatttccttctccaccacttgggtgagaaggtgatagggcagtttggacttaattgtggaggccatgaacttgttttgttcattttctccatagtccaataactgatggcaaatccgttcaatggactctgagaattgtctcagagactgaacggattcagctggtttggcaaggtggagcaactccgcttggagggactccaccattgtcttttcatccccaaaccgctttttcagaatctcaactacccttgggtagttttcatctgacggtgggtataagtcaattgctctcctagcaactgacttctctgggaggcatcccagcaaataaatgtgcttcttgaagtcttcaatttgaagactttcaacggaagtctcaaagagcttccaaaacaaaggccattctcggggttcccccgagaatttgggcaatgttatcggcggaagcgtcacatcatgacgctgatgcaccattggtgcctgctgcacaacttgtgctggctgatttggctggggaattgcatcccccagctccgagaggcctaaagccccttcaatggtgtcgacaagccctcgggcttggtcgacccaatgcatgaaggccttgccttctggtttgaagtctctgtaattttgctcttcatcttgaagagcttgtcccttcactctcaggaaaatggcttcccattttccattgtatttctcaagaagagaaatggttttgcagagattttgtctctctgcaattaagtctgcacggacactttggtccgtcagctctttgcccaagttttcttgggctgtctcaatatacatcttgagacgcaccaccattggtgcaatggagatgcgcaagagctcactcattgctcttacgcttgatgaaaacgcaataaacccctttgggttgtgcgtttgatccaagcgctaaggccgcgctttggattggtttggttggagggtaggcttacgactggaagccgacccctacggggctccaattttgtgggcaaaaagccacaaaaaatgcacttccctgcagaaggggaaggttgactctcccggcagaaggggggagtcttt

SEQ ID NO: 4996 - DNA, 7067 bp, Heterodera glycines
  unsure (1)..(7067): unsure at all n locations
cttaatnttgagaaaaattattnttgagagcaagttgcctccccctcgaggcccattcatgaaaaaaaaataatttcaaaacttttcttgggcaacaatgaggcaaaaaacagaattctccgattccgcctcctccgaattttcttttgttttcacgggtttatttagaggcctgccaacccaaaaaagtgcattcattttgatttgtccgaatattcattcattcatccgctctcacaaatgctgtctctccaagtgttcctgacggcgttggcgctgcagcgcggccactcggccctcatttttgtagttgcggccaaaatgcgggtgctgtgccgcctcccactgctgctgctgctgggcgccaatgccatcctcagcacccccaccaccaacggtggtggcactggtgacaccgaattcgttgtccgctgtgaccgttgatttggaaaaggaatctagcaaatcgtccacgtccattaattggttttagagaataataggtttttgtttgatgaaaatgctaaaatttgaaagtggatacaaaatgtaaaagcaagcaatttcttaatcaaatcgtctgttttaaatttaaaacctcaaaatatttgcgataatttcttggaaattgataccatcattaggaatgaagaaagtacttgaaaatcgcaatttgaccatgtcaaaaattttgacttttatttatttttttggccttatgcaattttacgaatttgaaaaacgtcaaaaagagctaaaattcccaaccaaacgatttaaattcatttaatgctttggaaatcttccaaaatgtgaatgtaaatgtgtacaaaactaattagataattaagggaataaaaaatgcaaagattggataaacaaaacgaaaggaaacgaatatcataaaacgatgtgaacgcatattatataaaaataaaataaataaataatcgtttgtttttcttttctgggggtgtacaaaaagtgaaaatacttgggaagagatggagccatttaaatgaatcttttgccatcggtggagattcaaaattccgaaattttttttgacatttggactagccttattagtggatttctatcggttgaaatccgacatggagatttttttgatcaaattttggtcaaaaaatccaggaattaaaaaaaggatttttcgggcctttgattccatccctagtcgacacagcaaagattcaatcgcgaaaaacattgtgcaaataataaatgaccatgacaagtgctgtctgctcgagacttttgacagtcccgagaaacggtcatttaaaaaactcgaagcgctaaacatcgcaagcacccatctcagaacctatgagcactgaccatgaccattaattaattaattggcggactatacaaaaaacaaacaacaacattaaaaaaacgggtggcttgtcgttttgctctgttcaaaaaaatgtatataatatagtatatttatgtgtgtacgtgttgccccaattttcattcttttttcatttcatcatcatcatcatctcatcaatcatcatcttcaagcagttcattcattgttatgggaattggtgctgctgcggaaaatcttcttgctgctgttgtccggcatagccttccataagagaggccttaattttgctgatttcctctggaggcgtctgaaaaaataaagcaatgggcatgtgtgattgtaattttgaacaaatttcttaataaaatcctaaaatctcaacaaaaaaaacattcaccaacggttcctctctatcgcaccgcctaaccataaaaaccctaattttcccttaaaaaattggcctaaaatctctataaacttacaattagtatttttggtgaaaatgttatgaaatatacaaattttcagaacaaatttccctgtggcgcctaacggcaccgttggatctccgccctccctgaaagtttttttgaaaaagtgccgcaaaaaaagggtcgtgtcgatttacacggccggacgggcccctcccttttagttgaccaccgccctttttttaatgtgtgcacctgttgctgttgtggaccaccgtcagcgccacctccgttcccggcgcccgccagcgaagcgccgccccctggcgcgccgctttgcgagtgaactggagagaattgaaaatcaatttcgaaaaagtaaaaattcggttccagggttgagctttaatagcagatttctggctagaagccctcagaaattgtgctggaatgtgaagtccccggcaccaaaaatgccggaatgttgagccaaaataaacgcaaacccatctccctgagattttaggactcaattttagacttttcaacggcaaaaatgccaaaatgctctcctctcccacctgagctgggcccggccgtttgacttcctccgcctcccacattgcttccgggcgtgcctccgttgaccccaccaccgccgccgccactgaatgccggcgactgtttcatttccatgccgccgcccccgtcgccggccgtgccattgagcagcgaatggagcggaccattcggcgccggtccgccgccgttgggcgctgcgcgactatcgcctaaattggcaaaaacaaattttttggaaatttgccgattttttgggacccaggcggtgccatttattttttagttttaaaattacgaaagggtgcacctgacgagtcgcccattcctccgccgccaccgttgctgttcatcggattttgtgccgaaacgctggacggcccggtgccggcaccgccgggcgtgccaacgccacccgccgagtcatggtggccggcgaactgaaaaaacgtacattttagtcaagacaggattttttttgaagggggaaaaggtcgagactctgggcttttttaatgctagcttttttttgtaataattttatcgatattttttaaaatcaaattaaatttttcttttttttgttaaaaatgaaaataaattttctaatttttcaaaacaaattcgtaaaactttattttgaattttcctgttgttgaaattttttaactggtttaaaaatctaatttgaaattgttttatgaatttcgtccgagattttttttgaaaaatgaaatttatttttttgctaaaaacgtaaattttttttgaaaatttttaatttttcatggctttttaaataaaactttttaaatttcgacctgggactgcatgctgcccggcatttggttgcccatcatgaaatgctgctgttgaccgcccccgtcctgctgctgaggcgggcccacgccggcggcgcctaaacatcggacaaatttttttttaatagtctactttagcaattaaaattgaaaaattccgtccgacagtgtcagcggtgccaaaaaacgccaccgatacaaattaaaaattgtggggacctgccggtgacatcagcgaagcagttgtcgggcacatcatgccgccgccgccaccgactccgttgtgcgccagagggttcttggaaattattcatttcaggaaacttgaaaaaaaatccccaaatcttcgccccatcattttttaacagcgatttattcccttccatattttcctggcaaattgtaagggggtcaagaaaaaagagtgcctgcttgtgagagttgaaacattccgagatagagcagttcgttccccctgccccaggccgtaaaaatttcaggaggggcaccaaaaacattttttttttttgctgttcttcgggccaaaaaaagctttttgcccgtgtaattttcataaatttttggagtcgtgaaaaacggtaaatattgtccattttgcaaaaattttggccattttgagccctaattttggcaaaatagttaagaatgcggcccaatttatacatggaatggcggcgtgccggacggggagtccatgtacgggtgggcgttgttgaattgggcggcaccgccgccgcgcactgctcgcccaccgttgttgtgctgctgctgttgttgttgctgcagcacatgaaaatggttgcacaaaatattacattttattagacagatttttgcaggcaattttatagaaagaattttggtttttggaaaaaaaccgtgtgccaatggtttataataaatccgaatcagataaagcataaattgtaactatattttatcattccttctcccgagggatttccaatttcatgttgatttaacggcattttccaaaaaaagaaagtagggatttcacgagatttctcggccccatgggtttttctacatttccctgaatttttcaaaatctactaacacaagtgggggatggaatttttccgcactatttgattttcggcatttttgccaattttttatgattttcccttttttcgcccaccatttgcatgcgaactgcttggttggcctgctgttgccgtgccgccatcatcatgcgcagttgctgctgctcgttgagtgccatcatttggggcggtgccaaacccatggggaaattgggcggcggaccgccgccgccgaccaccgacgacggagtgggggcaccactccttgaaaaaagggagggccaaaattattcatttttaggtaggcccagtaaaatttaaaaaatggaatatgtgtggccccaaaacaaggacagtgtgcaaaattcatgaaaatttcgcccgaatttctccggcggtgcccatagacatggcatcgctaaatggaccatccaatttaaaaaatttgacatttttggccaacattgagatttttcttttttggaggggcgggggacgggaatcaattcgtgtccattgcacaaacctggtcccctgctgtccgtagcgtggtgggccgccaccgcctgaaaattggaaaattcaaaaaaatttaaaatttcctgaccactcatcactgaccggggatgggtgacgcctggttggaggaggggcccggctgggggcctccccggggcccgtagtacgcgttcggcatcattccgtccgggaaattctgcggcggccctccgccgggacccatcgccgccgggttcgggaactgcaaattggtgaaagcttcaattttaaaatcccaaatttacgtaaataatacagacacactaatgaatttttttaaatttaaaaattttcgagttacgaaaagatttggcatcgaaatttcaaaatttggagtgaactctgttaatagacctttcagcaaaaataatcaaatttgaagccagagaaattttttttagaaaaattcgcatgaaatttaattaaaaaattttcacaatttttcaacggaaaagaatacaagaaaaatgcatttatatatttcgtcaatttttcattttcccatccactgtaaaaaaatgcccgaaaatgattttttaattcgtcatttttcgattcctcattcgccgtttaaaatttgcaacacacgccccagtaataaaaaaattcaatatttacccgccacagccgggtggcccgtacatgccgcccccgttgaccatggccgcctcgtggggcggtggcggcgccggtgcgggcactccgttgtaatttgttggcgggaacatctgcagatgagcgagtgcccgtgggaaaaaaaggggggcaaaagtgtaaattgggggcaaaaaacgggaaatgagaaaccattttgtgataggtttttgcctccgaggtggcgtctaccttgtctttcttgtccggatgggcggaatacaggtcccaaaacacactgaaaaaggggggggggggaattaatttaaacgaatttttaaaatttcggattcggcaaatgagtcgtctcataattaattatttgggcactatttcgattagaattggcatcctaggattgattctcaagcagcacttttttgacataattgatgggactttcttctaaagctactgtttcagcagctaattttgattacgcatttttttgaaaatccattttcataaaaatttctatcaaattttagaatttccgaatctgccgtccaatttttcatttttgccaataatttattaaatttaattatttaagttaaaattaggcttcatttgattcaactcggtatattctgtatcgaagataccacaaaactgttttttttgttttgttttttattttaaaaaatttagcttacttttttggtagaaaataattatgagacgcataatagttttgtttgtaccctttccattttttggacatttatttaaaaagcagcatctaaaacacaatttttcatgggttttaaagtcgatggccatgaaaataattccgttcccggggaccaaattcaaaaataatcgaattttatgggttgataaatcagcacctccaccaattataaaggaagccgggcccggacgagctggacaagtcaatttgcaggttcggcatgttgtgggcgagaaactcattcttgaacatttctgccgtttttgtggcgcctaattggtacaaatattcgtagacaaattgtgacagtctgaaaatttgattttttaaaattatttaaaaattttttacttttcccgggcctgcgaatctgaggacagaaaattttccttccgctgctgctgcatttgtgagtgaggtggcggttgttgttgaaacattctctccttttttattctgctctcgtggccaaatttaaaatggaaaaatttatctaaaaatggaaatttacgataaaattgagggacaatttagagagttagctcagtaaaaaggcattgaaattcatgcaaaattatcaaccagctcaaagacatgaaaagggtaagttttaaaaatttttgggactgggtcgttttggcgccgacgttttggcgccagcctcagtttttttattataactttttttcttgttgaccaaatctaacaatcttggtatcattcgaaagcccttcacaagctctattagccttacaaaaaacaaacaaaaattttagcttctaaaaaagttattaagaaaaaaactcaaaaatttcgacttttttggaatttcatgttataacttttttggtaattggctactcgcgacccaatagc

SEQ ID NO: 4997 - DNA, 2800 bp, Heterodera glycines
aaacggcctggaaaatttttcaggccaaatgaaaaagctcatgatctaaaaggcaaaataatttactgccaacataaatggagctctttaagcagagctacaaccctggttaatagaaaaattaattagtttaaaattttatttaaatgtttaattaatgtcaagaaggtcaagggagaaagaggagatgaaagaaaaaacgaaagtgcaagaggcgcggcaaaaaaaaaacgaaaaaaaacaaaattaaaatgatttgaccgaattggtcgagtgtttgaatcggttgccttttctggtccggggtggctagccatgccagagttcctgtgtgccagaacaattacgttttgtcaatttgacattctctctaaaattgaccaaatctatcaatcttggtatcattcgaaagcccttcactagctctattagccttacaaaaaaaacaaaaatttttgcttctaaaaaagttattaagaaaaaaaactcaaaaatttcgacttttttggaatttcatgttataacttttttggtaattgtctaatcgcgaagcaatagcttagaaatatcttctaaacatgttaagctttcgattgataccaagattgctggatttggttaacaacaaaaaaagttataacccaaaaacttgggctggcgccaaaacgtcggagccaaaacgatacggaccaaaatttttatcttacaattaaattttacagattattcataatgccaagattacatttaaaattttaccgtatatttttttttactacacatttttaggaagcctcagtcactgaaatttttttccttaattccaaataccgaatttctcagggcccagcatggtttctcttaaatgccttatcgttttaaaattaatatatttaacatatagtttggctcaattaaagttgaatttgtcaagcgcccggcggtgcggacggaccggacaatcgatcaatccgtggcgtggtgttgggtggggtggctcctcctctccatgccctattttcaacagagcataaaaagaagagagagaaaagggaggggacgggagagaaagcaaatggggaaaagaaaaaggaggaataaaaagaagggttggttaaaatatttttatagacgaagaaaaagcaaaagcagcacccttttggtgtggtatgcttctgccctttgatgagggggaggaagaagcatagagaaggggaggagaaagagggaggcaaagaaagaatgggagaaaatgagggggggggggaagggactcggagaaggggtcagtcaatccctacgcttcctcgtcccccaaacactgccaacaacaaatatcggcgtggatttgcggcgagcggagggcgggggcctagaggagaggtgggatttatatcgccgagtggtagacaaggcgcggatgcacggcggagcgccgccgcgcccaataatgtgcaccaccaccaagccgcagcagtccaactccccactcacacccatcatcattagcagtgtgtggcgggccattttactaatgaatcggtggtggtggcacacccattgtcgtcgcttcccaagccctctcccccgccatctacccccattcattgttgtgtgtgtgaggtggtggtgagcgacggcgaggaggaggagaaggaggcgcatggcaggcccacccctcttcctcctcatcctcacaagaaatatttcttgactgggtgataaatgggttggggatggttcacaatgccttgccggccgcccatcttccacttcatcaattgttgctatgctatgatggtcacgaggataaggggggcgggagcgaaggacgcgcgtaatggtcgcatcgtccaaaccctgctggtgatgatgatgatgaagaggagatgagatggtgatggtgaactgcttgctgctgttactgatcaagaaaatgaagacggacggacgaatttattccgctgctgctgctgcttgttcaccaccagcatcacggcagaacagacggtctcttcaattggcgcgaaaactgcccaatttgtacacccaccaccagacagctcatacattttttgtacaatagcagttttggggggtgtacacatgacgacaatacacatacatacagtaattagtgctgcacgcgtgacgcgtaaatacattttgtatgtgtagtcgttgtcctacatttttgttgttgtactgctccgtccgtccccgctcatccgtccgctgcggcggcgcgcgtccgccccacaaatattatatatgatatggcggtcgttcgtcttctccgtgctcttccccttccccacccattcattccgcactgttgtccatcgtttgtccttcctcgcgccggcgctcgccgccctccccctttctcgtccatggcggtcggtcgatcggttgatgatgtgatgatgagacgggcgagaggcggggctgggcaaggaggacaccaattggtggtggttgtgctaatgatcattgcggttggttttccgtccacgcctcgcgtataatgagacatatacattttggagaaggccagcgagagagagagaggggggagagagaggagagagtacgccctcctcggcccccgaggcgacgactcctcgcccacaaacaccgccagcagcagaagtaacgattgcttccccgcccacccctcttctgacttaatgtgtatacgtgcctaaatgaatgcccctcatcacacaattatacctctcccccactctcggcgccctctctctccgtgttctcgacactctttttgttctggtgccgc

SEQ ID NO: 4998 - DNA, 3597 bp, Heterodera glycines
cagaagttatcatattcgcgatcagcgaccttggaaacctcaaattacgaattttcgaatttttctgagggggggggcagcataacccggaagtaccatacgtagaaaaagcccgaaatatgtaaaaaaatatgtagataatcacaattgtcatctatcacattctacgcatttgacctcatttcatcatctccaaatgtcaatcgtcttgtattacttttaccaattttttaaaatctaacgtgtaagtggtcaccccttcgttagatattttatttcttttttctttttctgaataaagatttttctgacatccctattaattattaattggtaaaataatttttaccttttcattctttgttgtttaaaaaataataattctttgttcacagaatgggaaagttccttaatccccttctgctatttggaatgagtgaattgattaattaattatcatgcgaaaatcaaatttaattacatttattctttttgacgggcgaaatttaaatattaatttattcattaattgtaataattttggatattttcagttcgtatattttttaaattctgtttgattaccaattcaaacaaaaaaaaatgtcggacaatccgaagaaagcaaataaagaaatggagaaagcgatgtaaatacctctctaaatttgaattttccatgctaataattttgcttttccattttcagcttcatctctgccgactgttggttggaggtgttcaatttgcttccgccatctcaacttggccttggcattgctatgattagccgccgttttgactattacgtcgacgaacattttaaaacgcgcaaatggaaattgggcaaaatgaaaattcgacgcaaaattggacagaatggcgcaaatgaaatgaaaattgtcaatgccaatggaaaagagctgccaatccctcaaaatccgttaccgaacaaagtcatcggattcagaagcatttggatctagtaagaatcatttgtgatcatcacacatactctttttttcagcttcatcgaccaaaatgtgatcacttttcttggccgttttgaccgctttttcgcttcatgtacaacaatgttgtccattaccactggaaatgttcgcattttggagtttattgtgctcaacatttggccgatgttcaaggacaccatttatctgcttagcttggacatcgtcgcttttcgtcgaatgcgtcaattggcgccgtcaatgctcaacgattgtccatcccttcgttttgtcaatttctttgacggcatttccctcgaatttccgcccgatgatagtgccaatgcgtcggatggccaaacggtgaccaaatggctgttcacgcctcgtcccgacaatttgatgaatgatctcattgtcagcattcaggattcagcgatggaacagcaatggttggcaaccgtggaacacatcaaagcggtgattagattatttgattattaccaatttaattagtctttttctattttgtcttcgttttagtcattttcctctgcttcttctcctgtttctttcgacatttatatagacttttcgctgtcctcttcaatttcttccattgtgccatttgaattgaccaacgaattcaccggagaaaaattggcactgtccaaagaagatgaagaagcagattttgaagatgaagaaaaatattacagtcttttttcccttagtcgttgtccaattgggtccgatgataagaaacagcagaagttcgagaaatttgacgaattgtacgaccgttggaacctaattgacatttggatcggagacgacggattcggcgatgggtaattaatacgattaacaattttaaaaatccaaatgcttatttttgtttttcttttcagtcttctcgacggttcgcccgggccgagtgatgatcactgatcagaacagcggaaatgaattgattgattggttattgatgcgattattatatgacccaaatgttgggcaaagatatttaaatattgttgtatttgattgttgctcataaattcataaaaacgagtttggtatttttgcgaattttcttcggattttgaaccggtacaaaaggcaatttttatttttagcaaaggatcttttaagtcattttgggtgcaaatgagtttgctgggaacaggatttagctgattttaacaatactttctcccagaacaataaagatttttaaatttacaataattttaaaaaaatatttttgtacaggcttttcttacataaaatggtaaaagtgaagaaaacggacacctcggatttttatattaaatatatcaattggttcctcttaacgagagaagacgaatggtaccattgttagggcgtggcaattattccgaacagagttacgggtctgtatcgtttcggcgctagcccttgtttttgaactataacttttttcatcgtcgatcaaatctaacaatcttgatatcattcgaaagctgaaaatgtttaaaagctatttataagcaattgcttagcgattagtcgcttactaaaaaagttctaactgaaaattgcaaaaaagtcaaaatttttgtgatttttttaaataacttctttacaggtcattttttttttttggtttttgtagggctaatagggcttctgaagggctttaaatgataccaagattatggttgtcaaataaaaaagttatggtccaaaaacaagacgcggcgccgaaacgacctagtccccagttacagacccggtactgaaatgtccaactacccccgggactaaatcgtctaatggcttttttaggaagcataaaaaaggcgcaatttatttattaatttgtcaaaaagaaaaataatcgatgaaagggaagcaaagctccaagactttttgaattactatttcttcggatgtccaatatcccattccgcccggttcttcaagtgtatccgaatatataaagcggaccaaatccccttccagtcatatccttcatcacttttattccatttgtttgataaattttgttttttcagttaatttctttttaattttctgtgcttaccaattcaaaaatgtcggacaatccgaaagaagcggagaaagaaatggaaaaagcaatgtaaataattacctaatctaaatttgattttctaaggtcattttgcttttcccttttcagcttcatcgctgccgactgttggttggaggtgttcgatttgcttccgcctgctcagcttggtcttggaattgcgatgattagccaccgatttgactattttgttgacgaacactttaaaacgcgcaaatggaaattgagaccaattgtaattcaacgcaaaattggagagaatggcgcaaaggaaatggaaattgtcaacaatttcggtggaaaagcattgccaatccctcaaattccgttgccgaacaaagtcatcggattcagagccattcagatcttgtaaaaactgaatttggaaattgttgtgcccatcacactttcggaaaactgtagtgatcaccccgctgagaaaagggttaaatgatttaccaatcgcgaggagttaattgtaaggaaagctcttgagttcccgcaagt

SEQ ID NO: 4999 - DNA, 4019 bp, Heterodera glycines
  unsure (1)..(4019): unsure at all n locations
cgacctagtccccagttacagacccggtactgaaatgtccaactacccccgggactaaatcgtctaatggcttttttaggaagcataaaaaaggcgcaatttatttattaatttgtcaaaaagaaaaataatcgatgaaagggaagcaaagctccaagactttttgaattactatttcttcggatgtccaatatcccattccgcccggttcttcaagtgtatccgaatatataaagcggaccaaatccccttccagtcatatccttcatcacttttattccatttgtttgataaattttgttttttcagttaatttctttttaattttctgtgcttaccaattcaaaaagaaatgtcggacaatccgaaagaagcaaataaagaaatggaaaaagcaatgtaaataattttatttcaatttaatttaatgacaatcattttgcttttcctctttcagcttcatcgctgccgactgttggcttgaggtgttcgttttgcttccacgctctcagcttggtcttgaaattgctatgattagccgccgttttgactatttcatcgacgaacatttcaaaacgcgcaaatggaaattgagaccaattgtaattcaacacaaaatcggagagaatgacgcaaaggaaatgcaaattgtcaacaatttcggtggaaaagcattgccaattccgcaaattccgttgccgaacaaagtcatcggattcagagccattcagatcttgtaaaaactgaatttggaaattgttgtgcccatcacactttcggaaaactgtagtgatcaccccgctgagaaaagggttaaatgatttaccaatcgcgaggagttaattgtaaggaaagctcttgagtttccgcaagtcgagacttattttttcgtcttaactcctcgagatgaagcaattgattgggatataatttaacctttttctaagcgggccgttcactacagttcccgttacaatttcttatgattttcagcttcgtcgaccaaaatgtgatcacttttcttggccattttcaccgctttttcgccaaatgtgcaacaaatttggccattaccactggaaatgttcgcatttctgagttcgctgtgttcacaatttggccaatgttcaaggacaccatttatctgttgattttgaacatcgtcgcttttcgtcaaattcgccaattggtcccgtcattgctcaacgactgtcaatcacttcgctctttcaatttatgtgacggcatttcccttgaatttccacctgatgacagtgccaatgcgacggatggccaagcattggccaaatggctgttctcgtctcatcccgacaatttgccgaagaagctcagatgctatatgaattcaatcatggaagaacaattgtcggcaacagtggaacagatcaaagcggtgatttgtacaaattaattcattttttcctatttttaaaatttttttaggcattttcctctgcttcttctcctgtttctttcatcattttaattgacttttcgtcttcctcttcactttcttccattgtgccatttgaactgaccaacgaatttactggggagaaattggcactgtccaaagaagaagaatatgaagatttaattggcttcacccttattcgttgtccaattgtgtccgatgataagaaacagcagaagttcaaggaattggacttgcgatggaaccgaattggcattgatatcgcagatgccgaagcagcgatgggtaattaacaattttaaaatcgaaaatgcttattttggttttcgtttttctaggcttctctgcggttccccggggccgagtggtgatcactgatcagaaacagcagaagtaaattgattgattgatgcaattatgtgacccattttanatattttgtatttgagtgttgttgctcataaattcgtaaaaaatgagnttgtttgaccaatattnttgtaattaaaaaaaccacacagatattttcatgccttatttctggagacagatttctaggtttctacctatttttttacggacttaatacctgacgagcagggctgaccgtgattgaatttccaatcacggatatccgtgagccgcgatcacggggcttcaaaaaaatccgtgaactgtgatcacggcaccccaaaaaccccgtgattataaaaaatggtctaatgatttttttgtttaaatttatttaaaaaaacggaatttaatcgctgggaaaattcccaaaagatattttaaagaaaccaaaacataatcgcatttttgcggcctaccttttccaagaaatgactaattagagctttttgtagaaatctccaaggaaaaattattttttaactaagtttattgagaaaaattactccttcatggcgatctgaacgggtctgtatcgtttcggcgccagcccaagttttcggactataaatttttttgttgtaaaccaaatccaacaagttggtaccatacgaaagcttaacatgtttagaagttttttttaagctattgctttacgggttagccgacttttgcgccgcgccatttgcgccgcgacacttgcgccgctcagcaaaaaagactcttgcgccgcggacatttgcgccgtgccatttgcgccgcgacacttgcgccgcctaacaaaaacgacatttgcgccgtgccatttgcgccgcgacatttgcgccgtacagcgaaaaaagacatttgcgctctgattaaaataaatttatgtgctttatagaataagaattgatagatattcattattaattcctttttcgaagcctttcatgtcaattccatattgaagtgcacgtaatgattgatcaaatcttgatcattttggttttcattgggaccatatgcgataacaagccttcatattgcctgatcattaagcggcggattttaattaattacaaaggaattgaatttcattcttttttcgaagcaaaaaaataattggggtttctacagaaaattctttttttttcagttttttgttagtttgtattcttaatcattttttcatatctttgatgaacctattcaatgttaagattttaatggttaaaaaattgaatgtcaatctttgtgactagtaattttttcgaattttcaattagttatttttgtcgatggcttattgttttagtaaaacttattgataatagtggaatttttatgaatataatatttttgacagcgcggcgcaaaagtccatttttgctgggcggcgcaaatggagcggcgcaaatggagcggcgcaaatatccgcggcgcaactgtctgcggcgcaaatggcgcggcgcaagtgtcgactttgctgagcggcgcaagtgtccacttttgctgtgcggcgcaaatggcgcggcgcaaatgtctcatcacgtgctttacgattagccaattaccaaaaaagttatacatgagaatttcaaaaagtcgaaatttttgaggttttttcttaataatttttttaaaggctagaaatcttttcgtttttttgtaaagctggttagagcatgtgatgggctttcgaatgataacaatattgttggatttggcttataaagaaaaaagttatacccaaaaaacatgggctggcgacgaaacggcggcgccgaaacgacctattcccatctgaacaccccaaaagatactgaaagtagggaaaattttagaaaaaattcaatgggggttgggaaaatttttcttgacatgttgattaagtctttcattataaatttaagcgactgagagaaaaatagggatttttagccgtttttgcgccaaaaagggctattttttgccattttggggtcaaaatttcaaaaatacggtaaaatgggggtccgtccgccggtggtgccgataggcgccgtcgggaaaaattttgagtgaatttgtttaacaaaatatgtcaattcattggttaatttattagtctacggacgttttaacaataaagaaaaataaaatgttaggaaatttcttattaattaaattt

SEQ ID NO: 5000 - DNA, 1886 bp, Heterodera glycines
ctcaaatcccaacatcgttccgtgtgcactgtgcgccatcggtgataaatgctaaatattttcgtacaacgttttaaatgaattataaaaccgatagcgatcatgataagaaaaatggcacagaatttgccacaactcctcgcagtaggcaaagttcgattccaggagagatgcggctggcaccagcacagcgtcgcaaagattcaaaattgtgttgttaactgcttatgatgcccaatttaatccaaatttcggatgttccactgaccactgtccacttcggtgaccgaactttgtgcttcctcatcgctataatatgtgtttaaaagtctgatcattttgatggcgacttcgtgacgggccccaatgtatgggccgagttgaaaggcgatcggacaagcatcagcgaaaaaagatagccaatcggaaacctgtaaaaatcaaatgcttaaaaacaaatggtcgactttgcctgttttggatgacatgtgaaccgttcccaactttctttcattcgaacgcccgttgcagaagaattgggtaagcattcgtagttcgaagcagcctttctgaaataattgttaaagtaatataataataatttaaaaagtgggacatacagacggtagaacggttcaatgcaaaatccgataatattagcaaatgccattgaaattctttgactgaaaaatagaaaaattattgaaatatgcaaataaaaaaagcaaagcaaaacgaaccaaacaccaaagggatatccgtcggggaaaaattccaaaagtttctgagccttttccaagtcgccaaattccaacagagcacacagcaaaccgagcttttggtttttgttcaaaacagtctaaaaaaactccatttaattattataatttttcttttcacatcgtcaaaacgtgagcccgccaattttcggtcttcgttcaattggcactgagtcgcggcggaaaaagaaatggccgaagctggcgaaggttggtccaacgaagaatcatttgccgcgttcagaatcgacgcgatcggaaagctttcagtgacactcgccaacagaccgacctaaattttgaggattaattaaaacgagaaaatggtaattaagaaagcctatatcaatcggtcctgtagtgtagtggtgatcacattggactttgaatccaataaccccggttcgaatccgggcaggacctaccttttttaaaaatttttatttgaatttagcaaaataaaaagtggatcgattaatttatattgtttcatataaccaatttttcttacatactctaaaaatcgacccttaacgaatatttctcaaatatcgttaccacattcgaagagattgtttccgcacggtttgaccgcaatttgacgaggtccgttagcgatttgtgctcctccaacaattccttccgagttggagcaatctaaactcaataaaaaattggaaaaacaaagtaggaaatcaaaaatgaataccaaagtgaacagcgtaaaaatgtcaacgaagccttcttgcgccagctgcgaaacgacccgataaagtgacatcggagtgtgctcattacgctagaaaacaattttttgtttttggtttcaataatttcacggggttgacaatgagagaggaatttttattttacttgacaaaacagaaatttgagtagcaaaatgttgcgcaggtcgcctcggtccattttgaattctctgatgaggcggagaaattgtgacgcattgtttggcggagagtgctcaaaacactccaaaatgatgtccacgacacggttcgggtccaaattgaattggccttatagtagtgcgcaattaattacctcactctattaagtgtagcagtcagaaacagtccccttgggggg

SEQ ID NO: 5001 - DNA, 4369 bp, Heterodera glycines
ctctagagtccgtcaaactccgattggagtgcgaccagcacatcgaagcgttgagaagcatttgtgggtttggcctgttaaaaacatggaaatgaacaaaaaacggagaaatgagcgaatcgcaccaaaacagcctttagattccgcacactttcttcaaccgatgcttttttggacagaaaggcgcggcaatgggacaacagttgctgcaccaccactctctcctcatcatccgaaggtgccaatgaggaggaagggctgtgcatttgaagctaaaagtgaatcaaaaaaggatcaaaaaaagtggacggacattcatggataatgcaatttggcatatttacaacacatttgcttatttgtacaaattaaaacatttattatcaacaaacatcaaaatcaacaataaatgtggaaccatataaacaaaggtttaggccaaatgccccttaatgagtcattttctggccgcaatatcaaaaatcaacagatatattcaagcagatcggagcacaccgaagtattctaaaaaccaaaataatttgtgttcgcatgaaataattttaaccgacgttcaaattgaagtttctcctcaatgtttcggcttttaacgtgttcttcgtggttgtgaatgaagtaaaccacgctgccatccgattcctcaatctttttccatttgtttgatggcaaatttgtataggcagtcaattgggcatctgaaattaggggaagaaattattaaaatatcaaaacgttttctcccgatttacgcgacactaattgccattaccatcaataccacccaacagattgaccaactgttgcttgtgaatgcgttggaatgtcacattgatcacttgacatgcatctgggaaatggaagagcaaagtttctcgatttgacaaacgcgaaaaacaattcacaattccgtgtcgcctctttgaaacttgtgacggactcgaccaattggcgaatttcgtcaggtctatcaataagaatgttttgcatatttatattctcttcccgctaatttgaactttttgaatggttcgtcgagactgtcgcggggtttgtaccgtccgtcgacgagacgccaaaagagcgcgaaattgcaagactcgagaagagagccaatctgacagacgcgtcgcaactccttaagacaaaacaaaataactaaacagcattttcccaaaaagtcataccggagcgttcactttggcagcgtccaccaaatattttgccaaagcaaaatcgttgcgtggaaaattggtcatcgttttcaatagcacaaggcacacgtacttttcgttgtaaagaaatgggttcaacttaactggtggacaaataaatgcattttgaaggccaacccaacaaaatgatcacctggtacagcttcaacagtgtcatcagaatgtccttgtcgtatttcgtctctattttcataaattagtacttcaaaaaacccaattacccaacctttgatcatcaaatccaccgcccgttccaaaaccggcgcattgtttgggttgtaccgattcacacctgaagagggaaaacagacagaatttgttgttgtgaacatggcgaattgcaattttaccacggatatctatgatttttcttagttcctcaaatgtaccaatggctttggcgcgtttcttcagttcatccatagacattgcaaactcaattcgtcaaaaagagaattaattataggcaaaatttagaaaaaaattgatttaggaatgaaaatgaatggaatagcataatcaaagacaccaaagaattaagttttttagtgaattcgtaataaaattggcagaagcaaagcataattcatttgcattagacagcagtctcttgtaaagtatctaaatttgtataaagataagggtcagaaattaaattttaattgttggatggtaaaccctcaatggcactttcgtccgtaaactcttccaactctctttcggtttccgtcgttttttgtgcaatcgaaggagttgaaaagtgtacaatatgcacatgcctctccaaatttctttttgttgtgcactaaaattatacaaatataaaataaaatgagggaaactgacggcgtattggcaaaacgagcaaatgtacggtttttcgcctgtgtgcgagcgatggtgaacaatgcgagcggaggatgtgctgtcaaaaaggtaagtccaatttgtgatttacccatagcaagtttttgaaggcactatcaagaaaaaaattaatatttttaaatgaaatttattgagtaaacttattcaaatttataaattcccgaaatgttatttggtatcattatttcattaatttggaagtcttgttaaattatttaaaacccaatacaatgttcccccccccatttaatgtatgcatttaccgaaatctttttgaacaaaaagcgcatgggaagggcaattcaccggtgtgaattcgatgatggacaagaagattgtgccgaaacaaacgtttaccacacaccggacattcaaccttttcgaaaattgctttctctgaaaaaacaaaatgaataagccaggtcagttattagatggtggatagttttttgatgcaaaaacaaaaaaaggctcaaggattccgcaattcgggatatatatttttttgccgagacaaatatctcgcagatcgaccattttttgttccagtgacgccttttctacttctgtaatttacttaaaattttggctaattggtcaccgtaatttggtgaattgtctccttttgccgcagtcttcttcttacaattagcccttccatttacggagtccgctttttcttttaattgactttccaatgaaacgaacaacgaaagaaagcctaaaaggaaatgcatgaaagttttgtattcttcaattagcaccggatttgctgctcaacaatgtcggttcaccgtcaaaatgaagctcctctaagcttgaaaaactgtctgttttagtgagttgaatgaaaatattaccaccatcaattcccatacgataggcttggctaacggaaattgaattatccaccaatggcgatgtttggaagctaaacttacaaaagaccgttacaatacatgcggccaggaaatttgcaaacccaaaatggattttcaaaatgaaataatttcagataaacaaaactgcttaaaaaaggctctattatagttcacataacattacttagtgtcatttgaaagctcaagctctaagagttctttattagactgcaaaatttttgttgtttttcgaaaaattatcgccagaaaacttaaaaaaactttataaacatttttggagacacaaagttttttgttacagagactaatagaggactcttgtggtcatagaattaccaaaaataatttatttagatgctctaggaaatggtatggtgcattaaagttgccaaattattttatggaatgtcttttttatggtcgtataaactgtttcaatttgaaacatttggacataggtatgtacaggaaaatgggtaaataaacagattaaataaagccaaaatgcccacctttccttacgctgtctacggagttctctttccaccgcatttatccaacaaggctcaaagtgtgcttgaaattggtccgagttgtcaaagcgccttcggcattcggggcaagtaaaaatgggacggcgaatattccttgccaatggcacttttacaggtcgaaaatttgtgaaatgagcagaatgaggcaacaaattgcaggacgaagaaggaaaatgcaaacactcggcagaaaaagaaggctaaaaggtggaataagtgaaaatgaaaatagtgaagaaacaacaaaacaattaacttgtcgatcagtgaaaaaggaaacaactccaccgccgatttgaacaattgaattgagttgtggatgatcaagcactgaatacgactgatagagaaatggagaaaacaaagcgattctattgcactttgcctggcaatttaagtttcgggctttgtgtctatcttttactagtacaaactcaccaattggttgcttgtatctgggaagttggccaagttgaccgtcctcagccgatgtgtctccaacaatgcaaccagtatctgttaaaaagcgttgttcaactgcagaaatgtaatgataaacatttgaagaagcagaatttgcggcaaaggtaaagaacattggtcccgaaaaatttttttttaatttttaaaaatgatttagggtaaaaattcctaggccatgaccctgaatatgacctcatttttgctcgaattctaaccccggaccgggagttgttgaaaacaattaagcgtggttacagtctgacacaacagctatgaatcgggcgaaacc

SEQ ID NO: 5002 - DNA, 2131 bp, Heterodera glycines
  unsure (1)..(2131): unsure at all n locations
aaaaacaaatattcaaagttgttctcactggaggtccgtgttctggcaagacaacggggcaggtactgttttaccatatgtcataccttcagtaattttttataattttaggctcgccttttaagtttctttgaaagcattgggtggaaggtgtacaccgttcctgagaccgcgtcatttttcctcggtcctggacgcattcgttttcccgacctgagtagtgagcaggctgctcaattccagacagatttgctcaaagcattgatacaaaatgaggatgtactgcgttttctaatgcgcaactcatttctttacatttttaggtctttttcaaccaggccgaactcagtgaagcggaaaaaattatgatcattttagaccggggtaggtaacataaattagaaattagagtaatactaccgattgtatcacaccttttttgaaaaaaaatttgttttcaaaaatcatgaaaatgtgtttccacaggattttgatgttgctgaacacgaatcttgccttcctagtactgatgctttcagtttatttccaagtgtttaaactaattatgacccaaaaattagaagatcttaactctatcttttgtgcgaatttgggtccgggttaagcaattagttgaaatggcccaatcgtgatcagcgaccctgaagacttcttgaaacaagctttgattaattttgaaaacaaaaaattgttttcaaaagtgtgtgataccaccggtagagtattacctaaattagcatcagtaatgagcattttcgctaaacaaatattgagtttaggtgcgatggatggaagtgcttatatcgacatggaatcttggtcaaatgtattgtcagcatgtggcgtggacaaccatgaaatgcgtgaaagataccaccaagtgagacattttcgctcattatttacaaataatatccatttctaacaataagatttgtcatctcgtcaccgcagcggatggtgcacaatcattttatcaacttgcgaataaccaagcccgaaccgaagcaatggaggaagccattgagattgacaaaaagaccagagaagtatttttattattttattagcatccaatgccgaaattaaggcatggattgggcatcaatgtctatcaatagttgataattcaaactgttgttcgtttgacgaaaagatctccaaacttattgctgttgtttgtgaacgtcttggcattccgatttcggatcgtttggctccaaatagcaagtaaatttttataaatttggtttccataaatctaaaattccaaggaaacggaaatggttggtcagcaagatcgttgacaacgatgccttcttgcaaattaagcaggaaaagttttcgttacaacatgattatctcaatacggcgggttcgagtcaggtaaattttacttattacagcgtgaaatttatgtcaaccattttcttttacaattttcatttctggaatcgttttgcgtttctcattatcgtttaaatttttcgcgcatttttaccagaaaacatcggaaactgtaggtccccatccctttgtgctacacctgggctacaagtttatctttgcaggttcgacttcgctcgcgtagccaaaatggaaagtacacgtacacacttacgacccgaacctttgaagacgctgatggcaagaagtaattttcgcctttaaaaaaaattctcttttgcaaatatagacttccccaaccggttgaaacacggaagcagttggacaggcgcgagtatcagagctacttgaaacttcttgacagaagccgtcaatcaattcacaagaaacgtgtgtgttttgtcttcggaaatgtggtaaatcggataccttcaaaagtcactagattgctaaaagaatatgcttttcctttcccagtattttaacctggacatttacattgcacctcttcctccagcgttgatgtacaatgaaaaccagctgatgatcctcgaggcaattaaatatttgccatattttatagacaaaaaacattgttaaaaatgtctttttatagctcgattaactttccagacatacaccacgcgccctattggtgatcctgagccgcgtttgcccgattttctcgnaaattgagcgtgag

SEQ ID NO: 5003 - DNA, 4242 bp, Heterodera glycines
tttttgagtgggaccatcaaagagtaagcttcacctcccaccaggtaccttcacactttcgatggcacccgctgtgcctccactgtccaattttttgccaatttcgggcaattccacgtaaacaacgtcgcccagagattcctacaattggcatttaaacaatccaaatagtcaacaaatcaatcccaacttgagcatggtttgtgatgccgacggtgccgacacttctcgcctcgtccaacgaaagccactcgtgtttatccgtgtagagaatatctgctaaaaccaaacattattggttaacccattgctaaaatcatggtactttggttttaaattataaaaaaacgcaaaaaatggcaaattggcacacttaacgaaaggggaagcgggggtaaagccgaactgtgaaaactcggatcagaaaagcgtcgatatagccagggacaacattgaagtcaagttttaacaagactcctaagtttttgggtgattatcatgctatttaaggtcaatgctggaattgaattcgaacaaaacgaagaaagtacaattagaagaatttataatgtgtagtaagttaatttgttcataccaaacatcggccgactcgttgacaaagtcctgcaactaacaaatgtctttgctggaagtcgcttgaacaatgagcaaaagcgaattgttgttgaagccatttcgatttaaatttaatttaaatttacaccctaaaagtttgaaaatgggctttaagagaaataaaataattaaaaatttagttggttttatttttgtttgcagtttgtatctccgctgtggacgaaccgttcaaaagaaaagttgattgattgtttacttatcgactggctaatgaaatggtgtgcgtaaacataaaataaaccgactccatctcttaagagagtaatgttcatagtacacaaacaattctcgatgtattgagagatcgaaacaaacagaaatatcaaacccgtttataagcacgagacttcggagtatgataattttgtttttgttagggttagggttaggggagtgggagatggggagatggatgggcccacgtgttttttttaatttaaggctgatttacagaaaattttaaattttgaaaatttttgaattaattggcgtggtgttattaataaaaaatttaaaaattttgatttgtttctcgttagaccgcaatttttcttagttgttttaccggtttcgttatttttagtttttaggacaatgcaaaagctagatagaatttaaaaaacctttttttaagctcttaatctcgattttgctttaattcagcaaatttttgttctaagaaactatttcatcttacatctgatcaatatgctttccaacaaattggttcgtattttcaaatttataatataatgaacttttcaaattaaaattgcaatgatagcccgtttttttaggcaaaatttgccgctatgaccatggcccgttgtcaaccgctgaacgcgttagcaatgttgggcggggcccgactgtgccaccacacgccaccaaactgcatggacgccattcgtccgcttggtccgaaaagcagtgtgccgagttttaaggttttcttccctaaactgataaaaaaaataatatttgaatcacatttaagggccaggcaattgtgaacgcggaaatgaagaccatttcgtacgacgactacaagggcaaatggttgatcttcttcttctacccactcgactttacggtactttgcaaaatattttctcgggaatttcttgtcgtaatttatctgaacttgacaaaatttcagaaatttgactgatttatagagaaaactcaggaaatttgagagatagagaatgtttaggctcttgtttctggtttcctaaatttggtgccatacaatttttacgtgctataatcaattaaagggtcccctttttggttttagtaaaatttccactgtaagtagcgccatcaattgagccgtttttgtgcaaccccgaagttgaactttacttttagttttgctttttaagttccattcttttcaccgtcccttcagtttgtgtgccccaccgaaatcattgcgttcagtgaccgcgtcgccgagttcaagcagctcggctgtgaggtgatcgcctgctcatgtgactcgcagttctcgcatttggtccttatttgttccattttctgttgatttaatacgatccgccgtatgtttttaggcttgggtgaacacaccgcgcaatgatggcgggcttggcaagatggaaattcccgtgctcagtgacttcagcaagaaaattgcggctgactttggcgtgctggacaaggagaccggactgtcctatcggttcgtttttctcggccaaattctaatcggtaattgaaaaaagtctaaacttttcccctcatttcagcggtctttttctgattgaccccaatggcactgttcgccattgtttggtcaacgatttgccggtgggccgaagtgttgacgaggcattgcgcattctgaaggccttccaattctttgagaaacatggcgaaggtccgtcatttattttttttttaaattttggcataataaatcgaaaactgactcaaattttgcgaaacgcacttatttacaaaagttttgctttagaaatttaaatttttctgctcccctcggattacacgggcttgggtccggtgcaccccaaaacgtcgtcggccgaaacgtcgtcggaagactttttgaaccataactttgttcgctgtcaatcaaattaagaattgttggtgttgttcgatagctctatgtgtttattattaatttgcaaaatctcaaaaattttcgttaagttttaaaaaagttatggccagaaggaactcaaaacccagtaattcgaactttttttgctcagatttttttgtgcataaataaaaatttttgaaaatttgcaggctaatagcatttttcgaatgctttcgaataataccaagaatgtttaatttggttgagaaagaaaaaagttatggtcgaaaaattcgttcgacgacgtttcggctgacgacgttttgtcctactccggcttgggtccacggatttcagacggattcgctggctgtcctaagaaatcactgcttattaaagtagtacatttttcgcaaattatcaagtgcaaacaataaattggattttgattaataaagactcctctaatcactctaattaccctccttcataatcgcatcaatgcccctctaattaccccctcccctccatttttcagtttgtcccgccgattgggaggagggcggtgaaacaattgacgtcaaatcgcccaaggagtacttcaaaaagcaaaaatgaacaaaaaaaggggccgcataaagcgattagatgacatatttttatttattttcgattgaatttttttgtttttatttaaaaaccgcaccattttttgtgtgtgacatccgtcatttattgttggcgctgataatatagtgataatatttatccgaaaatgttaattaggtattgtgggcattttctttgttgacaccgtacacattgtccaccgcgataccgtattgctcctcaaccattcaaaatttgttaaaaaagtcgcttaacataattctctgtcttacataagttcgtcatgaaagtaaaaagttgcattaattaattattgacgggcgggtggcccatgccacacatccaatccctcagaaatgccctcctcctccggcgcgtggtgtgttattttgccgcgcataaacaatgaccacacttaaagagagcaaacggcacgcactgatggagcagcagaaaatattgggccaattatttatggatttgttggccataacacacaaaaaaaaacagctcctcggcatttcacacttttgaagcgagtgcatttggcgagactctcgagccgcaagaaattgtcttggtctttgtccgagaaatctcggcgatatttggtctcggtttaagcatacggcattcattttggagatttatttttagctaaaaagcgttagcttgggaatttcaagagtgctttctctgatcacgaatctaaactcgggttttgtcagaccgaaaaccatagattcgaaaaatcacggattggatgatgtcaaatttgagttcagattcgtgatcagcgcccttgaaaactcccagccgatcgggagtgcgaaaggaaaatggtagatcagggacatactttc

SEQ ID NO: 5004 - DNA, 3376 bp, Heterodera glycines
atgagcctttgaattaaggaatttcactgccctcgggggcgtctattttttgcatgtgatggcatatgaaaagtgatcttttgaccaagccatccattccaccctcacccattggcaatattttttcattttaaaaccttcctccccattttttgaaaatttagctaccgatttagcaaatatttctcaaactatcgagttctcaatttgcacaaagtaattatttaatggattaattttaaattgcttcttgtcatacatagcttatttttaacccgaaaatggcaccaaattttaaatatttcttactttcagaaaaattcggggtttgacattctttttccattaaatttttaaattagattttttttacccaaaaattcattttaaacattcgtttctcacgagtgagtcaatgcaattatgcaaaaatttgtttgaaggtccaatttggacacgcttctttgggcccaaaatgtgaatcaataagcggcacattttggcgatgaaaagggggaaaaatcacaaaaaatttaaatgaaaaattgggtttttgaatgaacccttcgggctaaaattttctttttatttcattatgttaaagtgggagagggggaattggccgactcatttttagaatattttattctattttttaaaataaatctttattctcaaaataaataattggaaataaatttgcttttttaactttttttttcttttttactttaatatttatatcaagaaactaattacatcttttcaatattattttattcattttaaaattgcccaaaatttttaataaaatgccatttaaaattttgttcttttttttttgctttttaactcaattatgttacccccttttttgtgttgaatttcaacaaaatcacagcttgccatcctcgcacttttgttggcacggttttgaacagaaaatattttaattgctttctgaacaaacccaataatatttttaaaatatttaattttaacaaaaaaataatttatttttcattttttattcacaaaaaatgcattccatttgaaaatttaaatattaattccattttaataatttttaacttttaaacaaattaaatattttaatcatttttcatttccttttccaagagaatatatttaaattatttttgaaaaaattatttcaataaagttcagttcaattattaattcatatttttgtatttacttaattcaattattttacttagattttcgaatttttttttaactttaaatacttaacattaatttattattttgcaattatttcatttcacattttttgcttgtgccaaatcaatctctgcactaccattcattaccccaataaaatttccgctttaattttacgaatttttttttgtttttttgtgtcccccggggcaaaggattattattatttctttcctttgccaatgcttttggcaataatgaataatgagtgaatgaatgaatgaatgacaataaataataatccacggccccggaggatggtcagcagaagcagcggctaattcatgtgcaaccaaaccgatgcacttctttcactttttctcaaagtgccgtgccgcaaagaaaagtgtttccattttgggagaaaattccgccaaaaatgcgccgaaatttttggcaaaaaaacaaaattatcacattaagagcgagagagattctcaagaatttttgatgcttttaataaagtttcaatttaaattaattaaacctttaagtggaaaacagtttgttttaaaaatagtttataatttttaatttgcaaaaaatgcatgccgcggcatctgacgaaattttattttttttcaaaatttttccgttttatttcgccctggtgccattggacattttttgaggcggcccacaattggcctgcgaatagtaaaattaaattggtcatcacaaaagttcagcttcactaattaggctaattaaagccacgcgccgtcccaaagtgaaaaaatgcactgctttgagacgggaaaataataatttatttcctctcccttctcccggaggggatacggcgatgaggcgggggggggaccccccgggctacgacggattggatgatgggatccgatttcgccacccgccgccgcccccgggggtgttttgccccgcggcgaacttccaaagccgacgacagtgcccgcccaagtgatcccacccaaaatgtgaacttagccctcttggccagtctccgcccgtggttttgatcgatttttgttggaccatcgcattaatacacaataataatgtgggggggggggggaagctggggcggtaattccatttagttacccttcggcagggcaaaccgaaaaaaaaattggaaaattaattttcctgccataatttgtttgtttgtttttttggcatgcctactttaaaaatttattcaattttttgcccaattttttaatttaattcaatttcttgccattattattttcttaccattatattttgttatttagttttctcatttccaacataaacaaataatgtgtgtgccgtgccgcctttgtttttgccccaccaccaaaagaggcgcttacaaagttttgcgtggcccacaaaattggccaatatcccttccctcccccctcacggggcatgccgcccaatgatggcacatcattggcacattgtcattgtctttatgccgtccccgtctgtctgtctgtgtgtttaattttgttcgcctgaaggggtgccgacaatcggcggacggtgtcctcccccctcccccacacggacggttaataagacgctcgggctggggcctagttgccccgtccaaaaaatatgatggcatggcatcgccggccgaaacttttgcacccgggcggagggacggtgccattggcgaaatcggaaaaatgatttttatttcgtcgaatttaaaatgccgtctctttttgaaacataaacctaatttggttcaatgattttcgataattttttattcttttgtttatgccccaaatttttggcatatttgccgaggaaaatttgagaatgaattgctggccaattcagtaccaatggggttaagccgagtgattttaaatttttcctaatattttgtattatttttaattaaattttctttttttttaatttaaaaattaaattataaatttaccattttttaaaattaaatttcacaattttatttgaatttttcttcctttcttttaacatttgtgaaactcagtttcaattttcccgcttaaatcctaaaaaaaattcccaaaatttcctgccctatggcaaacactcaaatttaccaatttttccagcccacaaaacaatttctcaccctggg

SEQ ID NO: 5005 - DNA, 757 bp, Heterodera glycines
  unsure (1)..(757): unsure at all n locations
tttttatcttaaaattattaaatatttttcgggcaaattaatttgttcggattttgtttcaacaatttaattgtatttaaaaattaatttaaaattctttaataatttctttacttttcctagcacacattgaaataattaagcttaatatttacatttaaagcttaaaactttgtttttttaactaaaattttcccctcccattaattttttgttggacagacagtaaataaaaagaatatttattatttgtttggcatactgtcgcactctctcccacaaataaaaaacaattccccgggggccttttgcgttaagcggccaaaagagtgaattatttggcggcctatcaatttttgtgtttggccatttgtccgttaaatgatttcccaggcgaatttcatgccgaccaattggaaaaaaacagaaaaaaggtagaaaattaaaaaaagagagaatccgtccgatatggcaagttttgcaacgctgcggttcaatcccccgcgcgggacgcaaattttaaaaaattaaaattttattttccattttattaaaggaattatttattttaattaatgcaaatttgtccatatggcgaccagcaatgttcccaaactgctgaaacttcttctgctgtttccgctttagctgcagtttccgttgttgcgtctaaagggcgtcnccaatcgncntccnatctgncaagttactttatgcagggttcgggccctgtcaacggcatacatgtttttttagg

SEQ ID NO: 5006 - DNA, 2478 bp, Heterodera glycines
ccccccgctgaaaaattccggcccaaatttggtcccaagatcctcccaccctccctttcatctgacccctctaccgcgattcgctccccgcatattttgatcagataagattgttcaattgcgtttttttaattttcgtttgttgcgaaatttttgtgcggggcgcaccaaaactggtgccatccgcgctccaaggtcaaaatagtttttatgttcacaatctatcaatcaaagttcttgggcgagaaaatttaaagcgctgcggagatgcaaaaatatttgcggccactttaccgcagtttttatacacgggaactgtcaatcatataaagaagggaacgccgaagcgacttcatttcaattccatttcggttgaggcggggggtcggggccattctttgcctctcgggtcgcttgcccacaaatattcaaatttttccatcaatcatctttatctgccaccgcggcacggcagcacggcatggcagtgggtggagtcagcagccgcaccatccgcaagtttactttatttgccactttcgtccgctttcaattttgtcagcagcagaaccatcctcaatttcaattctcattgtttgtcagtttcgaccactttccattcccaacatgtcttttattgcccccggcactttcgcgttcctttcaaaagactatggggaattttcgactgggcattttgacccaaacagagcatacgacccaaattcacttgcagaactttcgtaatggcatttattttgcttccattatctttcattttttctttgtagtcaatggagaaaagagtttctggacggccgatacggatccaaacaaccatcccctccttccaccccgcgcgccccatcgcccagcttcccaatcccagtcatcgttggtaatttaaatttcagttttttggattttgcaaatattccgtttacaggaaatcgtccacaggatgaaaattgtttgggtttccacaaatatcttgtctgatttttttcattttagggcggcagatgttcccaaatgacgatggctacgaatcggaagatgatgaaattctcttgccacctccgccgattcccccgcaacttggccaccctccgccaaatgtgccggtaatttcggtctcgcttttcgttgctttttctcaatttccgagtgcttttttcaggcagttcgtgttcagccaatacatgttgggcagcagcggctgccgctgagagacttgccacaattcgaggaccatccacaaaatgtgccggtaattttggctcgcttttgttctttttttcaagatcccgaatgcaggtaattcgtgtccaaccgatgcaacaaccattgccgctgagagacctgccgcaaattttccaccctccaccaaatgtgccggtaattttgggtctttctttcgattgctttttctcaattcccgagtgcatttttcaggcaattcgtgttcaaccaatgcagcaaccggtaccaatgagagccgtgccacaattcccccaccctccgccaaatgcaccggtaatcttgagtctcgttttcggttgctttttcaaaatcccgagtgcattgtttttcaggaaatttgtgtgggaccaattcatgatgggcaacaaccactaccactaagagcgttgccacaattcgcccaacctccaccaaatgtgccggtaattttggctcgtttttttgttactttttttaattcccgaatgctttttttcaggccgttcgggtccaaccagttcaacaaccgataccactgagagacgtgccgctatttgtcaacccaccaccaaatgtgccggtaattttggctcgcttttgttactttttttttcaagatcccgaatgcattttttcaggtaattcgtgtccagatgcctcaaccgttgctgagagacatgccgcaaattcaccatccaccgcgaaatgtgacttcaatttggatcaaattgtggttgctttttctcagtctctgggtgtttcttcagggaattcatgttcgacaaattcaacgggaatacgccgtaccgcaatttgcccatccgtcaccaaacttgccgtatcatccaccagaaaacgttccggtagttgggtcttgtttttcaagcgtttctcatattttcggatgtttattcaggcaatccaaccacggcaacaaccgcgccagctgagagacgtgccactattcgaccacccgctgccaaacggacaggtaatttcagaccctgtcttctacctaacaccgaaacatcttttctaagcaaatgcatcccaaccctccgagagtgctggaagtgatccgacggctgggcgagtggagaggaagaacaagggacccaagacgtccgcctcaatgaatgaatggaatttggattttgataaaatttgttgttttaattttttgaattgataagggttaaatcccgttacctaaattgtttgaaaattataaaattt

SEQ ID NO: 5007 - DNA, 4836 bp, Heterodera glycines
ttttgacccaaacagagcatacgacccaaattcacttgtatttatttcgtaatacatttattttgcttccattatctttgctttttttctttgtagtcaatggagaaaagagtttctggacggccgataccgatccaaacaaccaacccctccttcccccccgcgtgccccatcgcccagctttccaatcccggtcatcgttggtaatttaaatttcagtttttttttggattttgcaaatattccgtttacaggaaatcgtccacaggatgaaaattgtttggttttccacaaatatcttgtctgattttttccattttagggcggcagatgttccccgatgacgatgggtacgaatcggaagatgatgaaattctcttgccacctccgccgatccccccgcaacttggccaccctccgccaaatgtgccggtaatttcggtctcgcttttcgttgctttttctcaaatttaagagtgcttttttcaggctgttcgtgttcagctaatgcatgttgggcagcagcggctgccgctgagagacttgccacaattcgaggaccatccgcaaaatgtgccggtaattttgggtcgattttcgctgtgttttctcaaatttctgcgtgctttttttcaggctgttcgggtccaaccagtgcaacaaccattgccgctgagagacctgccgcaaattttccaccctccaccaaatgtgccggtaattttgggtctttctttcgattgctttttctcaattcccgagtgtatttttcaggcaattcgtagttcaaccaatgcagcaaccagtaccaatgagagccgtgccacaattcctccaccctccgccaaatgcgccggtaatcttgagtctcgttttcggttgctttttcaaaatcccgagtgcattgtttttcaggaaattggcgtgggaccaattcatgatgggcaacaaccactaccactaagagcgttgccacaattcgcccaacctccaccaaatgtaccggtaattttggctcgtttttttgttgcttttttttaattcccgaatgcttttttcaggccgttcgtgtccaaccagttcaacaaccgataccactgagagacgtgccgctatttgtcaacccaccaccaaatgtgccggtaattttggctcgcttttgttactttttttcaagatcccgaatgcattttttcaggtaattcgtgtccaaccgatgcctcaaccgttgccgctgagagacatgccgcaaattcaccatccaccgcgaaatgtgacttcaatttggatcaaattgtggttgctttttctcagtctctgggtgtttcttcaaggcattcatgttcgacaaattcaacgggaatacgccgtaccgcaatttgcccatccgccgccaaacttgccgtatcatccaccagaaaacgttccgggtagttgggtcttgtttatcgtgcgtttctcatattttcggatgtttattcaggcaatccaaccacggcaacgaccgcgccagctgagagacgtgccactattcgaccacccgtggccaaacggacaggtaatttcagaccctggcttctacctaacaccgaaacatcttttcttaagcaaatgcatgccaaccccccgagagtgctggaagtgatccgacggctgggcgagtggagaggaagaccaagggacccaagacgtccgcctcaatgaatgaatggaatttggattttgataaaatttgttgttttaattttttgaattgataagggttaaatcccgtcacctaaattgtttcaaaattattaaaattttaagaaattagatgctaaacctaacctttgacatagattatgaaaaaatgaaaagaaatgacgaaatttttggaatgttccttctttttattatctatggattttttttcatgtgcattattttggtgctagtaagatattgccgaatgaattaattggttttttctcttcattttaaaacatttcacgtccccatgccctgcccacttcccgcggaattgatcaaggaaataattgacgctctcccccctccaaaaacacatcggcttttgcgcgtaaattttgttttggcatactttgttaaatgtcggttttattccatgatgagaagattgtttcgcccagagcatatatcaataccaatggcccgaagaactggaatttatttctttttcgatgttcatactccccctatttattttccactctaccaataataacatttaaataaaattataattttttatttcttatctgattaatttcgatcaatattttttgataattaaaaaaaattgtatttttcccaaaagaattttctcgcagtagcaactcatcggcttttttttactcccttcataaaatgtctcgcttttgccctatcgcccaaatcaaggaatcgggtcggcttaacacaccaaaggggaaatttagtgagttccaaacctaccaaattaaataaagaattttgataatcgttttaggtcttttttacgctctggaaaatgctcgaaactaccaacttatggggaaaagcataacggaagataaatttcgttatttgatgaaaacggagaagaaacaaaggcaattggccatgtaattgatggaaaaggcagggataagcacggatgacaaaacttttggtacccaacaccttgaggctgtacaaaaatactgggacagggaattcccggatatgtttcgcattgtggcttttgaaatggtaaccaaattagcttgaaattaacccattttttacattttttttagaaatttggacttaggccaattttcaaaggggaaggtgttcgaagaaatgaagtgggtgtgataagagaaggaggccattgggatgggatcaaatcggcttcttggttttttggtgttcgatacttctgtgtcagctgtgaagtaacatttgatggtccagtccgccatagtctcatatgtaaggaacgctgcaaaaaatgttgtcggatggggttcgggtttccatgtacggatgtctgcgatgagattcactgcggcgaatgcaatctcaagttttacaacccggaatgttttgaagcgcacaagaaggcggcctgtattgagtacaagaaatgtgaaaaatgcggagagacacacaatactcggaacaaacacacgtgcggcgaaaagttttgcaaactttgcaaagtttgtcacccagggcggcaatgtttcatcaaaaaaatacatgtgcgaccacagaaaatgtatagaatagtggcatacgacctggagacgactgtagaggggggagaacatcggcctaatcttgttagtgcggcactttcttgcagcatttgtgcgggagaggagcgggaatgtgatatttgtgaaggccccaggaaaatcacatggtcggtagcggatggttttgacccaatgagcgagtttgttgtttgggtaatggggtttcaacgatttgaaacggttgcttttgcacattatgctgggaggttcgattcccactttgtcttgtccgagctaacgaagaaggaaatcgcaacggagttgatgatggcggacctgaagatctatcaaatcaaagcaggaagggtgtgctttcgggacttttggatgctcagtcagaataaattggtggaccttccaaaaacgttgggattgaacattacggaaaaattgtattttccacacaaatacaataagaatgagaattttgggaagagactatcacacctgccacctttggaagactattgccccgacagcatgaaagaggaggaatgtcaaaaattggaaaaatggtataacgagaatttccaaacggaatttgaactaggtagacaaaaaatatgggttattaaaacttatattggttttaggggagcagcttagggtgtattgtgaaaacgacgtggaaattctgatggcggcaattttgaagtttcggcagttatttttggggataacaggagatttggatgtgatgaaggacagcgtgacaatcgctggtgttgtgatgaagatattcagggcaaaatttttgaaggaaaggcacattccgatcatgcctgagggagggtatgagaaagctgagaatcagagcaaaatcgcagtgaggtattttgaatggttggcgcaacgcaaaggggtgaaagttcgacatgcctgcaacggcggggaggttgaatttggtgggctgaaggtggactgtgtgattggggcagagaaaaaaataattgagtttcaggtaaaagaaaaaatattttctttttaaacaatacttaaggggtgtgcatttcacgggtgtccgagatgttttttaccttggactatagcgccaaacggacggacaatggaagagaatcaaagtagaaccgaaattcgcatggaaattttgagggaaaagtgcaaaaatttttcaatcggagaagtttgggtagaataaaacatttagaaatatttattaattgttagttttaggagtgtgatgtcagagaggaattgaagaaaaataaggagatgaaaaagttctttgaaagtgtgccggacaagggaccgatcaatccgagggatgcttatgccgggggaagaacgatgccattttgtttgtacgcaaaggctaccgaagaaattgagatatcaatgtttgacatcattagtttgtacccctttgttaattatggtaaaaatgtgcttgcttttttttgctaatttccttcgcttaagacaccccataccccgttggagtcccgaaaattgtagtgagcaggaattttagatgtgaattggacaacacccaacgacataccctatgatg

SEQ ID NO: 5008 - DNA, 2624 bp, Heterodera glycines
cactaaactcaaataacaaacactaatagtttatcaaaaacatgacacacataattgtgtcacactaaactcaaataacaaacactaatgtttatcaaaaacatgacacacataattgtgtcacactaaactcaaataacaaacactaatgttttatcaaagacatgacacacataattgtgtcacactaaactcaaataacgaacactaatgtttatcaaaaacatgacacacataattgtgtcacactaaactcaaataacaaacactaatgtttatcaaaaacatgacacacataattgtgtcacactaaactcaaataacaaacactaatgtttatcaaaaacatgacacacataattgtgtcacactaaactcaaataacaaacactaatgttttatcaaagacatgacacacataattgtgtcacactaaactcaaataacgaacactaatgtttatcaaaaacatgacacacataattgtgtcacactaaactcaaataacgaacactaatgttttatcaaagacatgacacacataattgtgtcacactaaactcaaataacgaacactaatgtttatcaaaaacatgacacacataattgtgtcacactaaactcaaataacaaacactaatgtttatcaaaaacatgacacacataattgtgtcacactaaactcaaataacaaacactaatgtttatcaaaaacatgacacacataattgtgtcacactaaactcaaacaacaaacactaatgttttatcaaagacatgacacacataattgtgtcacactaaactcaaataacaaacactaatgttttatcaaagacatgacacacataattgtgtcacactaaactcaaacaacaaacactaatgttttatcaaagacatgacacactaaagtcacagaacagacactaattcgctaaaatattaaacaaattctgatcataacgcttcccaacccacttacaaatgatcgaccatccaaagctgaaatagtgcattcctcgagagtaagaaaaaagtcaatggcttccaaaactacgcaatgaaatcacatccaattgtaatccaacacgttcatacaataagtcctttcttcatctattggatttcttttctaaattaaatattcttaatagaaacagcaaagccaaaaaaaaaatcccaaacaaagtcatcccagcaaactttcatgaagcatttagactcagtctgagcatgctgttgaatgatggctgacctgcagtcatcacaaaaaaaaaatattgccgaagcggcagaatagctaaattacaaaaattatacaacaacagaaaacaatgcatgtaaatagacaaataacaacatcaacttcttctttcatgcaaagaatacaaaactaaaaaaccaaacaaacgaagactaaaaataacaaccatacaatcatatccgaaaatttgaaaaactaaaacaaaaagctacgctgttcttttccttaatcttttacataaacagaaacaaaaacttttcatatgctaataacaaaacaatagaaactatgaatataagaaacaaaaaaaaaagaaatttttaactgtgcttttgcaaaaatcaaaaactgacaaaacaaatatgtaaaaacgaaaaccaaacatttctttttttcaaattcatttataacgcaaaacaattacaaaacgccagacacatacatagcctcattcatctttatatatatagattttgatttttttaaccattttgacaaattttttatgaattaaagttaattttattattggtcattgatgtgtagtgtggtgtagtggttagtgaatcaaccttgacattactttctgtcgtgagttcgattcaggttgacggtttcttttttaatttattttttttaattttaaaattcgcctggcgctgcttatcggcatcgcatggcccaaaaattcgtaaatcttattaaaaaaattctctaaaaattgcaaaaacctatcattttttggacaaaatctattaacagatccatcagttttcaaaaaaatttcccggcggcgcctatcggcaccgccggatctctacgcttgcacattcaccaagtttttttttttttggaaaaatgtgccacaagaaaatatgttaaaaatctgagttccaattttgcttgaataaatcatgataatttaatatattaaaaaacaaaaatctatcgtaaaaatcttattttttttgtaaacatctgttagaaatcgagcttaaatttcaaaattcgccaggcggcctatcggcacctccggccccccaaaaacctattttttcttaaaaaattagacaaaaatctctaaaatttggtaattctttagacaaaatctgtgtaatttatgccaaaaggaattgaattgaggcgatacattgactaaaggaatgtggagccatcacatcattcgataaaaaattaattttttgtaaaattttttggagttaattcaaatcaaacctccgcccccgtccccgcgggggcgaaattttcgtgcccccgtccccgcccccgcgattatgacccccgccatcccccgcccccgcgaaaagccacccccgcccacggggtccgaacccta

SEQ ID NO: 5009 - DNA, 1655 bp, Heterodera glycines
  unsure (1)..(1655): unsure at all n locations
gtaaaatgtcatgggacgcgtaaaaccgactagacncaattttaattattttttccgtttgacgcacgtccgaccaaactgacaaattattgtagaagatactagccgcaagaaataaaaaagttaagaaatttgtccgaattcgggttcgggattcgaaacatggatgttttgcacaaatccgaccaatttcagtcctaaacaggtactcacgcgaaaacgtccccacgcgaaaacggccacgcgaaaatggccacgcgaaaacgtcccccacgcgaaaacggccacgnccgaaaattgccacgcgaaaacgaccccgaccgcaattttatcacattgccaattctttctcatataatacaaaatgccaaggtttgcctcgtatttctgctttgaatattcactaatttgcgtttcttcataacctttcataaatgcaattagcttttatcgtccacctaattaaattgggttattaaatacaattgcccaattaattgttcaccgttggaattgcagttaatatattaaagagaaaatgctggaaaataacaataccaaagaatatattgtagcagaagcagaataaagcattgggtacttctttatctaaattttttgcaaatatagggaataaataaaaagaaagtatattcaatcaatttgtaaattataaaagaatttcggggtcggggttattaattatcattagggctataaattatatgcttttgcatattttttttacgcatatgctatggagaaaggggctcaaaaatagcatttctacgtttaaattttttgatttggtgaaagtttttagtgcatgtaaatgcctattttgggtgttttcgagaacaaatgcatattttgccatttttgcattttagagcatatttcgtccatttttttgttaattttcatcagaaaaatgaaaaaaatacacccctaagtaacagctttttgggaattaaaaaatacacccttaaaaatcaaaaaatttgagccttgaatgtgaagtttttgaaaaaaaattttgtttatgtaaaaaatataattttgtcttatttgcatttaataaaaaaaaaaattcgaaattgcatataaaattttgaaaaatcaacattttttgaaattgtctaaaaatttgttttggatatcaattttgtatttttacacaatttttagcattttttgaatgttaaaaaccatttttggcagtttttaaggcatattatagtgtgcatatttgggtatttttcttgttttttagggcgtatttgaaggatttttactgcatattttatgcgcatatttggcattttttcttgcatataatttctagccctaattatcattcaatgaaaaccttacccacatccatttaccatctaatttcgtattgattattttatgtttgtcttcatttatttcattggctttccatggattttctttttttgccctctcttccgcttttttaaacatttccttcaaattttcttcaaaattttatcggattattccgtttacgctttcatttgtttgccattcatttgctgtatcaatcgccaattgcaaaatcatttcattaattggtaattttggttcctttatcgaatcaaacgaataatttattctctccacattcaaca

SEQ ID NO: 5010 - DNA, 4038 bp, Heterodera glycines
tttttatgaaatataaattatttcgacaaaacatgccataactttgcttaaacacaatcaaattttacactttctttgtaccattcgatagccaagttttttctctattagcttgcagaatttcaaacaaaatttattaaaatgaaatataaaaaatctcaccgccttataaacggagaaaatttgattttaaataatgatcataagtaagattatccaaatctacttaatatatttgtttattatattaaacaaagatgaaataattaaaaaattgggattgatagaattatccaaatctacttaatttgttttccattcattcgctgtgtcaattgtcgattgcaatagcttttaccttttccaaatttacctgttcttctttggctttttattttgcattttcatacaaattttcattttttacaaattcttccagaaaaatgcactgacaaagaaaggtccccaagtgtccgcggagtttcggaacccaaatttggtaggttttggtaggtggctagagcacccctgggtccttaataaaagtgcttttaatttttgtggaatgagcttgagtgaagagttatgatgtgccaaagtttttaaattaattaacaaaagaaataattattagtactcctttgcattggtttctagcttagaggcagtgcgcagggcgtacctttttaggtctcaggttcgaatcctctgcatgcaaattcattttacaataaatttctccaggctaattaagaaaaaattcaaataaaaatggatggatttttatgttaaattacgcctcaaacttcgcgttttttaaaaaccattatttgcgtcaatttaaataaataatgttatttgttaacttgtgtttctatggggtgataatatttgaattggtataaaattatatttaaaaaactaaaaatccttttaataattgttttggtgtgactttttgaaatttgattgcaccaggagcaaaatccaaaacaaaccacagacacagaaccaacaacttgggattatatttctcttattatcatcaaagtgaaaaaagcgacactccacgcggcgcttggacggagtaagaaaataaatcggaccgaattgagcgggatcggttttctgacatcagcaccgcaaaagattttcagccacttcttcgacgaggcaccggaaggtgttcaacacggccaaaatcggttatgcgcacgtgaagaaagtcgagtgctaggcgaaggcgaggaactaggaaattgaacgggtttcgagttaggatgattaaccaagaaacccacctgaatacgacgaggagaagtgctaactgattaagaaatggtgagggtgcgtacatttggatgaacaatttttgggctgaccaattgttacgacgaattctgggtcggtaaattttgaagatgggagagagttacctggagatgatgagtaagcagtgccagtcttctctggtgcatcattgccgcttttgatgtcagatgattttggtggaagtgatggtttcagcgtaggggatttagacaggggaatagacggagaagggacaatggagtcaacgagcattggagaaggcattaagttaggtgaaggattgggtccaaaaattggtgagaaatttaagtgattatgtacggtttgtagcatttattttggttcagttgcgtgagagaaatagaatttttggatggtttacacaaatttaagcaaaaggagaagtaggatgctacttaaaacataaatagttcaaattataaaggataatgggggagattcaatttcggatgtgagggactctagaccgaaacatggatgaattggatttattgttagatgaattaggattaggtcatctaccccacgtcgaagtgcataggtttttgtgaaattccatgaaaaaaccaaaaaaaatatataattttaaaaaccgaagcagacactcctaagaataagaaattcccataattcaatgccagatagggttgagcggtaccggtaccggtaccggtactggccggtaattaccggtttttttggtaccggtaccggtaccggttttttcaaaaatgaaattaccgttaccggtttgtctagtaccggtaccgccggtaaaaatttgcactggtaagaatgggggtctggtcgagaaaagagtaggaaattggtgaagaaggagaaatttttgagaaaaaattaaattttatttcatttagtcatgggattacacacatgcacatatggtgtagtggttaaactttctacctttcatacatatgcttctgaacaattctaattctaaaaaacaggtactcgcgcgataactgaataaaaattttgtatttggaaaattttgtccaaaaatttttatgttctaaaattaccggtttttaccggtaccggtaccggtaccgttttttgcagtaccggtcagtaccggtaccggtttttttgcaattaccgattaccgctcaactctaatgccagataatgttttttattaatttttaaaacaaaatttcgctttaaaattgctttatttaaaaatttatttcaaaactttctaactttttaaattattacgtttataattgaaataaaacttctttcatgctatttgcgatttttttgtgccaatattgcgcatattttacgattgtaaaaatttaattaattttatgtaaaaaaaattttcatgaatatgagtggggggtatgtatgcctcatttgttgtcattatgagttggcatttttgcgtgtgcatcgattttcaataaagacctttattagttttttaatgctaatacgcataaaaatattaaatgaattttttattatatatgtaataattgtaaaatattataaaaattgcaaacaaataatattaaatattttggctgtattcttaataatattttttactttttaaaaaacgaggtttttttttcaaaattttaaatgattttcagaagaaaattttaatgaattttttctgaaattttcgatttttttaacacttattttgaaatttaattacaaataataggatttttaattattataaatatttgtcatgatcatcgtagcatttcaacgctgcttaacatttctcagaaaaaaaactaaattaaacattctgtagactattcaatagggctccctctatctacttttatgctattagtcacaaaatttcatgaattttcgttaaattaaaataagttatagccaaaagattgtttgttatccactctaaaaaaatgcaattttacgaaatacttaaaggaacaactttttatttttaacaaactttttatgaattttcgagctagagaaccatttgaacctgaaaaataatatatgaaaaatgttgcatctaattgctaatcacaaattcattcgagaattctttttatattttcaattaaggattttaggaaatattatttattattgttccatgcttattattccattttggattattctgttcttaaatgtggccagatggggcattctttcaatgcccgaaaaaatggttggaaatggactaaacatgggccaattgattcaaaatgatcaaaatcctaatcaaatagaaaaccaaaatgggccaaatctggaccaaatagcaaatcaaaatgactcaaatctggatcaaatagatctgaatgcgccaaatccggacgaattaatagaaactggcaaacttggagaagttccgattttattgccaaggaaatatcaagaccgaacaatacaagttgaattcattgctcacaagatcatttcggatgcagaaactcgtcaaaaattctttaaaccagttgagctatgaaataattatttatttttttgaaatttatttagatgtaaaaagttaatgaaaataaataattttattttttaatcaaaaatcaaatttcctgtagaagcaacaaccctgcagtgcaaataataaaacatgtgcgtgcaaacgcttgtcagaatttcgaatacaggttgaatgatattttaatatgt

SEQ ID NO: 5011 - DNA, 1824 bp, Heterodera glycines
  unsure (1)..(1824): unsure at all n locations
gagtggtgggagaaatgggagagaacctctaaatgtagcatccgtagctcagttggttagagcaatccatacggtatggaaaggcctgagtttcgagtcccaccgggtgagtaaccaattaattatgttctacataattgacctccttttttggcataaaacagttaataaattatgcaaacgataaaaattgttagcaatttttcacgtgatgcccctgctggacggatattcacatttcaaaaattgcaatttccaaattacggtgccttttttggacggaatactgtattccgtaaattttagaggcctttatgccgagtatgggttacaaatttgttgtggatctgaatcccgttgattattgaaatttaaaggcttgaactccgaagttggatattacgggaatatttttgggcttccgaacccagaaacaaaatattttaatatttataaaaactaaaaaggcgaaatgattggcgaataccttggcgaagtgtcacttgaggatgaaagcgaaaatttcgactacacattcagtgtgcccattgacaaatacaattcgggctccgatgaaagggattttgcatgtaaaaacatacatatgtataatagaaaattcatttaaaaaattttaatttttagtaatttaaataattatttttttagtggttgatgcctcgcgccgcggtaaccatacggccatagcgaaccacagctgttccccatcagcggaacctgtgtattattatgtgcaggacgctgatgccgaactgatgcatccggccataggaatttttgcaaagtttcttttgattgagaggggttggtatcccgggccaaaaacttggcctctcggccaactgagtcccactgatttaccacattttgcttcgaaaaggattggcctcggccaatttggtcccgctgattcaccaaattttatttcgaaaatccttggccacagccaactgagtcccgctgatttacgaaattttatttcgaaaatgattggcctcggccaactgagtcccgctgatttacgaaattttatttcgaaaatgattggcctcggccaactgagtcccgaggatttacgtacttttatttccaaaatgtttggcctcggccaactgggtcccgttgatttaccaaattttatttcgaaaatgtattttgaaaatgatttgcctcggccaactgagtcccactgattcaccaaattttatttcgaaaatgattggcctcggccaactgagtccagctgatttacgaaattttatttcgaaaattctcccnccccccccataaattcggtccgaattccctccgatagaataaagcgaattttcacacataaaaaaattcaaatttatcaaatacataattaattaattaattttttttaatttgaaaggcgaaaaattaagccgggtgaagaaataacaatacattatggtttggattattggaagaagaggtacaaaaacggcctccattgcgaatgtggcagcaatttgtgcttcgaaaaagtgggttataaatttttttattattttttttggcaaaaatttttttaattccgaatctgggaacccgaatttaaacaaaagttaagaattcaggttttcaagtttcacatatgcttgaatccgtatgggaatgaagatcttttgattttgcaatggttttgaaattttttttttgcttgttttaatcaattttagacaaaaaaagcaattcgaaaaatttgagtttttgtctacatttggttcgagtttgaacgggtccgggaccagcaatttgccaatgactaaggaaccg

SEQ ID NO: 5012 - DNA, 2759 bp, Heterodera glycines
tgtcgctccgttccaaacctgcagacagtcctttatcacagttctgaagctcttcccgtatcttaaaattggaatttccatttcccacccaaaaagggaacgtacgctttgtactgctcctttcggtcggcgttcgtctcaagcgaaggcgggtcattctgaagggtcagcatcagcactttcattggggggtagcgatggtaaggggcggtgcctgtggcgagctcaatgcacagaatgccaaagctccaaatgtccgctttgaaatctaagagacgaattggaaacaaccagcacaccaccgactgaacaaccgaccgtaaccggacacctgctccatcacttcgggggccatccaacagggagtgccgacgaaagtgtgccgaactttcttaagggcatacatcggaagtccggaaacggcggcatgcccacctgtcgggaaaggtctcccccactggccgccagccaaccggacactccgaagtcagcgatttgcacggtcccatcgttggccaacaaaatgttgcctaacaagcaactggaaaagtaggcctaaacagctaatgactgacccgctttgatgtccctgtgtatttggccagaattatggaagtactcgaggccccggaggacttccttaagaactgtcgcaattatcacttcgtcgagcactccgtaggccgcctggtctttgccaattgcctaattagaatttggttaattctctcggaaaataatgacggaccatgcctttatttttctcttcaatatgtccaacattgaaccacagttcaacaaacgcatcaccacccaaagttcctccccgacgacctaaaaaggttcaattttaaggcattagaagaaaattacgaataagaaaaggggactatccatggtagacagggataacaaaacggacaattggtccaagaattatgggcactttgtctgacaattggcaaaagggcgttcattcccaaaacacacaaaggaagtgtagtaattgacgacatttggatgcgaacacagcgacatcgcctgtatttcatgcgacaattcgtccaccgaagtctgacacttttccaaatttatgctttttatggcgcacatttcgttcttcgacttgcagaatgccttaaccagttttgtccaatcctttccaatagcaatggcctcctcaccttaaacacagtcgcagtggcaccaactccaattgcgtcctgaagttcgtactcatctttcgaccccggccattggcacccaacggacaaatcccctccagccattctcataagggcatttcatcactgcacgaaattaattaaagaaagaaagaaaaaaacgtgccaagcaacttttaaatgagcaacaaaaggaacaaagcttttgtttttatcgaaataacataactttcagaaaaaataagttaaacaaagacataattcattagtctctggggatggaaaagcagaaaaaatatataaaatattcatatttatatttgtgggaatttgtaatttgattgatgtctgtctgtgggtgtgtccattagccaaatcgcttctcttctccgccccttcccgtcaattgttttgtgctccaatcatttcgtttaatgctgcgattgcagactgaaggattacgatctttgccttaatttctccgattttgaccattttttcagtctcgaaggtaaattaccttcgactgtttaacctccaaatcggccaactcggacaaattcttcttgaatgacgcgatgcgttccttcttcagctctgtcaattctgttttggccaatttgctgatcatttcgaacttcttgcatgcctcggcctgttcattttccgccttcagaatgtctctgtttcgtgctcgacagcgctccaagtttttgtttgccgtttcgtaatttgccaagcatcgcgtccttcggtagagcaggttctgaccacggatttaacagttagaccgcatttgggggatgatgagttaagccaactcactttggccgcttgcgtttcgcccaaaaaataacgcaacgtgtccacctccttcaattcctcgtcggtgccaaccctcgcctcagctttcttcagcttttcaaaggaagttgtgacctttcccagaaattgcccaaattccttctctccactcgcagcctccaattggccaaatttctccaatccatgcgaaatgcgagcataagtgtcggcaacagctgtgaaaacagtattttttactcggttaacaattcttaatttacttaaactgaaaaaggagaaataaacagggaaaatggaaagcgtatccaaaaaagggaattagattaatgtcaagtcaaaagtacagaaattggggggggggggggaatggggtgggccaaacgaaatcggcccaacagcaggagggaattccttaagaaacgtaaggtactgctcaagtcacaactacattagactctaaaaaacgaatggttatatgaagtaccagatagttaaaaagaaatttcgtaaaaatgatatgggatatttttcagtctaaagattcaggctaaaaatcactttataattattattattttccaaaacatgtttagaatctttgtgactataatatttttactccagtaacccttgtagaaatcgagatttttttgaatgacattcattttaggagttaaagcctttggcttcgatctttcacgcactcactttgtctgatccgacaaactttgtcggccctgccagtcgctt

SEQ ID NO: 5013 - DNA, 4011 bp, Heterodera glycines
aaaggttttctgcatttaaggcgaatgacaaaaaaaacaaaaacgaaaaaagagacagcacttggccagagaggaaaacttcgtcggccgtttgagtgaaccttttgaaaatggaaccaacaatttctttcttgtttcgacttcgaactgagagctgaaaattaaacgaaagttgcaaataattagtaaattgaaaacaaagatttcttacatcattttcatattccaaaaacacgcgaaagttttggtccttttgaaaaacggggtgagcagcaagccgagtcaaaaacttttcatgaagcgcgacagtctttttgaacgttgccaaatattccctggtgaaatgcacagacaaattaagtaaattaaaaagtaacacaaaaaaggactcactgctccaattcctgtttcattttcacaaattcctcctttgtcatcgtcgcttcgccttcgccaagtttttgaagtttctcgcgagatgcatcaaaatcgggtcgaggcggtgcggggggaatctgaaaaaaagaaaccgtattatgagacgggaggaaaggagacaatgtcaacatgatacaatgaatccggcgtattcctcattgtcttcgagacaattgtgtagccaaataaattcgtcatgctctctcacaacggacatttccaccctagcaaattcgggcgcatttgtctttgtttgaacagtgtatttgacctaaaagcattttatcgtattacaattcgaatttcaatataacaaaatatgcaacaaaagttttaaatgtacgaaatatttgtcttgctttcagaagcgtattttccgtcttatttcgtgtactttattgcacaatttttaattttgtagaaaattgaatttttattcgagtccggttcggggttcgaatttggtcgaatttttctcggctccgtaaatttataaaaaatttatttgaacgaggggagcgggggtggctccgtactattacctgacaataagtctaaaaaagcatatttgatagccatggttcgaattgggcaatgattccgaaccccggacccgaacaaaaagttgaaattttttttccaaggattacatttttcttggggtaaatgcttctaatcatttaacaacttttttttgatgtaaagcaatgcttctattgttattgtgtaaaaatgcgcaattttcgccaaaattataacttatattttggttttcaacttcttgttcgtattcgggtccggaattgggcaaatccgagttcagattcataatcagcacccttgaaaacccccagaaactgaattttagtccaaaataaaaagttaaaatagggaccacaattctttaccattacccgaattgttgcatgttttttcaataccttctcacgttccgaaagagcatcggatatgttcacaacaattgggtgctgagtttccacggttttgccttcctcagtgtcctggtcaattttattacacaaattatttctgaaaatcccacatttccatttgctttctctctatcgcgcaaaggtgttaagtcattgggagttgcggcattcgacgcgacaattatttccgaaaattcgccattggttaacccttcgcccacgttcaatggatgcggtagtttcacgtcagttgaagaaatcatgtgacttactacacatcatttaagcagtcattaaaatgagaggtaagccgagcaaaaaacagtgtattaaaaaaacgaaatcattggaaaatatttatcaaatgaacatttcctaatgagtgagcaatacacctaatggtgtccgtcgttctttttgtatttgatcttgcaacggtattcttcgggcacgactttttcgtaagtgtagggaatcataaaaacagcaaagcaggccagagaaatgtgcaaaagcattttgagaaaaactccaccaggacgcctatcgaaccaaccggcatcttccggaagcttaagtgggtaatagtgtagtttgtcccccccccattttggaaaaaaaaaaaattcaaattttttttcttcattgaaacatgtttttgggggttttcgaggtcgctgatcacgaatctgacctccattgcaaccaatttcgaaccccggacccaaattcgaacaaaagtcgaaaattcatttttttttaaattctcatttattgtccaaaatcagtgacatgagaccaaaaattataaaaaacatcaacggtatcgccaaaatggttgcgccacataaactcggggaagtaactttcaaatgtgtttgcagtgtttccgctacgtggtcggaattgcttataatgaatagccattagggggtgaggaataggtctaatgccaggaatttggccaaatggaatgggctgtgaagtcccccctccccgcccctaacacccattcaaaaaagacgttagttcgcactgacaaacacaaaggatgttcaaaatgcagctgcaattaacaaagaggttgtcgaccagccgatttgaatttggagaaaatttaatcccgttcgagcatcgtaatcgattttggacaataaatgagaatttttgaaaaaaatgaattttcgacttttgttcgaatttgggtccggggttcgaaattggttgcaatggaggtcagattcgtgatcagcgacctcgaaaaccccaaaaatatgttttcattgtaatttatgaatttcgaatttttgttcgaattcaggttcgggattcggaattttgaaaaataaatgtcatattcgtgatcagcgccccaaattaccctagaaatgactttttatttgaaaatttcagggggggtcacaaaaccgaaaagaaccagtatttattttttaaatgaaatcacaggaataaaatcgaagtaattaataaaactgttcataaaatggtgacattataatcaaataattatcttaaatttgcataagttcgcgggtcactaaaaaaattcataaattataataaaaagacaaaaatttagtttggaaatggacaaaataattataattgttaaaaattgcgcggatgtgggaaaagagggaaattgcggtccaatacacagacagagagatcaaagagtgacagagggcgagcaatggcattgccgcgaaggcccacggcactcacaatcgacgggtgctcctcgtccgtctctgcttgcggcgtcgccctctgtcgacgcttctcgtcccgttgaccatcatcgactcttccatgctgagctggtcgaccaccgtataattctgaaacaatgcattgggcaaaaacaagaaataaaaaatgacagaaagtgcactcatataacaaactgacccaattttgcacttgccatgaacgataatcgcggagatggtaaaagaaagtgacgcccaaccaaacgaaataagcgaacagaagcaaagttgagagacaaagaagtgctaaaagggacagtttgagcaaaatcaaaacgcaagaaaaaggtgtacgtagtcggtttagccaaattaatccgaaatatttctcctcaactcaagtaaatttgacttgactccattcgttgctcaccgacgccaatttccgtgtgcggtccgtcggttgccataattccggcggtgtttccctgcagcaaatgccacccggagagaaagcacacggtggcactcataaggacgagcggcgttagcaggaggaagcacaataaatcggtgagaagagtgccgcgaattgtcaacggaagaccgaacacaggacgaggatggccggaacggacataggcaaagaaagagggcgcagtgctgagggggagggggggggggaatgcatttatgccggggcaaacggacgaacgcaccgttttaattggaatttgaattggcaaatttcgcaatgagtccttaaggggagaaaaaattaagagacaaaaaggttggtgaattgattgatattggaatttgaaaaccaaaaacttttaaggtcggaaatgttacctctgagagacaaccagccatttttcagacaa

SEQ ID NO: 5014 - DNA, 2464 bp, Heterodera glycines
  unsure (1)..(2464): unsure at all n locations
aaatggtggaaaaaggaagagatgacagacatataattagagatcccataaccattgacttttaaataaacatttttgcataaatctgaaatatcctgtatcattttccgggtcaatgtcaactcttaaaaatcaactcgaataagggcctattttttttattcccgagagtttaagcttttgtttgataccaaaaatgtaggcaatgaccaattaagaaaaattatcattgattggatgcgcaaattttttaaatttgagtatccattaattagcatttgtgacagtattaatccggtaatttattcctgttgatgtccgctcaaaaaaagcgcaattccggtcaatgtccagtgattctttgatgccggcaaacacggcactttcacttccaccaccggcgccccttttcgctccgagtcggcgaacaatggcaaacttagctgtttctcagattcgactgattcgctaggatttgccttgatatcaaattaaaaaacggataatgattggtagcaaaaccatttttgtccatgaaatgtccaattgagggacgggggaaaagggcgcggcgctcggaggcaccgggcgcaattcggcgccgtcgaacagcgccccctgaattcggagggagctcagcgtcagtttgggcgcagctgtgccattggccgccgtctggccaaagccatgccaacacgtgttcagcaccaactcatccaaactaaggcccaattccctgaaacattcggccgattaaaagggcgaaagcggaagagaaaggcgatcaccgggcggagaattggcgaaaagcattcagcagagaaacggggcgaaaaagctggcccaaattgaccggggaaagcagcaattgctgggactgggccagggagagcagcgtttgggtgctgtgcactttgaacaccaattcctccaaatatttcgatggcaccgacggaccaccggcccaaagggaatcccaaaaagacggaatctgacaaaaaaaaggattgatcaacaaagtctatttgcattgcttttgcctggaaattgatcagcgattgggccacttcgatggtttgcttttcaggcaaattggtgcctttgattgcgcggcttatggccgaaagggacgagtgaatgttttgcaacaatttcaaggcgtacgcaaattccaattgaagcatttcgaccaaagggtcgtccgcgttggcttctcctccaaatgttttctttcacttttcccactttttattctctcttttttaccctttgcgtttgctttttctttttccaattttggcatttctttttgcctttcctgcgcattttgcagcatttgcggcttttgctggttcagccttttccaaagtgacaagagcggcgccaaagcttcgccccacaaatgtttcgagaatgcctttgcgatgtctcggcgagggaaagtgccgacgccggaggcgttttgctgggacaaagaaagggcggcgaacagtcgccgaagtttggcgatggcggcgtcactttgggccaaatcccacgaaagcataatattccgaggcaaattcagcaattccggccgatcagtttcgggcaatgtcgaggagacccaatccatgaaatcctgaagcaaatgatgacacacttgccaaaatggacaaacattctggcactttttgctccccaaacattggcattttcagtccgggcgccaattcgtcgccggccccatcgatcattttggaattgaacagttccagcagaaaggcgagcagcacgcggttgtccagctccacatcaattcggcccccgtagatggcgtttagcatcaatccgcggaacatttcccagtcgacgcctttcaaattgttttttcccgcaatgccaaacagcgaattcaacgcgattttggcacttctaaggtcagcttcggaaaattcgtaggccctgaatgaaattcaaatgcttgtttttttggcctatttgagtaatttctgacttaagccacgcctgcgggatgaaattgcgtcgttcctgcaccaccgcgtgcagccaatgcaacacaaatgccgccttggctttcgccgcttcgtccgtcccccgcttcgtccccttttgctctgtccttccgccgatgaaatttctctccaaattctttttaagccccggcggcgtttcgtatgccgccttcaggcacaactgcagaaaaaccaccggcaattggtcgtccggttcggtggtaagccaaagtcgaaagtcggcgtggagttggccggagagggagccaagttcggtcatcagacggttgacgacggcgggggtcaaatgcacgttgtacagacacagccaatggccctcaagggcactgtgccgcaacagctccacaacgtcccattcggcgtgactttcgcccatggccaattgaaagaattgctgccccngaggcattctttgcaaattctctctg

SEQ ID NO: 5015 - DNA, 2161 bp, Heterodera glycines
  unsure (1)..(2161): unsure at all n locations
tttcaatgccattttgattttcccaaatgccaacccctaaaggctttctcgcccttctgcagcgngangccattcctttgaatccccaaagcattttctgaacagagcgacacagtcattgacgctgaactgataacagtgatttatcgtgtggagagggcgaatggcaaagtaaagttgggcacaacgctgcgcaaatggcagaaaagtgtcgcgttgcaaatcaatttgtgtccgaaggtgttgcgaatcggacagaccctggggcaaaaaaaaggcatttgaatccgcaaatggaaataagccaaagtgtgcgcactcgtgccactttgtccgctttctctttgctttcattcaacgactcgagcagtgccgtgttgtccagcaaagagccgtcagaaacggcgagctgttcgagcagtacttgctcgagattgtccatttccaacttgagcgcctccatttggctgcttaattgtgtcgaactttgttccaattcgggcttttccaattcaatggccaatgacagaaattgggaggccaagccggatcgagtgatggagaaattgatctcggagaccacggcactgacgtgagaagccaaatggcaatgctcatttcgagagcagaggaaaagccgaaattggtcgttgaaatcgacctgagaaaatcgacgattaaacccaaaaaagccgaacaaatgaacagctaaaaatgccaaaagcaaatgccaaactccgtcagctgtccctgttctttgctctgtgctcgcctgtttttcgcccaattgtacggccaatcgcgcgccaattgtgtgaaagtccctccttaggagagggaccaatgccggctcaattcgttcgtcgatttcgtcaattatcaaagtcttcccaaagcgcacgcccaattcgatcttcaacaattaaattacaattgcaaaaagcgtcattttccgtccgaactttggtcattaaatccggttgattcgctcgtaaaatttctgtcgaattgcctttgaagtgattggccagaaaagtgcacactgtgccgctggggtcgacaacgaacggagtgtttttgacggcaaataaaatggcgccattttccattgccaatttgttggccaacaatccctcggatttccatctgagctgagcagtttcggaggcgagaaaattgaggaggtcaaaagcggcgggtaattggcaaatttcgcgccaattggccatcgtttgggcacgcatttcctcagtggcagcgcccagaaaagttacgaatgccgcacctgaagaagcaaattgggacgattggatcaacgaatgatcagactaaagtgatcactactgatcagaccaatcgatcatcggaaaatgtcaaaccgatcagccaacataaatttagagtgatgatctaatgagtgagtgatcagccgaataatggtaaaaccgatcaaccaatcaaaatcgaatccaacagcaaaaaatctgaccgatcagacagcagtgctccaccgttctgagctcgtcctccaactccttctgctgctgctgccaccgcgcgtactctccgcccaatctctccaccattttccccgcaaccacaatggtcgcctgttccctgtccaagtcgattttgatttcggtcgcctctttcatgcaattttcgaagttcgttttcagctccgccacttttttgtccagcgatttcagtcccttggacaatcgctccatttgctgctccgccgcgttcagatttttcaccagcgactcctttttctgctcgagcggcgcaattttctccaaaatcaaagcgtactgcaaatttgcggttacccaagcagccagcggagcaatcgcttaaatgttagccaaaatttgaatgtttcggctttcgagtggaaattccatagaaaaagccgtagaattacctgtcgatgcgtttttagcgttcaccgggtcgaacgaagcggccttcgatttgaccaaagcgcccacttttttggcggtcgacggagtgatgcggcggacgtcaaaattgatgatttcttccttgacgccacctttggccaagaagcgccgcatggactcccaggaagtgtccaaaatgcccatgaaaagaagcaccgcttccaaatgtcgcggatggaagtggcgggcgagcg

SEQ ID NO: 5016 - DNA, 1421 bp, Heterodera glycines
gctttttgccatttgtccgtttaattcctcttttgtcagtttaatttcttttttgaccatttgtccgtctctttgggccatttgtccttttaattcctcttttgtcagtttaattctttttgaccatttgtccgtctctttgggccatttgtccttataattcctcttttgtcagtataattttctttttgaccatttgtccgtctctttgggccatttgtccttttaattcctcttttggccatttgtccgtttaattcctcttttggccatttgtccgtttaattccgctttttgccatttgtccgtttaattcctcttttgtcagtttaattctttttgaccatttgtccgtctctttgggccatttgtccttttaattcctcttttggccatttgtccttcccccgccttacgtcggccaattgctgctcgatcagcttcttctgctgctcgatgttcgcgttctccgcctcggtggtgctcttcagcttctccatgtcctccttctgttccgttgctccgctcatactccgcgttatctccgccaatgcgccgttcgcttccgcttgcttctccgccagcagcttcgacttcttcgccgcctttttctgcatttttgccaccgcatttcgcgtctccgtcaatcggtcgacgcccgcccttagccgcgccagccgaccctccacggccgtccgtttggaactgatcaaagcgtggaaagtgtcgacaaaatgagcaaatttggctgggcattgactctccgctggtgccaagtgaaaaagttggacaaaggcggacaaaagccacgaggacgactgatcggaccgatcagcagcaccattttgttgtagagagagagcggcaatttgggaaagcgtctcgtgggaccaatgatcttgccaaatctgaaaaagtgccgaattagagggttaaatgcacttgatcgattggattggacacatgccattgtgcagcatttgctcagtgccggattggacaaaatgcgcgactcgaactgcggatgagcaacgtccatcagcagcaccaagtgcagatttgtgcggatgcgattcgcaaagtgaacatgcaaagtgccaacgctgccgaagccgtcgtccaatgcgaattccctggggacggacaatggcataaatcgttgttctgatcagcaacagtaatacaatcgcgttaccgtagcctgctcaacagttggtccagttcctgctgggtactgtaaagtccgggaacgtatccgtcagagagaagggaattgatcatttggaggaaagaatcgtccaacagttggtagtcctccacgaggagaagcacctgctcggcatcgatgcacgcacaataaatggcatctttcaagtcttgaccgaaattacgaagtgagtaagaggaagaaacgcgcagag

SEQ ID NO: 5017 - DNA, 2801 bp, Heterodera glycines
agagagagagagaggagagagatagggagaggggaggggggaggggggaggaagagagagagaaagagagagacaaaagagagtgagagagaaagtgaaaagggagagagaagagagggagataagtttgttctgttgttgccctaccaattgttccaaatgccgtgccgttgtgttcgcactgcagtgcatgttcagcaacagtctttgcgcttgaatgccgcctccctcaaagcattccttcagcagcgtctcttttccgcacccctcgggccccaccaccaaaatcggctccattttttgcgcttccgtcgccgctctttcgcggcctttgggacggagccattccatcaaaatatcacgcgcaatttgcatacggacggaccaaataatgggcggacgaagacgaaaatgggctaattgaattggcaaacctatgccaaaaatgggggggggggaggggaattgaggtgagacaatttgtgccatttgctgacagaccaaagtcatcggaataaccgagcaaagagtcggttcggccatcgcagtaaacattcaatggcaccttcgtgtcgggaatggcacaagtgttttgcgaaaagaccctttggcacaattcgctgcgtttgtccgacgaaacgaaaggggcaaaagcacgcaaaagggcgacgagaaattggtttttggacttggcattttgcaccagtgacaaagcgttgttcaaaatgcctttaattaattttctaaatattcattgtcttttgctttaccaatttgactgaatgccaatgctccgtttcgctgctttaccgtccattccaacgacggcaccaaatttttgtttagccaatcgccgaattgggcgggcaattccttttcattttggtgaatgaatcttcaaaagattaaattactgagaagctgctcccaatgcctttccgatcagtagtgatcaatcagtctgtgtctgatcatttttaatgcaaattgccgtgactttccgatcagtaatcagtctttctgtttctgattacccatccactactaattgcccattccttcacctgtcaattagcgtttgcatttccaaatcctcgtggctgaccaaaatcattcccatgcgcgaaatcgttgccggcgacgcgtggctcaaatcgacgcattcgaacaaaaaattaacattcgacccgaattgaatgcgttcccccgagggaagggtcaacaatttgttgtcgtccaacaccgaattcaatgcttcgatccatctgaggcaaaaattggttactcatcagagagaaaaatcattgaaacgacgtcctctttttacatgtgccactcaattcgtctacactatattaatatatgcgtatagatgagtggggtggattaattaaagataatccccccccctctcttctctccgccgccccactcactccgggtccacgtccccgtcgcagacaatccatgccggtttgttgcgcctttggcggccatgcgagccgcctgggtcagcgtgccgtccgtccactcgcgcgtgtccaagtccatttggcccacaagtcggctgcgcggcatcccttttgggttcatgctgaaatacatccaaatttcaccttctttcaaaaaatgttgttgacctgtacacgtcccccggttgttctccgctcagagaaagtgccttttggaggagtcgccaaagcgtcgatttgccggagcccggaggaccgacgatgatcacgccgatgcgctggcgcaactgctcgtacagttggaacagcttctgaagttgggcatttgtcgtgcgcatttgaaaatgttccgacgcttttctgatgggttcgataagatcggcaaattgggccttaattttctttttgcttttcaattttgaaaatgaactcaccgcctctcttttcgttcccgggaaaatgccgtccaaaagcacgcgaaagcgccgtgcgtccgcaaatgtcagtttggacagcgtgttcagctgcagttgttgcaccaccatttccgtctcgtcatccgccgttccgccacggttctgtcgtcgtttggccattgcatctgcgcatcccttcagcactgtctttagtgccctcagtccccaatcgtaatgttgctgttcgctgagcatttccttggccaactcaaaaatagtcaccaactttttggccaacactttcgcttggccaaatccttcggagaatagcaaagtttcggagatttgctggttgtccggcacggacattgccacgggtcggaacagctgcttcaaattgtccggcaatcgctgtcggccgccgtagcctttgcccgcggggttcagcgtgacaaaaatggccgagttgaagtcgacggggacggaaaggtcgccgatgcgacaaagggacgccttggcacggacggcctcctgaatcaactgcacttgggaggagacggcggacagaacaccgcgcccgaggcgattgaactcgtcgaaacagccccaggcgccgcattggatcagtcccacgaaaatgcgaccgatcgccctcacatcgatgccttcgtcgcagttgaacaccagcacctcaagtgggcagcgttgcttatgccattccgttttctgcctcctcccacctgtctgcccaacagtccggccaatgccttcaccgattcggtctttcccgtccccgccggtccgtacggattgccgcccatgccaatggccaatgcctgcgtcagcgtcaagtagcatttgtccgtcagcggcgtgtgcaccaatttggccgtgtttccctttttgggaagca

SEQ ID NO: 5018 - DNA, 4951 bp, Heterodera glycines
  unsure (1)..(4951): unsure at all n locations
agatggtcaaccgaagcgattgcgttgctgttattatctgtcagagcatgcatttgtcaacgttttcaaggaggtgtgtccatagtttaggttgtcagaattggaatgtttgggagctctaaactggaaaaaagccataatttctagagcgcgggatttcgaaattgccagtaccggggtcgggacttgaaaaatggaccggggcgcgatttcgggaccgagactcccggtcccggtggtctgtcaaaaaaaacgggatcggggccgggagtcccggcaaaatcccggcgggccacggtcccgtccgggctctaataatttcttaagcgactgatttaattactttttaatttccgttttcccatcaattagaaatttatccgtgccaccacttccgccagctacgaaattcatttttttgtttataagtcaactccaatcgagccatttgaattggtgaacaaacggacaaacgaaaagctgatattgataaaagcaaaaagaaatgcaaggcttaacaaagggataatgaagcggtatccgattgggaattcggtggcggttccgtggggaaaaaacggaaatttgaacaatttgaacaatgtcagctttatgctttgcgatgccaaacgatgcaacgggtaagcaacaggaatagcaccgaattcgactcccgaaaaaactttggacgtcggaaattccgatttcggaaaaaattatgatttaaaaaatgggaaaaagtattcttcaaattgctccgaatttttaggcctttgtctctatcagcagcgaagcaacgaaaagggtgtctaattatgtgaaagtggctactcaacttttgaggaccagacatttgaggatatccccgatttttgaggacataaaccatttcaaaaaaataaatgaaaattttattttaaatctttattttaaaaatagtttcccaagggccaacgagagcgaatataaagccattgattatctggatcatgccagtttccaaaagaattgagaataagacggttttgaaacgataaggaatgtgtgagaatttcatccccatttgggttctcatttgcatcaaagtcttcaaccaaattccgtatagccaatttgattgtgtgtattttctatattttaaatgctataaaataaaattccatttatttttttgaaattatgtatgtcctcaaatgttgtaccatggtgaaagtgaattaattgaattggagaaatggccgatgaagcagttcggattttgagtgaaaattgtcgctttgataaatgtgtagccccgtggtggtcgaaggacaaaaagtgcaaaatttgctaaatttttgactaaatccactcataacttttctcagacgcaaccaaattgcacaatcttggtatcatacgatagcccttgaattgcgctattagcctgccaaatttcaaaaaattatattaagtttttcaaaagttatgacaattttttcattttttggctagaacttttgaaaaacttaataaataagcctaagcctaaaccaagcctagcctaacctaacgataaaaaactgttcatacaacaaattttatttcctctttttttgcaaaaattgacaaaaaaatgggcaaaaaacgaaatttaataataatattattttaatataatatcaatcaaaaatattattccaacttttagacaaaggctaaaatatgggaagagcaaaagaatggaaaattgacatttttgacagaaacggaggacgagaggagcacctgctggacaaaaatgggtggcggaattaaaattaaatatcataaaataggtagtagaatattctggcatatatttttcaggatttgcttattcttaatcttttttcgtattaattttttgattttaaaattgggaaatttaaaataaaattctcctccctttaaatttaaattatgcgcacatttctgagaagtcaattttgataaaaattggtattctttaaaaaaacaccacatacaatacgaaaaaatatatctgctgaagagtggagaaaagataggacaaaaaggtgagtttttaacgtgaacttttgtttttaaattttttaaatttagatttttaaattgtcgataattaaaagttaatggcacggcaggccgtccagcaaagttgcattaatattggtgctaaatcgttctttcaaaaaaaaaaaaattataatgggcaatcattaaaaaacatcaaaataaaaaaatttgctgatggccaaaaatgttcgaaaagcaaggtttttgagctcttttggtcataactttttggaatcttaaccaaatttttttgaaaattttcagactgatagagaacacttagggatatgattgataaaaatgttttatataaattatggccaaaaacagcgaaaaattacgttttctagcttttttttggcgccgtgtgccatataaacgctaacaaaaattatcaattaaaaaaaagttcacgccgcattctcaaaaaggtaaacaaaaattaattaatattctctgtggaaagaacccgattcattaggtaaataaaacatataggataattaggaggaggaagcgaggggggggggctattagcaccgagaaatttaattggcgctcgagagtgtcagtccacctctcggggagacactcaattaaaggatgtatcgaaagtctcgaaagatatgtctattcaaatatatctccgagaatgggttcgaaattcaagacatgagactctcgacagatacattgtgccatatgatttgggtgccgaagccgtgcactgctcgtcaaaatgtgacggcacaactcgactgttggcatgatgattgattgatgtgttctgttcgggtggtaccggccgagactggtcaccgatgattgatttttttttgttctcgatccgctggtccgatcacaccattttcggcgtgccgggtgcgctcggcttgtcgctgctccgctgcggtgtgctctgtccgctgctgatcagaagtgaggcgcttttcgggaacggcttctccagcagttgttgctgctgctgctgctgttgttgtcgttgcttgtcatcggtgtcgtctaaaaataattaaatttaaatggtaattttttaacattttggtcaagcccacaaaaatgaaaattttgaaaaaaaaatcggtataaatagaatgaaaacaattcaaaagagaaaaaatctattcgatgccaacaaatcgcatatgccaatgcccttattgtaaccagaaaaaaaatcgggaggggcaaccgacgatattttttttttgttcttcgggtcaaaaaatttttgtccagtgaattgatttaaattttttggcgccgtagaaaaaacgggaaattttggccattttgagaccaaattttgaaaaaaaaaaatatataggaaaattgggatccggcgctagcgttagacgccgccggggaaaatttaaaaaattttagatccaatttattaattgagtaaaatttaaaaaattgtacatttttcggtaaaatttttttttttttttctttcaagggcgccgtgggtggggggggggaattttaattttccattgactcaccactttcgctgcactcctcctcgtcctccatctcctccagccgggtcatgtaccattggcggttgtcctccagctggtccaggatggcgttggcgtccggattcaccagctcggcccatgtctcgtacagcggatgcacaatgaagtcgatgaagccgatctaagatttaaaaaaaaatatttggtgcgagttaaatctgtgtcaatttttttttttatctaacctataggatatttttaaccccgcccccgctccggtaaaacagctctcccatttgatgaatttgaaaaatttaaaaatttcagacagaaattttttcgtaaaattttctaattctctaccaaagtattaagtatattttttattaagattaattaaaattccaagaaaaattatcaattttttctcgatttaataaattacaaattattttccggggattttaaagtaaatgatgcagccaatgggagtcgaatcagtttgaaaatttcccaatcaaaaatatattaaaaatcccaaaaattgcctgcgatttctcgaccgtgacattgcctcggtcgcacattgggctgatctccaggcctagctaaaaattttaaaaagtttttgaaaattctaaaaggccctggccaaaaaacccacctgtttttcccgatcaccctgtcgcaagtactcctccaaaatgcgctcattccactgccggtacagctcaattggcttcgtcgggttggacaaatcggccaaatgaatggccgagcgaagaacctaaatttaattaatgtaaataaaaaatattattttcaagtattttaatttattatataatattgttttattaaagtaaattaattaatttttgcttgaattttaaattaaaacccaaatattaaggatatattttatttattttttaatattctttatttgattctttatgtttttaattattttatttactcaaaaaattttatttttaatatttacttttttggcttccattttttatcaattatttttcaaattatttatataattttattgaaaatgcaattagtttttattacattagccgtagttaattcttttattaaattctttaatataaattttggaattttatgaattgaataccattattaaaaaaaaaaaaattaaattttactccatatttttaaaagatagtccatcaacatttcttttgttttatttttatatttttttaaaataattttatttaataattacattaattttgaaatataaatttggttttcttcaattttaacttcttttaataagccaaaatgaattttttgtattcaantattttttattaaaaatttat

SEQ ID NO: 5019 - DNA, 1952 bp, Heterodera glycines
  unsure (1)..(1952): unsure at all n locations
aaaattaaattttttgtattcaatattttttattaaaaaatntattaatgcttttttcaatttatgttatcccatttcatttctcttataaaatttgaataattaattattattttttaattaattgaaaaattcgtntaattaattaattaattttatttttttaccaatattctgtcctggtatttgtccagcagtgtgtccgtgccggacaccttcttcgcctccaccatcgttttgaggtcggccaacaaagtcatgtgcttgctcatgtcggtggccagcaccatttcgatgacctgaaaatttttgaaaaaataaaaataaaaaatacaataaaaatcaaaaaaatttaataaaaaaatacattaaaaaaccaaaattattaaaaaaattatgtaaaaaaaaacttaattcaactaacaaaagccaaatgaatagcatttttaattcaagagcgcaagtttataaatttttaggtttatttaataaaaaagagacattttgaatatttttttatcgaaaattctatttattttaacttaaaataaataaaaaattataaaatatttaagttaaatattcaatttcaatttttaccattttccgaaatgtttgccgctgttttttgctgaccccggccataaaatcgcaatccctttcctgcaacagcttgaacgccaccgcaagatgatgctgttccagcacagattctgtaaaattaataatataaaaaagaaaaggtcataaaaaacgttataaaatgaaataatatggaaaaagtgccaaaatgcaaaaagaaaataagtgtaaaaataatttttttttacaattaaagtgcctaaattcatttaaaacaaaaataatgataacaaaaagataaaaagaccaaattggcgataaaattaaatttgaattataatgaaatttttaaatgttttcgttttcagccatttaaattttgaattaattaaattttatttttgaaaataatcaatcaccgtcgttgtacatgatggccaattcattgttggtgttgatcaaatactgaaaatatttaaatttaaaataaattttttatttttaaaatttttattgtacctgatttgtgaagccaggatgatcgacctaataagaaaaaaagaattttattccataaacggattttaattaggttttgaacccgctgaaaaagaaaatgaccaaatcatggatgataataaactttacgatccctatgataaagtcattttgtcctacaagcatggcactcacatcatgaatggcagcagcgatgatcgccgccagcacttccaaatcggagaacacgccctgaggcgaagggaggtaagaggtgatcagcacggtgctgagtcgttatataaaaaccatcaaatggaaattttcaacctaaaactgtccataacttttgtcaaagtcaacagaacagaattaaacattcttggtatcatgcgatagccctaacatttctctattagttcatctaaatttcaaaaaatttggtcaagcttaagcaaagtatggccaaaagtacacaagcaaccaggttttcacagatttttggccataactttttttaaacctaacgaaatttttttaaattttgcagactaatagagggcacatagggttatcgattaatagcaaaaaaataaaaaacaaaaataatttctaacagaaattttttaattaaaaataaaattattttgatcatcaaaaattctgatcaaaacattcttagaacgaacaaaataaagtgattttgctatcattcgctagccctatgtgccctctattaaaaatttcgaaaaatttcgttaggtttcaaaaaagttatagctaaaaatgttagaaaaacccgccgccttgggtacttttggccataactttgttcagctttgaccaaatttttgaaatttaggtgagctaat

SEQ ID NO: 5020 - DNA, 1060 bp, Heterodera glycines
agaaatagagaggatgagagagtgaaaaagattgagagccagtggatgacagagtgaaaaataagtagggggacagagagcgagagaaagaaaggataatagggagcgagaaagaggggatgagagaatgaaaaataagtgagagggatagagagcgagagatagagagaaaatagagagcgagagaaaaaagaaagtcatagtgaatcatctgatcaaaaaaggggaccgtacttcgagtgccggtgtggagatgagcacgcccatggactgggccacatcagcgccatggatttggttgtgatatggattattcctaaaagagggggcaaattggaaataccaaaattacttaaatatatttaaactaaaatttaaaaaaaatttattggcgttccgtcacaaaattccgaccgataattatgctccaaatgcagcaaaaagttgaccaaagtgcccggattgatgtcaaatttgaacattagcttccgcttcctgagcaatgtgtacgtgacggtggtcaaactgtgctgtttggacagctaaaaattgaaatatttaatgaaaaattttttttttttaatttattttattttttgtaaaattgaaagaaatttaggcactgttaagcacagagattaggcctttcgagactgaaaattcctcgagactcaaaaaatcaaatgggaatccccactaaaaatggcaaacgaaatttaataatttaaaaatataaaataaaattaaaacaatttaaaaatgaaaaaaatatttaaaattaaaatgacctcatgaattttaaagatgttcaaaccccattcatttattcgttgcatgtaaacttcgatctgtaaaataaataatatacaaattttctatataaaaaaagattcgtttgacatttaattcaaggcttggcttacctcttttttacagggcacctaaaatataaaaataatttttttttaaatatattttttaaatttgtaactgaccccaaattcggatggcacagattgggtattacgtagcctttgcacactgtaaaataaaaaaataa

SEQ ID NO: 5021 - DNA, 1585 bp, Heterodera glycines
agcagttagttaatttttttcggacaggtgagtcttctgctatttattttgtccacttttggacaaatggtcattgccaatttgagcaaaaaaaactcgccccgaaatgcgcgacatgcccatcaccgcggccgtcttggccttgttaaacaatgacggggacggcaaccgttgttgttgcaggatcggggacggggaggaggtgctcggccgttgtgggtcctcttcaagcattgaatgtttctggagaaaagaaaattgaattttaaaaattttgaaaatttagggggacagagggaattaaattgtaaatttatatgggggaattaattttcgaaaattaagggaaatataaaaaagacaaatataaattttaaaatgaaaatagaaggttgggataataaatataagtttgcgcttagaaaaaattcaattagggaggaaaaaaaagtaaaatttttaattttgaaaatttagtcaaaaaattatttcaatattatgtaaaggaaaattaaaatttagaattataaaaatgtttaatttataataaaattcatttatttttgatggtaaatgaaaaaaagaaatatttgcttaaagcaatttgataaatggtataaatttaatgtttatatttgtgaaaagcaaaaagtaaagaaaatatattttttagaaaatatattcaacaaataaatttaggttagaaagcgatttttaagaatgttttgtaagcagaaaataggctcaaaagcaacagaaattaaatggaaaatatgtacaaaattaaatttaaaaatttgcaaaaatttacaaaaaaataatctgcggcggctgggaatctcacccacacaaattttaaaaattaattttattgcattaaaaaagatatacatttttttaaaacccgtgcgggtttcactgacttatatataaagtcaaaactttcgaaattttagtgagggaggaaaatgtcacaaaattcagtcccctcccccccgccccgccccgcccccgtgcgtcccccgcggcgacaacttccggcgacagcgccgccggcggaatcgccccgccgggggcggcgcagtcggtctccgattatcaccgccggcgacggggcgagcggtccccgtccccgccgcaaagtccatccgtttgtctgtctgtctagccataacagtgtctcgtcgttgctgattagcggtgggtcgcccccgccccgcccccgctggcggcggggggtaacggaatttctccaatttccgtcatcatttttatttctttttgagccgcccggaatttatacggtttccgtccgacggagcgacccggaatttttgggggttctcaaaaagtgaatttatgtattcagcgagaaaatttctgtttctacgaattccatatttttggagggaaatttttaggccaaacaatgattttttttttgcaaaatttttaagcaaatttcgaagtgccataattttttcctcaatttttaaagcataaaattcccacacgtatttcctccgcctaaataaaataattaccaaagaccccacacctcactaattatcaaaaaaaaacatag

SEQ ID NO: 5022 - DNA, 3947 bp, Heterodera glycines
aagaaattaaattttcctatgtaaacactccatttaaaattttagcataatgtggcactttctccgaaccattgagctgcacgaaatgcctgaattcttcatggatagccatctgaaccctgattactaccaccgaaaaaaacggacgctctaccatcgctgtattttcgcaggatgtcgtgcgaaaatgtgagttgttttttgcccaattgataagcttgttatttcaacaaatgggtttagaaaaatcgctcagtcggcaggaatccgccgggtgtactacaacgtggcgcacatgcacgggggacaaattcatcattaaaaaatgtgcgaacaggggaaaaaagtgggaaagatttctagagcccagatttttttttaaaaaaggatattttctagatgcctttaaaatatttggttaagaataaaaaattaataggaaacattttcaaagctggaaaatttccaaggaattgacattttttttttataatttcagggagaatatattttggaaaaattttttttaattcttcggcgatattttggaaaaaattttgcaagagtttagtaattcaccataaaattttgaatgttttaataggcatttagaaatatctttttaaaggttcttagtttacgataaatgtttaaaaacatctgggccttagttatgccattcattttgatgttgtatttacttttgctgccaataaaacattttgattgaaatgccctttttgttgttaattgcccttaaatatgcgtacatttgcagttttactcactttttttttgctcatctccttgatgtatttgttccggatgctttcccattgcttttgcagtcatatgaaaattgcactccttttggagaccctcttttgaccgtttttcaataattaccatcgatcctttcaattttgtcattttcctcggtctcataaaattcgcttcgatttgcgtagtccaaatcccgttgccaaattgtgcggatacttaatatccatcattatgtgtaaaaaaacaaaaaaaaattttgaccaaaaaaaagttgaaaaaattttcaaaattgtactcttttaaactagcgccaaaaattccatttaaaaaattaacaaggaaaaaaatgggacattgagtaaaacagcacaagaaaattcacatttaatactttatttatgattttgcagagaatgacagtcaattattatgttctctgtcttttatacgaatttcaaaggaaaaaacgggctaattaaataaataaataggtaaataaattcccgactttaattaaattcgaattgttcctaaaatgaaatttgtgaaataggtaggttgaaacaaaaagcgatcattttgacccttaattttcgtttttcttgtcactgatcaacaaacggtgtttgatataaatttgagtggatttgtgttgaaaatggacttaaaaagaattttgagcctttaatcaaaatttgtaatttaaaattgattcctttatgttttaaattattttatacaaaaactgcaattttaataaatttcacccttatatttgaaactttttcgcccctaaaaatccgttccctaattatgatatactaaaaaagcgtaaccaagaaatgttgacactgatgaagaaaaatttgtggcctaagaatttcattcctaccatcggtagtattacccaaatacacaacattgaccaagtaagaaaaaataaggtatgccctaagaaattgacgatggtcattgattaatcgcctaaaagtcgattgacgcatttatacagcctatacaatataatacagcaatatatacatatacacaacaccatgacatacatatgtgtacaattgagttaatccatcggaatttaatcacccatatcaattgcgcgattcatctccattcacagcagcggcgttctattcagctccacctttgcgctggttccactccgccagattgtcgtgcagcttctcaatgattgcgagtgcctccatcagcgtttcgttgccgctcgagtccgtcaatataaccgcatttgcatcgtcgtaagcctgcgcaaaaatgaaatgaacagcagcctctctaaaacaatgaaatccttccaaccaccttttgtgcgattcggcgagcctcctccgtcgatttcagtaattcctcgtagaaaacggaaaagttcagcgccacaccaagacggatgggatgcgatggtcgaagtttttcctgagcaatgctgtacgcctcctggtacgccttctgtgccttgcgaagatctgaaaattggggaggggggaatttgttgaattttagcattttcgaagcccttttaccatccgcttccgacggtttgatctcggccaagtagcggtggaagtcgcccttcatccgcatgtagaacactttggcctccgggtcggcagcctttgggatgagctggttgtccaacagagtctgaaaaatttcaaaaaattttttggagttaaattctttccggggaaaacgccgcacggacggacgcactgaccaaaatttcacggcccttctcctccgcctcgctctccaccttcttctgcagcaccttgacaccttgcttctgtttgtccatgatggtcgactttttcacatgggattcgatgacacgccacgcggaacgacgagtgctgatcgcccttcggtacgcagcggacagcaaagtgcgctcttcttcggtgagttcgacgctcatttcggccacctgaaatggggggagggaaattataacagggaaatccggaaaagcatccattcgatccatcgccgctcacaacacctgcttcatctcctttgccatttcgtcgtagcgttcgcattgttccgccagcttggcccgttggatgtggtcctcgcgctgttctgccatttagatggatgggttatgatgaatattaaggaaggactgggcttaattttttctgaacaaatatggcatacttgtgatgaaaaaacaataaaaattatttaaatttgtatgtcgtgtcttatcgaaaaaactgaaatcaagaaattctttttaaaatgtagggaaagaaatccagaaatgtgagtgctcaatttcagcacagtcaatgaaaatcaatcagaatccgaattcggattcagaagttcacagttttagagtaacaaaggacaaacagaaaaggtgacaatttttggtttagaaattatagcaaattaataagacgatgaaggcagaaaaaaaggcaaaagaataataaagtggaatgggcgggccaatttgactccttaaataaggatttttaaaggaaatacctatgcaaatttgtcatgcaatttcaaatttattttggcgttttgttttatagaattgaaaattacgaaaggcggagggttattcttcaatttgatgcttttgcaaaagttttgttagttttccggtttcacataggcatttgtttaactcgttttccttcacaaaaccccttaagttttaaaattttacttatctaattttgtccaaataaatgtcataaaatgtgacactttcatatgcctacataattcttttttaagaaatacttgaaaaatttcactatcttttccacgaaaaaagtaccgaattttctggtgcttttactcaatgtccccatctattttctctttgctaaaatttattttttcttatgaatctttgaaggaaaaaaacccactgaactgaaaagtaccaaaaactgtcttactaatttgcctcgacagaaaatgtcagacaaccgaaaagaagcagagcaaaagatggcaacagcaatgtaacttcaaaacgccagttttcaatttcaattttagactcacttctttcagcttcatctccggagacgcttgactggcggtgtgcgatttgctcccaccttctcaacttggcctgggaactgcaatgatca

SEQ ID NO: 5023 - DNA, 2074 bp, Heterodera glycines
ctcaatttcagctctggctcaataactcgtcaggagttgattttatcaaaagatcatctaagagcttttaggtagagaattttcagcccaatgtaatgtgctttatctcatgtttatagcatgagtttaaaaaaagttataaaattaattgtgattgtgaaactcaaaaccataggggggaccccatggttttgcatttcatgaaaatattttgtgctcatatgtatgtcaaaatgcatgtttatggcataatataagaagatgaacatggatatagggtattttttcagtttcatgcttttgcgaaggttttgttagttttccgatttcacataggcatttgtttaactcgttttccttcacaaaaccccttaagttttaaaattttacttatctaattttgtccaaataaatgtcataaaatgtgccactttcatatgcctacataattcttttttaagaaatacttgaaaaatttcacttttttccacgaaaaaagtaccgaattttctggtgcttttactcaatgtccccatcttttttctctttgttaaaatttatttttttttatgaatttttgaaggaaaaaaacccactgaactgaaaagtaccaaaaactgtcttaataatttgcctcaacaaaaaatgtcagacaaccgaaaagaagcagagcaaaagatggcaaaagcaatgtaaatttaaaatgccagttttcaatttcaattttgttttcgcttttttcagcttcatctccggcgacggttggctggcggtgttcgatttgctcccaccttctcaacttggcctgggaattgcaatgatcagcccccgttttgacttctatgtggacgaacatttcaaaacgcgcaaatgggcactgaaatttatgcgaattcgaagcaaaattggagcaaatggcacgaaggaaatggaagttgtcaattacgatggaaaaccgttaccaatgccacaaattgaattgccgcgcaaagtctccggattcaaacgcattctcatcaagtaaaattgtggctatatgtaaaaattttcggcaaaacttttccccattcattttcagtttcatcgaccgcaatgccatcgcttttctccaccatttgcgtccacttttcgcttcatgtccaattaatttgatcatcaatgcggccagtgatcacattttggagatcactttgcatttggccactgatcgtgaaaaatatttgtggaatgtttttttcctatccaattttcaaacatttgcgacaatttgcgccataacttctcaggacgggggcgtgaagactgaaggtgggggtagaaaaatttacaattttttttcttcaattttttttaacaataaaccttttttcttgaaaaattgataagtttgaaatttaaaaaaaataaacggtgaaattttgcccggcgaaattttggggtgcacctcgaataagcttgcactaacaataaatttcaccctaactgaatttttttttaaatttcaaaacagaaatttttccagaaaaaaataaaattttctagcgtttattccttgaattaccatttttttcaaatgtttccaaaaaatttttcggaggatgggacgaagcgatacattgagggagtggaaacgagctgcccccgttaacgacctgctccgaaataaaactttttcgatacaaattcagttttttttttgtcaaatacacattttttagcctggcacattccgttacgtgttcttgttttgtttggcacattttatgcacggagttggcgcaactccactgtacaccattggcttgtcctacattgacgaaaatgtgtctattattaaaattttcaaatatctctccaaactcaaacgatggtaattattgaaaaacggtcaaaagagggtctccaaaaggagtgcaattttcatatgactgcaaaagcaatgggaaagcatccggaacaaatacatcaaggagatgagcaaaaaaaaagtgagtaaaactgcaaatgtacgcatatttaagggcaattaacaacaaaaagggcatttaaatcaaaatgttttattggcagcaaa

SEQ ID NO: 5024 - DNA, 3015 bp, Heterodera glycines
  unsure (1)..(3015): unsure at all n locations
tgggtcggggtcacttcgccgcggggccaactcgccgcgcgctttctcgccgcgggcccaactcgccgcggccaactcgccgcgcgctttctcgccgcgggcccaactcgccgcggccaactcgccgcgccttgttttttggcaatctcgccgccagaatttttttttaaaaactaagttcagaagaaagttagaaatttaaatttcctaaatttggcttttaaactattaaaaatcattgaaatgaaatgtatccctgaattgaaatatgtcaaaaaatcattgaaatttcaccaattcgacatcgattttcgaatttttaccccaaaaaagaatcggcgtaataaaaacgaattggccaaaaacgaatcgtccttttaccaatttaccggtgcaattgatccccagcaccggtgttaaaaagttgaccaatggattggcacggagctgggaagacagtcccatgcaccccacgcacgtctttttttttatatcccgttacgatttttttactttcacattggcactgttcgcttcttctgtgaccattttgacaaaattgttgttcaaatacgtgtgtattattcgtcatcgaattcgtctctttgttagcatcactataatttcatattgatatccacattaaatttcgaaaatatagaggaatcattcgttctgcaatttttgcttcctttgttgactttcaatttgaagcatattaaattggagagaaactttgatgaaatataacttattaaacacggcgattcaattttgggctcccagtgcaaataagtttattatttatttagtaatcagaacgccaaaactttgcaaaacttgaatttttttggggattttcccttgtaaaattagaagagccgatctcgagttaaaaactagacagctaaaaaataaactgtgattcgatagagggggtcaaactatgggcctatgcaaaatttgaagaaaattggtcaataggaaaaaatttttttcaaggacaaacatttcaataattttaatccttttttagccaagtccacaatttaaggccaaaccaaataaaatttacaatattctccagaattttcccttcaaaatgagcataaaatggttctatttgctctagtattcaccaagttataagctaagaaaatttcataaaattgtcgatgttgtacgtaaccaacactttttgaatataattttttattgacacgaaaactttattaataaaaaaataattctgccttcttctgtaaaagaagaaattgaaattaacatacaacataaggaggactcgaacctgagacccccttttggtgactaacgcacagaccactaagacgaaaaaaccaacttaattgtacaaggagcccaaaattgaatcgccgtgtgtaacgatgtggtgggacacaaaccgacgcgaatgccgtaaatgaaccttacaataattacttaattccagttccctcgggagtactgtcgttgccttcttccactcctttaaactcgtttatcaagaacggtaaaaaaaagtttgaaactaatatgttcacttttattgccagagcggacgttgttatcagcaatggacctgcaattgggcttgggatttgcctttctgcctgtttattcgattttctccggttgtatcgttgccgtgttgtctttgtagagtcaatttgtcgtgttcaaaagctttcactaaccgggtgttagtttataattctccttacgaaccattttatttcttttatttagggctaatttactatttccgaatttctcacgcgttcatcgtccaatggaagaatttgcaaaagaaatacccaagaagcgaatatatgggcaggctcgtttaattttcatgcttgctgtaatttttcagctaataaattggtactcatgcactttgggtcccattttgaaaatttgctttatgttagaaactgaacaaaatgatcatttttttatgttttcaatgattttgacttcttttaacttgttttaatcatttttagagcaaaagtgagaattttgaaaaattttttttatataatttccgactttattcgggtccgtgatccagaatttcatctagcgcatttttacagccgatgattttgaattcatagccgtcaaaatttatttttttcgcaaaaaacgaaacctatacataacgttatattccttggaggcgaatatggatcttctcatttcactattctttcccgcgaagaaatttagaaaggaagtcctaaagaccaaaattagcgttaacctcgtaaactgttgtaccttcggtttcggttcgatgttttcagcaaaaagcatgtttcgaacgtgatagtcattgtagtaataatgcctaaaaatggaaagtgagtcccatttccatgcaattactgtcgctacttcatcgactgcatatgatgccggcactcctcaacttttctgtcaatgattcgaagatcagagatatgggcattttttgtgaactcttaacagatttagggatgtataattaaaaaaaacattgaagagcactgattcaattgattttacggtaagttttttgaacattccagaagtggatctgcaacttctctacaggaggaattggatcggatattcattaaaaatcagttgttcagtaccttcaattaacagaaaaaagaacatacgtttcttcaacacttcacggaaaacaggaatcggtatgtcccaaaattcttagattgaaatttaatatataacggaaggaaatcactcaccgaaatcccaccaatatactttcacacttctttgcaactttttgtacatgataaggacgtttctcttggcttcagactgattatgcgatatgacgggtttgacagtacgggagattattgttggcacattagacaaagtcattgccgaaaccaggaatttatattanaacaaatataaatggaaaaggaaaactaaaaaatatttaaatgtactcgtaaacacagaattttacat

SEQ ID NO: 5025 - DNA, 3348 bp, Heterodera glycines
  unsure (1)..(3348): unsure at all n locations
tcagtcccgttaataattagttgcatattttgaatttttcggaaatgaattttcgaacttttgttcgaatccgggtcaggggtgtgggccgaaatagatccaganaactatttctttatttctaaaattttttttgaaaattttctttttcaaagggggggggggtaccaagtacactattacccttgttttatcccaatcttaaatagaagactacaaaaaaatttttaaatttttaatcaacttttcacaaattttgaaaaagtcccggtcccggcgggaccccggcccaaaaatcggggccgggagtcccgaaaaacccgcagtcacggacccgggatcccgtcccggtccattttgcaactcccggtcccggccatttcaaaattccggtctctagtaacaaatctgactctcaatgcccacctgtcgattcagaagctcacaatgccattgttcgatcaatttcccccatcggttattgaaaataatttcatcgggtggaatttgaatattcaattgtctgagactctaaatattcaaataaatgattttaatattacccaagttgttacctcgagaaactcctcatggtccaggtgtacatttgaaatccataatttgcgccaaaagcttcttgaaagttcaatgaggctttcgtgccccctttccgacgcaaccatattcataaaacattggggcagcactgtgtttgataattttgcgagtaaatcatcaattacgcccttaaatttctttccttaatcttttcactgacaattattatatacatgtctggtcccaattgtaatgccatggactcgggccaattctctctgctgttcaaagaaattttttctcaatgccgccgtggagaaagggaccaaacttcctgggttttaaaatgatttttgggatgtaattaacaaataccagcagaagttaataagctcgaataatgcacaggtcggaagttatactcaatggaaggacagagtcttcgcgtgacatttaaacgctaaaaaagcaacattttgtagtgaccacaataaatccgtatgtaataaactttcaaaagaaacctcgaacattatccaagaagatattgtcgtaacatcataataaaaatcaattctcttgacaaaattcattgtgtccttaacacttccaaaataaaattatttcactttagtatttgggttattttatacatttacatataatgccaagaaattataaaaatgacgtagctaacaataaacctataactagctagctacaatttgcatgtgcataaatcaacaatatttgtggatttgattacagaattaaatagttaaattgatcaaatgagcattatccttactctgattgctcgagtgcgtgatgggctgattttggctacttcaattgagggggctgatgacgtaaattttaattcattataatttttcttcagaaatgaaatttagcctgagcacaacactgtcaagtacatgacacaagcgaaaatgctgttcaaaaagttgaacagtccggggacgcctcaggcgcaatcagtcgccagtggacaatatttctttcagtgagtgcatttgttgtaatgaattccatttgaaaatatctgtcatcatttgagctacattgtcaaagacactgtgtgtacgctttgtttatgcgatcagacgctcccgagaaaggctgccttttcctatttggaggaagtcgggagtgaattcctcaaccaacacggcactcaaatcgacgctacggccaggccgtaccattttctcgaatttggtattcctttccttttaatttattgggatccatttgtttcttcagactcatatatccagaatatcaaacgaaaacatttggacaggggccgtaacggtgatcctttctttctcactttttgttagttaaaattcaaaggaatttaacagcgatggcagcggttaacagtgagcttcaggatgtgacacggattatggtctcaaacatcgaagacgtcattcatcgaggggaggcgttgaacagtgagagacttgttaataagtgaagtgtgggagcggcggttagataaaaacgaatattcctattttacactctttaactttcttggatcagaatcgcttttgccctctcccaccctcttaattcaatttgtttcactatttagtcattctaattaacaaaatttagttttggagtccagggcttccgacctttcggatctgagtaaaaagtatcgagaggacgcgagacagttgaaccgacgaacggccatcttcaaactgttcgtcggacttgcagttgctttcgccttcttcatgatcttccgctttgtctatatgtaagcaaatggtcattcgttgtcagtggtgtctcacatatcttcgcttttattttattttttttgttattgtgcggtgtcaaaatccccttctttttcacttgtctaaaaatgaaaatgtaatcattttatttattgttgtttttcattaataaatatatatctcttttatggatgaaaaaagaaaagaaattgcgtttttctttccaaaatttttgctatgattgaattattatttgtccttttgctaatttttaaatgttactttgaatctgagtcaccgatgagcacactttgcattgaactcaataaaaatgagtttttggacagcaaaattgtacgggtcgaaaaaggatggaatttgcagtttgtccgtgggattggcctctttggaaagtctgtgcggatccgaattaacgaggctgaagttgagcacgtattcgctggtgctgttacggtcgatgacttggattcccggaccaattgggtgtaccgttgtgatcagttcggagcatttcggtcctatttttttgactacgtctgtaactttgctgcttcagctatgaattcttcgatgttgagacgaatgccctctctgcggttgggaggggttttttctgcgttgtgcccgagtggcaaattgctggcgtagggaaacgactcacattgaacggactaagtgtggtcacgcacttggccaagttgatgggaccgctcagagagtggcgggatcgtctgagggtggccaaggagtccggttacaatgtcagagcgatgctttttcactaaacatctccgccccattttgaggtcattcatttgactcccgtgcagacattgggaatttcgaacagcaggtggccatcacttcccatgccataataaattaattgcccacgacatttgcggccccaactaaaataggactcatttatcgaactcctttacactgaactttatttaatctatgtattagtcattcatttaaa

SEQ ID NO: 5026 - DNA, 908 bp, Heterodera glycines
  unsure (1)..(908): unsure at all n locations
atttgtttcctatttagtcattctaattaacaaacttttgatttggagtccagggcttccgacctttcggatctgactaaaaagtatcgagaggacgcgagacagttgaaccgacgaacggccatcttcaaactgttcgtcggacttgcagttgcttttgccttcttcatgatcttccgctttgtctatatgtaagcaaatggtcattcgttgtcagtggtgtctcacatatcttcgcttttattttattttatttgttattgtgcggtgtcaaaatccccttctttttcacttgtctaaaaatgaaaatgtaatcattttatttattgttgtttttcattaataaatatatatctcttttatggatgaaaaaagaaaagaaattgcgtttttctttccaaaatttttgctacgattgaattattatttgtccttttgctaatttttaaatgttactttgaatctaagtcaccgatgagcacactttgcattgaactcaataaaaatgagtttttggacagcaaaattgtacgggtcgaaaaaggatggaatttgcagtttgtccgtgggattggcctctttggaaagtctgtgcggatccgaattaacgaggctgaagttgagcacgtattcgctggtgctgttacggtcgatgacttggattcccggaccaattgggtgtaccgttgtgatcagttcggagcatttcggtcctatttttttgactacgtctgtaactttgctgcttcagctatgaattcttcgatgttgagacgaatgccctatctgcggttgggagggngtttttctgcgttgtgcccgagtggcaaattgctggcgtagggaaacgactcacattgaacggactaagtgtggtcacgcacttggccaaagtgatgggaccgctc

SEQ ID NO: 5027 - DNA, 2352 bp, Heterodera glycines
tagtcattcatttaaaacagagcttgaaaattgctagtcagcctaccaatccttaatcggccaattgatactgtagaattatgctaattgtaagatgtcctaataatgttttatatttccatttttcatctttaccgtaatttaaaaaccaggttttggtcgctctgtcattttccacattttttccttcttccgaggcgcaaatgtcgtgccacaaatgtcggggttccattgcccattatacattttaataccctttcttaattacgcttcccccaatttccaattttagctactctatcgccgaattcgatcagctgaatccgccgattgaggctaacttttccgatttaaagcatttggtggatggaattgagcatgagtggcacatgttgactatccaggacgtggtgtggaaccacgctgcaaagaatgccaattggttgcaggtgtttgtcacttggctcataaaatgccattgttcccaaaatttgcgtccaaggaccaccctgaatgtgcctataactgtgccaattcggcccacctaagaccggcgtatgtgctggaccgggcgttgaatcagttcagcagggaaattggggaggggaaatggacgagcgaaggaattccgacggacattcgacacgacactcacctttcggtgggggggggggcattcccgtggattaatcggaaagtgccaatgggaaggctcttcggaatgctctcgcttcaaaagtgtttccctccattcgattgcacgagttttttcaagccgacgtgaaaacaatggaaaagcaattcaaagctaaaattggattaagttggtttgataattgaacaattcaaaacttacagttgagacaaataaacggccaattaattaactttcctcagcagaaacccctgagaatggcaacacaggcggcgattccatcgaattaatcgctgacccaaactttcgtcgtttcggatgctccgttaatttgacccaggccgtgcaacttttcgcaacaaaagagtgggacttctttctttctgtttttcgctgattccgtttttccattggtcagtgctgacattggcgaaagcattggccaattcgttgctcatttgaatcggctgaatgaggacgcccgacggaccgttgagggacacattttgaaggcaatcgaagcgatcattggccacgtgcactacgaagtgggggacagacagcagcaggagtttgctccgttcacaacaaatttcagagagtggcagcaaatgggccgcgaaaagaagcagtgacactcagtgaaccgctggtcacaaagtgatcggatgcctttcccggggaacgaatggcctttcccccaaatgtttcagctatttttaccatccttccgaattcggtctcaacgcgtgggaggaggacgaaaagttcgccttcgatccttcgacttccgcccggctgatggcctgcaacggttgggtgatgaacgcggacccaatgtccaacttcgcggagtggccaagccaagtttaccttcgtcgcgagttggtctgctggggcgacagtgtgaagctgaactacggccaacagcccgccgactgtccattcctttgggaatatatgcgccgctacacggagaaatgtgcgcggattttccatgggtttcgcattgacaattgccacagtacgcccattcacgtggcggagtatttgctgcacgcggcgcgcaaagtgcgcaaggacctttatgtagtggccgaactgttcaccggcagcgaacagttggacaatttgttcgtaaatcgactcggaattacctcactgatcagaggtggtcaaaaaagcacccaaaacggatcaaaatgaaagtttagaggctcagaatgcgcatgacagtcatgaacaggtgcgttcggcgtgggttaatgggaaatggcaaagcgtgcttcttcaagggtcgctttgtttaccgctacgggggcgacccggtcggtgcctttcgctgtaaggcaacgcgccccgccccgtgggcggtggcccatgcgcttctttacgaccaaacgcacgacaacccatccccggcgcaggtgccgtctcttcgcccctaatctctctcttttccggccttttgtagaaacggacgccctatgactttgtgccgactgcggcgatgtgttcgatcagcggaagtgcgtgtgggacggtgcgtgggtacgacgaatttgtggcgcacaatatcgacgtggtcaaagagcagcgaatgtaccgcaagtggtcggagttcggggaaaaggcaaaggaatggtgacggcacgacgccttctcaacgtcactcgtttaccctttggcactttggc

SEQ ID NO: 5028 - DNA, 4832 bp, Heterodera glycines
ctttcataaatttaatgaatggtttatattcgttcatagtaatttttgtaggtagagaaataaattcttcgctctgtggacttcgctttaggataaagtatttatcaaccaaaatttctaattccgtggtagcatgagttgggtttatttttattccaccttttgtacattcagcggatatttgttcgttttcgaacggatcgaattctctttttttacgtttgagttcatccattaatgtgtcattagccaaataaaaaattctttcgatgcttccccatgcttttattgggataatttctcggtctgatttcacaagataagttttttcgtgtggctcgtaaaagcaaaattttgttccatgtgtgtcagtgcattcgtgttcttgacagaatttttgtgtaccaatcgtcagattgccctccccaaggcaacgataatcaattcgagaattggcttgtgtatgaagtaaattaagacttttgactgaatgaatgctattatcataaagcattattgaactaaatatatttttatccattagggagcatttttccgttttattgaatgaacaaacgtttggtttaaagaatgaaataattttttgaatgttttcctgatcagttatttctctttttattctgtgatatgaggcaaaactacaagaattagtccaatcaggacatttgcattgtggtccacaatagggtgggtgattttttatgacgtgttgtttgtgacaaaatattttacaataacaaaattccattgttaatttattttgtttgatagtaaatccattttcaacacaaaatgttgtatacttcgttctccatttttcattggtttttggacattcatataaatgggataagcatggtaagagttgcataaataatagaagaaacgtgagtgtgtttaaaaatactttgcttaattttggggatgataggacactttgttttctctttcgatttgtaccaatttgtttgtgttcagtggtttttattaagtttgtgatagtctcattctcttcacagtcaattttgttaatctctaacggatatagtaattttaatggacggttaatgacatgtttgcttggtagttcaatattagcacctcttatgataccgtcttttccttttatgacatttttaataattcctgttttccacattgctcttggtgtctcatcgtgaattatgacaacttcatttggttctggaaaagattttacacaattctttgggtttttattttctgttttgtatctttctctcagactcggcaaatattcttctgtccaaattttccaatagtcatccaagatttttgttgtctttttccataactctattgtttggtcataataagttggttttggtaagtaggttggatcattagtttcgtcttccaaaattggaggaatacataaatttttgtgtgggagtataaaatcgattggtctaagaatttggtacgaattaatttcgtcataaatgaatgtaattggtcgtgaatttactaaggcttcgatttcacaaataagagtttgaaatgaatcaaattctatcaatttccttccgattgcttttttcattgctgattttacattttgatttaaccgttctattgctccgttttgccaaggggctaattcaattgaaaaaatccattttatgttttccttttcgaaatagtttttaattgagtcgtctttaagtatgtcctttaattttaggacttcaggtaatacttttgatgcaagttttaattgtgatgcattgtcactccaaatattcttcggtgtcccttttcttgaaataaatctgcgaaatgcattgagaaagtgttgaactgataatgatgtcactaattcgaggtgtatcccacgtgtggagaaacatgtgaaaagtattatccaacatttttcagtgaaacttttaatttgaagtggacccatgtaatcaaggccaacgttttgaaaaggctcagttatttgaactcttgattttggcaattgcggcatttttggttgctgatatggttttgcgttatatcttttgcaatagaaacattgttttctgatttggtcaacaattcttcttcctttgggaatccaataagttttacgaatttctgctaatgttgtcattgtaccagcgtgtaaatttcttcgatgatggtccataataattaaatgagtaccaaaatgtgttcttggtaagaatattggatttgtcgcttttatctgtgcattttttaatcttcctccgcatttcaaaatttcatcattgtctctgtaaattcccaattgtctctcttcctcattatttggttccatttctttctgaattatgcgtattagcattttttgtgccatgaattttaagctcaattcgttttgaaatttctgtattttgaatttagttttgaattcgggagagtcttttaatgtaaaaaatacaaattttaataagatttgacaaattcttgtcactttatcccatgaattgtattttttccattcaataaatccttggtagtccattttgactaaatttgtctgagtgttttcgatttccattatgttatcatcataaagtgaatcattttgctcaggagtatagaaactgtgggctggccagttttcttttcctaatttaagccattttggtcccttccaccataattcgttgtatttcatttcattcattgttgtacctcttgatgccaaatcagctgggttgtctgttgattttacgtaatagaaagtgatgtgaaattctgagacaatttgttttatttcttccactctgttttttacaaatattggtaaattctttttacactttaaccagctgagtacacattttgaatcgcaccagatacatatcgtttcaaatttcaattttgattctttaatgataaatttgacggctcttgctgctattaatagtcccaatagttcaagctttgggattgttaggcctttgagtggggtaagcctcgttttcgcgaataataagtcagttttattatttgcgtgtaaatatgcggcagtggcgtaggctaattcagaagcgtcagaaaaaaggtgtaaagaagcacattttaaattttgacttgtaaatggtgagcgtggtatggaaacttcgtctatatttgaaatattgttccactctcttatttcttcatcatttaatttatcgtcccagtctttgtttgatctccatagtttttggaaaaatagtttgtatttgagtattactggtgatatccaacccattgggtcgaaattttttgcgatcattgtcaaaatttgtctttttgtcgtgtctctactcattagcggtatttttatttgaagttcgagttcatctgtgtcgacattccattttatacccaacatttttgtcattttgggtatttcagatccttctaatttttgaatctctttgttactttgttcatgattagacacgaattctctcaaattcattgatgctaatttgaatatttctttgctccagtaatgtttgaattttatttccttttcgtcgtcacacatcattacaaaattgtcgacgtatgcattttctttaagttctgtgcatagctctttgaattgtttctcttttccactaatacataattcctcatctatttgtaatgttttaaacttttcaaacatttcatctgtttttgataaatgaagattcacaacagcagttaataaaaacggagaagcattgactccgaagggtattcgtgtgaaacgtcttaattctacgtctctcatttcgatttctcgatatttttggtttatttcgtccaaatatgactgatttacccatagaaagcgtgttgtgtctctgtctatttcatttaatccaactcttagaaaagctttttctaagtcgcctattaagacgaaatttttgagtctgaatcggagaatcattccacacaaatcaggtaataattttggtccttggtgaatttcgtcattgagggaattgcttcctcttaattttgccgaagcatcaaaaactggtcgaatttttgtggtatttgaactctcttttataacggggtgatgtgggagatagtgaattaaatttttggatttgaaatcagcaatttcattaacgttagtgtccatttgctcttgcagtattttattataattttccaactgtttgtttttaatcaattgtttgactacatttcttaatcttcccaaacataatccaaaatttgtaggtaaattcggtgtttctcttttgtatggccatcggatgtagtatctattttcttcaaaaatgacatttttgtcaaagtgtatgagagctgtatcttcgtccgtcaaatgtggagagtcggtaattccaatattttctaattcccagaatttttgaaggatttcgtttgtctcatccttttttcgcttttctttcacaagattaatattttgtcttcaatagtaccttttccggataatatttttcctaattttgtatcgattgaaaaaaattcggagggaagtatttgaatttgtgagtttggcaacgtaaagtgccaatagtggtcgataccaattaaaatttgtggacaagcatggttaatcggtattttgctcttgcgtatatcaacagtctctctgttgaccattttagtaacatcagtaattttttccacagtctgtaatgttacgtattcgatttcaccgtttagtgtgttgatgccaattttgactagtctcgatgaaatgattttgggtttattttggcttgcaggcggacatagcgaatcatttttcttcgatt

SEQ ID NO: 5029 - DNA, 1468 bp, Heterodera glycines
gtttactttcaaatggagtccgttggtaaacgtttgatcgtccggtatttttcagaaaagtggcgacgtgctttcgaacgatcggttgttgtggtccggtagaggcggacgtgcaaatgttacgcgatcgtggcaccacttgtactcttttgatgtcgcacaaatgggaggggtagggaatttgacgagatgtgggggtgctgatgagttcagtggttggtagaggtccggcgctgcttggtggtgctgggctttgatttgtggacgagtagtgcgagtcggcgggatgggggcggctggcgcaatggtgaccaggagagggactggttgtggcgaaattttggggtggacgcttggcggtcaatcgggaatggtggaattgctgggggtcaagtgaggcgggaaagtgtaacaaattgcactttattgaatcctcaaacttgggtaattaaaccgaagggggaaatgggggaacggcacaaaatgggggaacggcacaaaatgggggacggcacagaaatggggacggcacagaaatggggacggcacaatggggggaaaatgggggacagcacaaatgggggacggcacagaaatggggacggcacaatggggaaaatgggggacggcacaatgaggaaatgtggggacggcacaaaaatgtggacggcacaaaatgagatacggcacaaaaatggggacggcacaaaatgggggaaaatgggggacggcacaagtcggggaaagatggggcatccggcacaacacgtcggcgacacggcacggcatcggtggtgcggggcggcggcacggaatgggcatggcacagaacggtcggcgcacgggtcggcttggcactgaacgggcggcgcacggttcggcatggcactgaacgggcggcgcacggttcggcacagcagtcggcggcacgaacgggcaggcggagcagttgtcggcacggggggaaagggaaggaagggaaaggaggacgaggcattggcctctcaggaaacagttggtgtactgattggtggggggttagtgccctccttttataccggcaacttctgcttgaaaatgtgtttgccaacctggcatgtccaattttctgtccctaacatttgccaattctactaaccttttctcattttccagtttgtgccactttagcctttcccaattctctaacattttacaatttcttaaatatcattcacaatttgtcccattttaacatttggtttaaaatctgttatttcttttaacgttccgattattcataattaaattttaacatttgacaatttttctgaaagaaaaaattgtgactaatatgactaatgttttttccttctctcattccttcatttcgttcacatttaattaattaatatttatctgtctaatttaaaattaatttaaatattttttgggtttaatgttttttattttttaaattaattttccg

SEQ ID NO: 5030 - DNA, 5327 bp, Heterodera glycines
  unsure (1)..(5327): unsure at all n locations
tgtgcagatgttcgcagtgaactcatttagaggccgttccccatagtacgcgaaccatccagcgtttggaatttgcttcgcgagaagctcggccaaattgtctcccacgacaacggtttccttcaggacataataggcatttggccaaaatgccttggcacgaattgctgtcaacgcctgtccaaagcgttttgtgagttccgtgagccagctttcccatccgagggatggctcttctccgattgctcttcgattgaccagaatttctttcaattcaactggttcataagtccgttccttccactcttcagcgaagacgctgcatgatttcatccaaatatgcaagacttcttccaagtggcgattttgcattggcttgttttgatgctgaaagtagataatattcccaatcaaattatcgattgatttttgatcgattatttgattgggttccacttttttttctgacatcctcttccacaaacccaaacctattggatggtctcttagggagagagtacattctatgttttctctggcaaatgaaatggattttaattttaatttaattttgatttatcaatcgatatttttattaaaggttctcccagtaagggtatgaatgtacccaaataatcgctatacccatgcattttgcaagtatcgtatccaaaactttaaataaattagcaaaaaacctttgcacccggctggactcgaacccatatcaaattgctgcactaaccaattggccattttatgcctttggcaaagcaagattcaattcattaaattgtaaaaaaaatgacgtcatcatggaaagtaaaaagactccgccccttttcttgttggtcacgcccattgatttttgtttgctttgctaagaagttgactccgccttttttccttttagtttcttttgtcccgccccatttttttttgctatttaatcacagtttttctacataaaaatcattcgtccatttaaaaaaaattccatccacattcgttttttctgttcttcctgcaatgaattctcttaaacgctttcaactcccggagcaagggacacgacagcaaaaggagttggattccgttgaaccgaaacacatcagcgatgtggtcaacttcaattcggccggcgttttttatgttttgggaaaagtgacaaatatgcagtaccgtgtttacaaagtccaaattaaattaattaattattaattttttctagtctaggcatgcccattccgttccaaggggctcatttgccgccgaaaattgtccgatgataacatgtgtgaggcttgcggccaaaaagcgattgctcccatccacacggtgtttgtccgccttctgctgcaggatgttgaacaagcagacattgctcaacgtgtcaccatgttttcgagtgttgccgaagagttttttggaatgaaagctgctgaattgctcgccaaggagaaggagccggagagccttgcgaaacatttggacgatttgattgctgtgaagctgatcgcaaaagttaacattaaggttttttttgctatttattatgtatttgacaaaccacgacctaggcgaacaatcagacgtacactggatttgattggattgtcaaccttttcaagaagtgcccagggaatgatgacagtgatgtgccaaaagaaaaaaatgatgttgatgagattgcaaccaagaagtccaagaaaaattgatagagagagagagagaaagagaaaaatgattcatttgttgtgagcttttaaaaaaaaggattgagcatgttctttacttttttttaaaaatccattaaaaatgcattttattgttgaagatgatgagacacaaactccaaaatggtcttgatgtgattgcaattttgttttttcttcgtgaattcaccatgagacaggattgcacgttgacaatttttcgtaatgagcacagagagatttgcagttggctctatccgagtggtggatcgtcaactctcctcataacaatccaattaacgttgttggaaaagcttggcccatacgcgtttgtcacgtaaccctaatttttcaaaagaaggaaaagcactcctaaatttagttttgatcttcattaaggctgaaaggggatcatgtgaaaaaaagaatatttgtgcgttaatcatttctttattgataaacttggaaaaataattgatgaattttttggtaattggtaatttcgcaaatcatccatcatctcattggcatcacactgagaaatatgtcctcttctcttgagaaaatttatcaaagaataccagcataaaatgaaaacgggaaaagcaatgagatagtgggcaagcaatagaagttgtatgaggaagttaggatggtagcttttgttttcaaatgttagtacttgtatctctggctttaaactggcgttgactgtagtgtttattaattcattctccaattaattcattctccaattaattcataaattatcacgtgacaaattcctttacaattttcgtaatgcactgaaaaaatttcctaattttccacagttcatcaaagttcgcagggatatgacccaaagcgaactcaaaattttgtactccctgcggcaacaagcctatcaggccaatactgccgcaggtgagtacaaatattttgtggtcgatttggagatcaaatctctgaaaaccccccgcccgctcagaactcgctagggatacgcgagcaaaccaaacaaaaaaattaggaataagggagaaaaaagtccctgggtttcctgcctattaataaatgcccgatcaatttcaaataaaatatctgatttagaacatatagcacaaaagtatgatccatcaatattcatcatcaatgagacctggttaaaccccagaaatacaattgaaaatgaactatctataaatggtagatatagagtaatgcttgcgaaccgaaatgagaaaaagggcggtggatcagcaattctaactaaaacaaatattccttatcagacactattctctgggacaaaattccaaagcgaaattttacacattaaattactttttaaaaaaccaatccaaatcataaatatatatcgtccaccgaattgtacagttcagaatactaaaaagctactcaaatttatttcggaccagagtaattctgaaaatatcatatattgtggggattttaacaccccaaatatttatgggatgaaaataaggtaattcaaagaaatgaccctgtgtcaaatttattgattgagtttattgaccaaaaacaattgaaacagcatgtcaaacaaccaacaagaaaaaaagctattttagatttagtaattactagtgaatcagaaataattaatgatttaacagtatttgaaaatttttcaacttccgatcacaaaatggtcggattcaaaataaagggaaaatttagtcgtaataatcacagagtttatagaagagattttaaaaatattaattttgcaaaattaaatctagcgatacttgaaaatcgaattgatttagcaataaactcagtatacaccgttgaacaaaaatataaagaattcttaaataaagtaatgaaattatatgatacgtttatacccaacagatctctaaaatcgataataaagcaatcatatcctcaaaaaaataaaagatttattttcagagaaattacggttacataagcttgtaaaaaagtttcccgataaaagtgagattattttaaattacaaaataatttcaagggaaatgaaaaaacaattgaaccaatttagaaatgaaaaagagtcaaaaattatttcccaagggcaaaactcagttaacaaatttattcgaaataaattatcaaaaaattatgaaattcctactttaatcgatagtgctggaaatatgtattccagtaatgagcaaaaatgcaaagtattagcagaaacatttcaaaaatcatttttagaaaattcaattgttaatggtccattaactcaatcagcacagaataaaattaaactttttgacattgaattgaatgcggaataatttggaatatattaagaaagctccccaggcgaaattccacttcaccggataatgttccttacattttattaaaaaattgtgcagagccaattaccaaaatattagctgatatatttagattgattttggtaaaaacgatggacgatatatataattcgatacaaatgaatcagcaaattgacatcatctatattgattttgtcaaggcgtttgattctgttccaattgatttattacttcaaaaaatcaaaaagattggaattgaaggaaaaattcaaaattttttaactaactttttaaaaaatcggagttttaaagttaaattggcgaagaattgtcagaaagtttcaaaatattttcaggagtgccccagggaagtgtcttagggccattactctttttaatttttataaatgatcggccgtcctttattacaaatgaagctgcatcagttggcataaaaatgtatgccgatgatgttaacttatattatgcccatgaaaatgatgaccattcgaatcagttggataaagaaattgaggctttggaaaaatggtcaaaaataaatgggttagaaatttcaactgaaaaatgttttgttttatatttagggaaaaataatatgaaaaaagaatattttattaactcacaaagaatttcagaatcggataatgttcgtgacttgggaattataattgactcgaaactgaatttttcagaacatattaaaaaaatgtacgaaatgcatatcttagaattttccaaatttcgagagtgttgaaaagcagggaaataaaaactctatatgctacagaagtttggaaccctaacttaaaaaaagacatagataaaattgaacgtgttcaaaaattttttacaagaaaagcacttagaaaatgtggttttgtgtacaaaaaatatggggaaagactaaaaatcacgggtttacacaaattggaagaaagaagaaaaatcaatgatttaacaacagcttttaaaataatcaaagggttcaccagcctcgatgctgggaaaagtttctttttctcagaaaggctcaggaggcctttacttttacgggtaaagcgccacacggccaaaactcaaaataattttttcaatagaatagtaaaaaactggaataatcttccagtggtagcggtacaaattaataaggcaaaggaattcagggatttactaaaagcaatgagttctgagtagggttttccatgttgccatatttacactatatttttatcacctgtganatttttaacat

SEQ ID NO: 5031 - DNA, 919 bp, Heterodera glycines
cagcggatgcagggacgtggcgcattccccacggcatgtgtgccgccacggtcaatgcaccgctgccgcttccatcgcttccgcttgagaaagcaaccggcaactgtaaattttaaaaaattgaatttgtgaaaaacacaaaaatgaatgaggccaaaaaacttagcacaaattaccggaccaaccggcagcccaaacactcacattgttgttgttgttgtccaaaaacggcattggcatgacagcaacggcagcagaagtcgagttgcttcccagcggcatttgttggagaactgtgccggcactcgttgagccgagctgaaattgaaaaattaaattttttgtacaaatccgcttgagcaaagcgcagaggagggggggaggttaattaaaccctcaattgtttgataagcgactccgaaaacccgaccccaaatccacaaaaaaacttgccgaattgtcgctgctgaccatctgcggcatcagcagcatgtccaagtccagcgctgaagtgccgttgcggcggctgttgttgcttttgttgccaccgaaagccgaccagtcatcaccaccgccgctgccactttgactgctcgtcgcgcctcgattggcgccactggtgttgctcgtgctgctctgccgtgcccttttccgcccaatgtcgctctccttcaaaaaaaggaggaagggaaaaattaaaaataaatgaaaaatttcaatttttaaacttgccggcacgtcgccgttagcattgcgagagcggcgtggcggcggtttgcgcacaactcgcccgttgtcattcccgtcgttctgttgctgttgctcgccgttgaacattttgtgaatttcgtgctgaaattttaaaaaattaaaaccaaattccaatagaaatgcagtgaaataatggaggcgggggggg

SEQ ID NO: 5032 - DNA, 2237 bp, Heterodera glycines
tgccgaaaaacttcagaatggcccgaccaaaacacaatacgaacatgtatgcatatgcattttaatttgtcaatggctgacgcgccatatgaagaatcgaaatgatttttggcatcatgcatgaaatggtgcaggaaatggcgtaattattaaattttttaaatattcctcatgaaatgtatttcgactaaataagtaacagcccacttgaatcactttattgtagaaagaagctcaataaaatccatttgcagatgccagggggagaaatgtaaaaaagaaaggcttttaagcgtcgtgctggaaaattggaaagtacaaaaaaactaattttaattttatcacttatttttgcctaaagaagctaacgtgccaattttatcgacaggaattttaagggatgccgaaaaacttcagaatggcccgaccaaaactctatacgaacatgtatgcatatgcattttaatttgtcaatggctgacgcgccatatgaagaatcgaaatgatttttggcatcatgcatgaaatggtgaaggaaatggcgtaattattaaattttttaaatattcctcatgaaatgtatttcgactaaataagtaacagcccacttgaatcactttattgtagaaagaagctcaataaaagccatttgcagatgccagggggagaaatgtaaaaaagaaaggcttttaagcgtcgtgctggaaaattggaaagtacaaaaaaactaattttaattttatcacttatttttgcctaaagaagctaacgtgccaattttactcgacaggaattttaagggatgccgaaaaacttcagaatggcccgaccaaaacacaatacgaacatgtatgcatatgcattttaatttgtcaagggctgacgcgccatatgaagaatcgaaatgatttttggcatcatgcatgaaatggtgcaggaaatggcgtaattattaaattttttaaatattcctcatgaaatgtatttcgactaaataagtaacagcccacttgaatcactttattgtagaaagaagctcaataaaagccatttgcagatgccagggggagaaatgtaaaaaagaaaggcttttaagcgtcgtgctggaaaattggaaagtacaaaaaaactaattttaattttatcacttatttttgcctaaagaagctaacgtgccaattttactcgacaggaattttaagggatgccgaaaaacttcagaatggcccgaccaaaacacaatacgaacatgtatgcatatgcattttaatttgtcaatggctgacgcgccatatgaagaatcgaaatgatttttggcatcatgcatgaaatggtgcaggaaatggcgtaattattaaattttttaaatattcctcatgaaatgtatttcgactaaataagtaacagcccacttgaatcactttattgtagaaagaagctcaataaaagccatttgcagatgccagggggagaaatgtaaaaaagaaaggcttttaagcgtcgtgctggaaaattggaaagtacaaaaaaactaattttaattttatcacttatttttgcctaaagaagctaacgtgccaattttactcgacaggaattttaagggatgccgaaaaacttcagaatggcccgaccaaaacacaatacgaacatgtatgcatatgcattttaatttgtcaatggctgacgcgccatatgaagaatcgaaatgatttttggcatcatgcatgaaatggtgcaggaaatggcgtaattattaaattttttaaatattcctcatgaaatgtatttcgactaaataagtaacagcccacttgaatcactttattgtagaaagaagctcaataaaagccatttgcagatgccagggggagaaatgtaaaaaagaaaggcttttaagcgtcgtgctggaaaattggaaagtacaaaaaaactaattttaattttatcacttatttttgcctaaagaagctaacgtgccaattttactcgacaggaattttaagggatgccgaaaaaattcagaatggcccgaccaaaacactatacgaacatgtatgcatatgcattttaatttgtcaagggctgacgcgccatatgaagaatcgaaatgatttttggcatcatgcatgaaatggtgcaggaaatggcgcaaaagtaaaaattttttaaatattcctcatgaaatgtattttagtaggaataagtaacagcccacttgaatcactttattgtag

SEQ ID NO: 5033 - DNA, 1207 bp, Heterodera glycines
aatattcatcatgaaatggtatttcgactaaataagtaaccgctcacttgaatcactttattgtagaaagaagctcaataaaagccatttgcagatgccagggggagaaatgtaaaaaagaaaggcttttaagcgtcgtgctggaaaattggaaagtacaaaaaaactaattttaattttatcacttatttttgcctaaagaagctaacgtgccaattttactcgacaggaattttaagggatgccgaaaaacttcagaatggcccgatcaaaacactatacgaacatgtatgcatatgcattttaatttgtcaatggctgacgcgccatatgaagaatcgaaatgatttttggcatcatgcatgaaatggtgcaggaaatggcgcaattattaaattttttaaatattcctcatgaaatgtatttcgactaaataagtaacagcccacttgaatcactttattgtagaaagaagctcaataaaagccatttgcagatgccagggggagaaatgtaaaaaagaaaggcttttaagcgtcgtgctggaaaattggaaagtacaaaaaaactaattttaattttatcacttatttttgcctaaagaagctaacgtgccaattttactcgacaggaattttaagggatgccgaaaaacttcagaatggcccgatcaaaacactatacgaacatgtatgcatatgcattttaatttgtcaatggctgacgcgccatatgaagaatcgaaatgatttttggcatcatgcatgaaatggtgcaggaaatggcgcaattattaaattttttaaatattcctcatgaaatgtatttcgactaaataagtaacagcccacttgaatcactttattgtagaaagaagctcaataaaagccatttgcagatgccagggggagaaatgtaaaaaagaaaggcttttaagcgtcgtgctggaaaattggaaagtacaaaaaaactaattttaattttatcacttatttttgcctaaagaagctaacgtgccaattttactcgacaggaattttaagggatgccgaaaaacttcagaatggcccgaccaaaacactatacgaacatgtatgcatatgcattttaatttgtcaagggctgacgcgccatatgaagaatcgaaatgatttttggcatcatgcatgatacggtgcaggaaatggcggattataaaaatttttta

SEQ ID NO: 5034 - DNA, 3430 bp, Heterodera glycines
ttacctatcattttgtcactgatcgtttcgtcactgttcagttcgtcactgatcatttcgtcactgagaaataatttttaaaaaatgttggcaaatgtcattatgtaaattattttcattaaataaaatattttttatttcagaaaaggttattaaataattatgttgaaactaaaatctgcatttaatgatttttttacatatattttttaaaattgtttgttacatgcgatggaaaatatgcacaaaaagagttcgaattgaccgatacattttgatttgggataatggatcgttatcttaaatctacacatttgttgtttacttttaccaaccttccaacgaattggacgggttcttggttgagtttgtcgtcgattaactttctgatgagcgcaattgtccctgttcagttgaaattgaacccacgatccattttaagactttttttgggactaaccataggataccatccatacaatttttcgaattttatgcatcctgtagatcagcgacctcaaaaaccccataaaacttagtttcattaatttcaaaaacgtgcctttgaatcgttgagcagctcggctgccataatgcacgtcaaatcggcccacgggcgaggccgtaatgacgcggaggcggaaattgttgatcagcgtgacgtgtgcttgaaggagctcaatgaacgctatcggaccttttttagctgattttggttttgaaaatttgtttgaaatcatttacatttgggagtaatttaaataaaaatttaaatggagcattttcattcatgtaataatagttaaatttttgtttaattaattaattaattgtaatcggaaaggttttaattatcaataaattttaaaagttaaaaaagcactaaacactaattaattacattgtttaataaattgattaattagttgatttttttcatatttggccatacaaaagagcacatgcaaagaaaatctttattttacaatgataaaacgattacggaataattagattcaaatttgaatttattaaataatgtatacaattggattagtaaataattagagataagcgcatacaatttgaattaataagtaattagagataattgcttacaatttgtatgtctgtctaaatgattaaatagcaatttaaattactaagtaattagagaattaacagtaccagcacacgttttgtaatctgcacagtcatattgcacgaaagggttcactggctgttctgtgtttggtagagatgcgccgtgactgaaaaaacccgtgaaccgtgaatcgtgaccgtgaccgtgaattgaccccgtgaaccgtgaccgtgatcgtgaattggtaccgtgaaccgtgaccgtgatcgtgaattggtaccgtgaatcgtgaccgtgatccaaaaaacccgtaaaattcacggttttcgtgaccgtgaccgtgaattttttgagttaaattttttcctgtcggcgaattttttgtttttacactgtttttttttgtggtaaaattttccaaaaatttggaaatagggtgtccagcaggggcgtcgaatttttaaaaatttgagtgcaatatgtgcacagattttgtataaaaatggcaaattttgcgaatttgccaaattttaatgaaaaggataaatttttggagtcaggcggtgcctgtaaccgccgccggaggaaaaatctaaaatttgattgcaatttgttaacagatttgtccacaaaaatgaccaaattttgtgattttgagcaaatttttaagaacataaaagatttttatggtcaggcggtgccgacaggcgccgctgggggaaaaattgagaattttgaccatatttttagcatattttcattaaaaaattctttattttgcgggttttctcaaaaaccacaaaaagcctcaaaatttctcaaaaaaccacaaaaagcctcaaagcctcatttggaaaatctagcctcattgacctatgaaaaaaccaccaaatgaggctaaagcctcagatctgcctgccctggttatagtggaaaatttttgtaaatttgttgggatttgggatttgttaactgattttgcccaaaatagatttatttcgagcgagttttttaaagaaatgttgattttgttcaaaaagtttcaggaatagagattgggccggcggtgccgataggcgccgccggggaaatttttgaaaattttgctctgtttcttagcaaaaatttcccaaaaaaggaccaaatttctttatgaaacaatatgtaattcgtaaatttcaattttatccagtgtaaatttttcacggaataaacgtgaattggtaccgtgaatcgtgaccgtgaccgtgagtgaaaaaacccgtgaaattcacggtaaccgtgaccgtgattcacggcgcatctctagtgtttggcataaaaaaattattgtttcttatcatcaattcctctgcatcccacattatgagcaatcttatcagcttcacccattacaaatgtcggatccccacgttacaaatcctcccaaatttcatttggcccccaaatgccgagttcctaaatctcgttttgcccccaaatgccgagtttccaaatctcgttttgcccccaaatgccgagtttccaaatctcgttttgcccccaaatgccgagatgttggagtccctatgtcggatcggagtctccaagtttcgggatgtccaattgttgggtcccaagtcataaatccctaaatgtcgttttgcccccaaatgcctacaaaaactttatcccaccaaaactaattgatgtattatctgactaattaatgtacccaattgaaagggggatttgatcaattgtagatatcaatcaaatcacaccttgtattcggcccttgaaatatttttcataaaaattcgcatttgacttttcttcgccttcttttccaaaacggcactcacagtacacagcgggcaattgtgttgcatttttcagtttaacttctatatcattacaaatgttgaccttgtcaattgcgtgcatacagtccaattggattacattttgtctacctaaaatgtctcggaaaatgatcaaaatacgtacaatttcttggggttttcttaggctcccggacaatccgtcagtggacaataatccgtcagtaagtagacaatccgtcaatggacaatccctcataatgatttgtgttattttataaaaattatgatccaccatccgcgaccgagggtttttctgtccgcgccccacccctggtgccaacttgacaataacttgaaaaagcatttattttccataatatttatggggaaaatatttgataaaaatttcaaccccatttgatcataaggcttataaaaaattatacgttaaaaactattttttattcgacaaaatgataatcagggcacggatttaaaa

SEQ ID NO: 5035 - DNA, 1488 bp, Heterodera glycines
  unsure (1)..(1488): unsure at all n locations
gtaccatncggtgagctgcatcctatgcataancacatggtcatgtctggagcaccgcaataatttccaagattcacactagggtgacggatgttgtcagggtccaacgtctgtttgaacttcatcgaatttgtttccaaaaactctccgcaactgaaagcgccactaaaattttacaaaaaattgaaaatgttttttttttcatacggtaaaagtatgtacagaattttttattaattttattttaatttttgatttttcacttagtcttacgttgaaagcacagagttggcgaggaaaagaaggacggtgaagaaattcattgttttaaatttaatgaaaattttttttaatagtgaatatcgcctggccaaaaagttgagaagttatttttgtggtataggcaaaagccaaatgaatgcacgaatagaagcagcactttgctgatcagaggtgattcagagaaattttatccattttcattaatatttattctcccattaacaatctgtccatcaattgccctataaattaattcactttttaatgctaaaagtgatgattaattgttcatttatttatccaaagtatttttcctggcaaaaatataattcggaaataggaaaaaaaaatcattaacaattcaagcagcaatttgggtgttaaaaagagaatgaaaatgatggttatgctaaaaaaagaataaataaatgttttattgataaaaaattattttgtttcaaaaataatttttcgtatatttttttactgaaagatcggcttgaatccgattcatttaaaaataaataaataaataaaatcgtctcttttaattgttaaacttaaaaaaaaaattctttttttttcaaatacaagatcctgtttttgtcattcaatttccgtgtgcaaaaagattattcctctatgttgtgaatctgtgtatggcggaaataactcgcgagcagaaagtataatccggtccatacggtataaggaacggtacagtaacaagccacttcatcaatattgtagaaagctaaggctgtagctacagctgtgcagctgatgtaggtgtagaccaaaatctaaaagttttttcgtactgatgaaaaaaaataaattaccgtattttttctaattatatgcccgggtatattatttttaaacctcctcagaaagggggagatgattgcagacgagtagattaagacggagtgattatcttttcaacctccgtagaaagggggagataattggagacgaggagattaatggagacgggcatataattagagaaaatacggtacctaactatgctgtaaaggaattcgacctcaaacgttccaatctttttcgagttgaacgtggtcgcgagacaggtgaacatgttcagtccgaaatagccaagagcccaggcagtgtctgtatttgcgaagcctaaagcagcacgggagaatggtgttatgatgtcaattcttggtttaagaa

SEQ ID NO: 5036 - DNA, 4184 bp, Heterodera glycines
gacatttgcggcgccgacatttgcggcgccgacagattcggcgcccagtcaaaaggacatttgcggcgccgacacttgcggcgccgacagatgcggcgcccagtcaaaaggacattttcggcgccgacacttgcggcgccgacagatgcggcgcccagtcaaaaggacatttgcggcgccgacacttgcggcgcccaatcaaaaatgacatttgcggcgcagaattaaatgaccccaaaaatatttcaacaatttatttaagttaacagaattgttattttaattttattttttaataatgactaatttaacaattgcatcctacccacaaagataaaggttgagtcgtttgccgttgtaacatattcagaaaacgattcacttcgccccacccagcattttcagagtataaattggatactgtaataaaaatatttttataaggttcattatcgccttaaaaagaggaagagcaccaacaaaactgcctgaggccttatgggattgactcaactcgtgggattactgaagggcctcgcttaaaaaatatctgcgaaatgatgaagcgatccgtagattagttatcgattttgacaataagtaaaacaaaaagattatgatataattaatagagcccggtaaaaaaattgtcgggagcgggttcgggagttcaaaattttccgggacgggagtcccgaacggtaatcccgtaaaatcccgctggagtcccggtcccgccgggctctaataattaatcaaattgcagtaccgcctagggatgaaaagctttgaagaataggactaaaagagtgattaaacaaatgtttttaaatcaaaaaaattgttcaaataatttttggggtcatttaattctgcgccgcaaatgtcattgtgactgggcgccgcaagtgtcggcgccgcaaaagtccttttgactgggcgccgcatctgtcggctccgcaagtgtcgtcgccgcaagtgtcggcgccgcaagtgtcacgccgcaaatgtcggggccgcaagtgtcgctttgactgggcgccgcaaatgtctgcgccgcatgtgtcagcgccgcaaatgtcggccaatcgtttctacggcgcaaaagtcggcacatcttatgatgttagacaaaaactatcaaaaagggcgttaattgctttaacctcctccgtttttatagacaagatgggcggcataaccgaatggaacagcaagaattagatcaatggctgtgaagatgcgcgggtccatccacttaagagatgcacttccccaataattagggatttttgtacatatttaataaaaatttgtatatttttttatactaaatatctatttcgtggtttttcttatctaaaatttagatctctattgatcacagttaagacattttgtttttgttttggaatgcattggcattttgttaattaagtcaatgattttttggcgattttttttactgtccatgaaagggcgggcctccgcgacaaaaagtccgtaccaaaacgggcgtttcgtatacagtaatctcaccttactgctaaaggcctcaagatcgcgtcgatggctggatgacatgacaaaagccggtaagactggcaaaagtgaggaaacaattgcgttggttgtattccagaagaaagacattttagtagacacactttttgggaagttttaattttatttaataaactaaaaataatataactatatgaaaattccgacttttcgaattttttgttcaaaatcgagtcagggatttggaattttagaaatggatgagagatattctttatctgtgaccccgaaacttcccacaacacagtatctatttgagtttgtttgcaaccctttttttgttgtggttttaattggctaatgaggctaaattttcaaatttaaattttttgataaaatcttaaaattgcactacaataatcaaaattttctaggcgggcctattggcatgcattttatttctttaaataattaatgtttaatatttttaagatcttttttaattattgggcctcaaaaatcgaaatttacgcctaagggcacttttacagttttgttcactttttattaattccaaactttacatttattattattttttgcttatttttactaaagaaaactatcataaaatttttaagtctaaaaaatgattttttaagttgttttgttatataatacattaattaaaatatatatttttttatgtttgatttgaacccgagcttcaaaaacacgaatttaaccaactgagccaccaattttaagtggaaacacagccaaaattttgatttttgaggccccataacttttttatttcttgctatggacccgtaatattaaaaattcacaatagaagtcgacattgctctatccaatggtatataacacatatgcattttccgacttacagttcgggtggttccccttgttagtcaaaaaccatcaaaaagggcgttaatcaaaaaacatcaaatgaaattttttttttttttgctataactttgctcaaaagcaattaaattttaaattctttatatccttcggtagcgctaaatattttatgttagcctgtaaaagttatgaaaaattttttgtcatatattttccatttgataattttttgactaacgcaaattttattgctttttaagtgctcaattagccggaaaaattaaaaaaattccaacaaatttatataacaaatttggccgaacatttaatatatttttttaaatgtgtttttggccacagcttttaaatattaatgaactttttttttaaatttgttatagtacgcgaccaagatcacaaccagataaataatatagatatcgcaatattataaaataattgaatgacgagagcaaataattagggtaggaatagcaaatggggcggctactaatggacgctgtgtgtgacagctgtcccaattttatatccctctcggcaacacaaaactgaccaatgcgaagcgcaaatagatgcaccgccaggcacgacgtttgggaataaaaggctttgaaagtgcaaacattttaggaccatcatttgattgtccttggtaatttcgaaggtgctaggtcatttcacaaaaaagtgccaatttgggcattttaaaaaatgtgcaaattggggcaattcacaaaaaagtgcgaatttgggcactccacaaaaaagtgccactttggtcatttcacaaaaaagtgcgaatttgggcactccacaaaaaagtgccaatttgggcattttaaaaaaagtgcaaattggggcaattcacaaaaaagtgcgaatttgggcactccacaaaaaagtgcaaatttgggcatttcacaaaaaagttcaaaatcaaaaatatgatttttcctaggatttttttaatcaatttttaacttataaatatgttatttttaaaattttgaagttcaattataaatggaataaggcactctgactcttatattatcaaaaagggagatgaataaatattttaaaaatttttaattcctttttaaacaggccaaaaagtttaggcttaactttttactgaaatttcaatcactcatagttttacgagtagtgatcagaaaaatcccagatttagcagggtaacagctgagaacaatacctaatttatacttttttccccgtttactaggccttgttaaaaaatttttagattttctgattttctgtactttttcaattttttgcaaaattaattctttacaaaaccttttggtcagaaaaaaaaactaattttacccccgaacgcctcgaaagttggcttctttttaataatagaatttgtaagcatttgccctctcattttacaatttcattaccactttcgaaaacgaaaaaattcttaccacaaaaatctttgttcaatttaaattagcaaatttaaagtgaatttttaattctttttagataatgaataagttattctttcaactagtaaatctttacaaggataattgtctccaactgatgcagaaaagctgaaaaaccaacaattggacacttgggaacaactgcaaaatgccattttgaaagaaaaggaagcgaggtaaaaatggggaaatgaattacatattataaaaaataaaaaaattaatttaaagagagcaaaaaatgaatgaattaatgagcaa

SEQ ID NO: 5037 - DNA, 3084 bp, Heterodera glycines
cgaattgttgtttcaacacacgatcagctgcagttttggcttctatttccgactctgtgattccattgggcaacgatgtcgtcgagaatgagtgttgaaaattcccaagaatctccttgagaattgatcaacccaatttcgcccatctttcatttccccaatacgttcccttcccactcccggcaaattcgcctttattcacctcggcccattctgcggattgttcggctgctgctccgcccgtgtccccttttccctcgccgtcctctctctccctctctccatccgtctctgtctctctctctgtctccgtcccaggcgtgatgttttccgtcccttcctccccgtcgccctctcgctcgccctgctctttcacctcctcttcctcttcctgtgcctctccccctccctcttcatcctccacctcttccatctctatcgtcgttgtctttgtcatcgttgtggttggcattgggtttgtgctcgtcatgtccaattcctcctggtcctctgccattggcgttgtgtggtgctgcagctggcgcagttccatcggttttgccataattagtcgccccgctgggcaaatgggcgaagactttctccgccgtgggcaattgtacaaatggttaatgtactcaatgtcacctgaaccaatgtgttggcattgtgtagaaacagtgacattcaaacatattaaaaatcaactcacaatcgctgaatacgcgccgtggccggtggggacggcgcatcggctcaaggcaggaagtaccggcattgaccagaattcgccctttcggcgggaacggttcgaacatattccagcatctgaagcagcacaaattggcttttataataaatcgaaacgataaataataatgagttgatcaagaccaattaatgatttcaaatttaaaatgcctaaagctcactcaatgtgcgggccgaggtcgctgaagaacacataatccgcctcggcacgacgcggcactaagcggacgcaggtgcgtacctgcaggtccatgcgggcgttgttcagtgcaaccgcttggtccgggtcgaccagcagccgcgggtcgtcctcaaagggaatgcgcgccctgggccaacctgagaaagtgcgaaagcatcgaaaaatgaaaagggaaacggacggaaaaagaagcaaaagcaattgacggaatgaaaagcatcgaagtaaaaaaaggaaacaaatttcgattttaaatgtttctgacatatttttactgaattttactgaatgttgttcgtgccaagtgccgctgattggccagcaataaaagaagcgccgatcggtaggccaagtcgatgatcagccgagtgcgccgtttcaaattgctgtcgccgttatttttggcacccattaatttaataaggcaacttctgttggtcgatgggtttggacaaaaggaaaagcgaataaattgcaaagcgatcgaatgaaaaagctcaattcgaacggaggacgacaaattgatcgaagtttgatgagcgactgaggaggaaaaagtgagcatttgcgaagggtcggccatcatccgccccatgaccaacccaacccaatggagtagtgaccggattttggggacattcactcattaaacggggactgaccgaccgaagtggggggggggggactctgcctgaaaactgagcacacgaaaagcgaccgatcatcggactgatcggagtagaagcacaggcggaaagtgagaaagagaaaaacagcggctgatcgtagggtcaaaaaatcggagcggacggacggaaggaagaagcaaatccgaattttgaattttgaagtgcgcatttccagcgggagaaatctgcagaatttctaattgtttttttttaattttttcccaatttaaaatctaaccaacacttttccccaagttcccctcgcccattaagtgctgctattgatccaaattgcgcttgtctcccccattttgtgaaggtcgccctcttctctcgccatttttctcctttctttccaagcatttccttcgtattttttcaattattttttgaatttattttaaatggaagaaaatgaaaggccggcatttgcggcagagagtgcccaatcggtgcttttcctccattccggcgattggtcggtcgtcgaccttcgcttggccattccttccgctgtccttttagggtttccgcccgcgagttggccatgcgtcgcttcttctgctccgctttccgtctcgcgctcgccgtctttgtgagtgttcagcttcggcattttctgttcagccccgtttggatgcatggctatctttggtccctcaaccaattctccgtgtctgaacaggcaaaggcaaagtctgtgccctcaacggaattaaacttttgaggggtccatgggagcggacaaatcggcgctgtcccttttggagcaacagatggcccaagtcagtttttgggagcacgcgacgcacggcattttctgcactttggccgtgaggcttttgcttcagtatgaataattgcgatgcatttattcctttttctgagaaaagctcctttttgaagttgtgccggattttctcaccagcaaaagtccgtctgggctttgcttcggttggcctttttttcggggatggccagcggattggcaagggctgttcaggtcccttctcatcccttctcacttttgggttactaaatgcccgttttgagatgcggcaacgccttttgccatgtgttcacgaatgtttctgcggagtggcggcggtgtttctgttgggactttgcataacgctgagaaacccatgggaaggccaacgggagaaaaacggcacgaaaaagacgcaatgaaagaagagaagagattggagagtcacatcaaagggagagaaaaagaggggaagtgagggaaagggagaaagagaagggaaggggggaaaagagaggaagggagaaaaggaggcctcatctctctctctctctcccctctctttgtttctctctctctctctctctcttcccccctctctctttctctcctcatcctatcatgatgtttttccgtttcctgagaacccttcc

SEQ ID NO: 5038 - DNA, 4409 bp, Heterodera glycines
gagaaaaggagggaagagagggaaagggagaaagagaagggaaggggggaaaagagaggaagagagaggaagggagaaaaagaatgaagtgagggaaagggagaaagagaagggaaggggggaaaagagaggaagggagaaaaggagggaagagagggaaagggagaaagagaagggaaggggggaaaagagaggaagagagaggaagggagaaaaagaatgaagtgagggaaagggagaaagagaagggaaggggggaaaagagaggaagggagaaaaggagggaagagagggaaagggagaaagagaagggaaggggggaaaagagggtaaaggtaatgtagaaaaaagagaggagcatgttaaaaaagggatgttcaagtttaaaagctttttttaagcaaacattttttataattctctaatatttctgtaaataaataaacagttaaattttctcttttccgcttttcctctcatccaccgtattcgtttgccggttgcatgttgtaagatgggtactgtatttggctggactcggccagccgcggctgtgaagggtccgggccggccacaatgatggaatcgatgttctgtgggaaatgaactgttgccagggcaaatgctgacctctgctgacctggcacacgcaaaccccgggctgtccgggagggccttggagcccagtagggcctaaattgtttcggtcccttgcattgtctcttaattttaccttcggggccggggtatccggactcgccaggctctccagggttgccggggtaaccccgatctgacaaacaaaaaggtctcggcggaatgataaacagctttacctccttgcggccctgtctgtccgtttcggccagggagtcccggcactccgctggctccgattggccctggggggcctgggtcgcccggggggccttcgcggacttcgcctgttccgataatacattaaagctgcccatttgactttgaattgtttagaatcgccccattccctctccaattaatttccccacctttcggagtttcgcctttgtctccgggtgccccgggggctcctcggaatcccggcgggccttggggtcctgattcacctgaagaagagcaaaataaattttttcattagttgaaatgcccacccggtgctccgtcgtctccgtctcggcccttttcgcccggcgcaccgactgggccaacgtcacccggaaaaccgggccaccctttgatgccgggcggtcccttgggacacggccggcacgggggcgggtcccgcttcacttgcatgggacacgtttggtttggagataggccaggggatcccggcttcccggctgttcccggtcttccaggcattcctaaagggaacagaagcgtgagtattttcctaatttcaattctaagtctttttgaactctcgtttaacgatagttttcaatttccgcttgcccggctgtccggcgggtccccgtggccccggggggccagggatgcagcagcccgggcattccgtctcgattggctgtccgcttccgagtgatgccattcccccgctgctctcctcgtactccgcttgccgttccgtgcggttagcgcgtgtcgcgtgccgcgggcggtacgtgcgcgactgaagcgacagttgcgcatccacaatggactgctcacaaaagtgcatttgctcctgaacataagcgagagtggtgtgcacttggctgtacattaatggcacactcagtgccacgaccagcagagagagacaactgaaaagggagagagagcgaggggaggaaacaaaaagcataacttacagcataattaggcatcaaatttggagttttattttttgtcacttaattaaatcccatattacctgaaggcaatttgtagtccggtgacgcattgaaacacccaatggcgcaccgattgggcatcatcggaggaggagcagagggaatcggacctggccaaaccaacaaacgttgtgccctcttcttctgtcactttgcctttgcttttacctttctccgtgcctctttttgcttgctgatgatagcattcctttctctctgaaagtgccgttgctaaatgatctctttgagtgaattcgctgctctttcaccgcttcgtttttcctccgtccgtttcgcttttcgtctgtcgtcagtttcgcttctttcttccgtctcagcctttgttcggtttgtcggtcggcagatcggcgatttgggaaatgatgaaaagtgcgcgacccaaccgatcaacggatgatcagaaactaagggtggatgagcaactgttcaaaggcagagggcgccgacgaagggcgacggacggcgacagtccatcccttcccccgggggacagacggaggacggggggggggcgaagcgcacgaccaatcagccgaagaaaacgaaacgaaacggacggaaggaacagagagagacacggacaaatcaaagaaaggggagacacttttgacaattaaggaacaaacaaaggatgggagaatggacgaccacatttgattgaatgtgttaaaaagtaacccccaaaaaaagcaattgggcgggggggggggagggaatgggcgttggttcggtcggtcggaaaaaacattggcccgggaaacaaaaacacccaaactttgccggcccccaacttttcgcttaaagctttcctaactcatgtattcatctcatccatttatgttggattcagacaaactttgatgtgccaaaaagtcacatcaattaattatatcatttgtaaatttgacaaaaatatttaccaattatttagcaaaaattacaaaattgatctacttcttttaaccaaatgtttcgagtactgtaggtaaatacagtaaatgaaaagtgtttgaaattaatatgtgcattaatttggagtgaattaattgcctatttctttattaaaatttgaattgcataattaaagggtgagcaatggaaaggcacaaaagtgaacgaataatcaaatcaaatgatagcaaacaaaaaaagatcgatttggcacaagatttggaaaaagaggcaacaaagggacggcagcgtttgttggcattgccggggaatgccttcgggcagtcaatcgcttcttttggctctaatcattcgccaatttccgttccgtcctctgatcagtgaccaatcaatcagatgcgcttcttcatcttcctcttcttcttcttccgcttgtacagctcatccgtcactgtatttgcgctctccaaggccgggggtgtcaatgcgcccattttccccacgccgtaagcgtcgcccgtcggctccgccggcggaagcgacggcgacaacggccttttctcggtcaacaccacttcagtgtcttggcatacgcatgtgccgggagtgccttcgaaaggtgttttcttttgtttgtctccttactctcttaccgatagggcccgcctctcccattggccccggcagtcccggtgttcccatcggaccgggcggccccggcggcccgggccatcccttttcgcccgatcctccggggtatccgtcttcgccaggaggtccaggatggccgggcggaccccttaaagtatctcttttattgaaaagaaaataatgttttcaccatggtcccgtctcgcccgggtctcccggtgggccaggaattatgtgcgcctcaggggtgggccctttgtcgccgtatggccctggttgtcctggcgctccgtccggcccaggcggcccgtcttcgcccggcttgccaggcagtccatcttggccaggtcggcccggtatgccacgatcgccaggctgagtaaaaactcgaacacttacttggaacacttcttacctctccagggaatccggggtgaccttaaattgaaatatcggaagtcccaaaatgccaaatagcacctggaggccctcgaggaccctgagggcatggcaaacacggcgggggctcaaacacgcgctcgggaatgcacgacgcattcggcgtcgtgccgggacgaccttgcgcaccgtcagggcccggggcaccaggtaaaccgggcaagccggggtcgccggtggggcctctttcgcccggaatgcaacacgctttaaggatatttgggtgtgccaacagtcagttacaagagtatcgcttacccggacactcctgaaagagtggcccattcgttggcaaaatgctggggctatatcccgcgtagtccgcttcacgtcgcgtgcggtttttgagcacaaacgccgcatttggcgctgcactttcgatgtcattgacagaccgctgaaagggaaggattaattggcaaagggattaatggataagcaattaagagaagtgacttcacagaaggcgaagtcgttgtgtgcaaagcgtgccatgctgtgcacttg

SEQ ID NO: 5039 - DNA, 8065 bp, Heterodera glycines
  unsure (1)..(8065): unsure at all n locations
tccactgcgaccttcagacattaggcaaatccaacagagaaacgttgaacccttntggcgaccaaccgacgaacagtcgcacagccaagccccgaagcaccgccagtcacaatcgcaacaagtcgctgagcatttgcaagtccaacggaaaccattttggaaagtcaaaaataaactgaaaaaagaacacaaacttaacggacaaaaaagttctgtaaatgttctgtaaatatttgggtttatgaattaaacattgccaataatttcagaccatgtcaaattttaccacatttattatcaaacaatcaaaatggaatttatttgatcacataaagtacgacacagttatttgtttagcatttttccttgcataaaatgattccttttttggtcaacaatcgctgcgattgcagtgcttctggacgatgaaaaacggtgaggtcaatcagtggggcatcgttctgaagagaagaaaaaatgacaatggtaaaggtgcgaactttttacacatttatttataaatcactgataaaaataataacactgaaattttcgcatggaaaataaatcccattattagtaaaatttataatttgccaaatggacgcgacttcgtctcggagtgtgtccagcagttccttcaatccgctgtcccctcctcccactaattttgcgcatcgactcgcgtcatccctcgcccttcctttcagtcccattctgttcaatgccaaggctcgcctgaacaatgctttgctgttgttcgcttctcgcttcaacgctccacaggcgtccatgtacgctttttcaggtcttaataattaatctaaaagttaaactagcgtttatattccatttaaaaaagatacggtacacataggtttgtttagactatgtgggagaatttctatagcgaaagcgtttttaagtttaatcatttttggttacaaatggcagaaaataatgttattgtttaatttttgttattttaaggacatttaaagtcaggcatgtgaagagtacccccaaaaaagtttaatcaacaattgtcaatccttcccccccccccctaaaacctcccacctgtgcaaattgaggtaagcttgagcccgatttgaccatagaacagaactgctggggtcaatctcaatggcacgcgtataaagtaaaacggctttattgaaaagttttcgtcgaaaacattcgtttgcctcctctttaagacggcaagcgtcaatttgtcgctgattatcagtggacattaatctttatgcagggaaattaatggaggctattgtttcgctttatgtaatattggatagtcaaatccatttacatgacaaaaaaaaccaactcgaaaatatttattgaattaaaccattgtcagaaatcaaaaataatgtgaaagatcagacccgaataaaaaaaaaaagaatgagcaaaaaaacaacaacaaagaaatagtgaaacggaaacacgtcacttaaatcttctgataaattggccaaccagagattcatcgaggaaaaaggagcgaagcaaaaacacctgaaaacggaaagctataaaaacagagaaacggaaagctctaaaaacaatgaaatgttgggggtatacctgaacagcggcagcaaaaagcagacaaaacaaatggacaacactccaaagattaacacgttcaaatgccgtcttaaattaaatccaaatttaaatataaggcaagaaaagacacctccatgatcgacctatccctagtctcaatcgcccggaattgtgcctgaattcgttcgatttcgttgagattgttcttcacctttgtggtaactctcttaaaatcataacattacatgaatacctacatttattataaattgttcacattgaacacttccaaatgttcctccaacaaaccgtccttgcgttgtatggctttgcgatcaaaatcgttcaagtaatttccatcattatcaagcagaaaaatctcgaagaatatctaaataaacaggcatttttgggaaagccaccatttttaaagctcgttcaaaatgccaacccgtttgctgcttgtatagctaaatgtattgtcaaagcacagtgcgtagtctcctcgtccgtgttgaggttcatccaaagtgatccgatacgttccgtcagatttgcgctgatcatttgcgaccataaaccctttaggagacttcattgaaaaagtgatatcgaggtcaccaccttcgactaccttaaacgcttgtttctagccatttattttcttttgtgcattcacttggtaaacaatttcaaatgactggtattttggagagacaatagtttggaaaacacagtccactcttcttgcttccactacaactgtcatagcaatttcttcctgttgtcgctcagaagcaggactaaactgacttgtagacggaaaaacaaaatcattctgtttgccaattgttaacccaaagggaacagtaaaataggccaaaaaacactgtaggataaaaagacggcgaaattttgataaatacatagcacataaatttatttagcttaaaaagttttttttaaattacataacttgaaatataaaaattatcaaattaaacaatctaattttttaaaagaaaagataagcacaaagagttaaccagcagaggaacaagaactcatggtaaataaaaataaaggaatcaaaaaattatatagctatctaactataaataggaaaatttaaatggaatacaaattaattaatttttgacagtaatccggtggcctttccgccgctaacgtctctaccgtttgccataataatcgtagttcccttcaaggaatttcctacttcaactttcccaatgtatcattaccaatatcgcatcatagtaattggtgattcgactgtcggaaaaagcagcttacttcgttatttcactgaaggcaaaaatgctgaaataagtgatccgacagtacggattcaaagatttttttttgcattgaattacttttttaggttggagttgatttttacgctcgaatgattgagatcaaaccaaattatcgcatcaaattgcaactatggtgatatctttttcttttctttatttttggtattttacagggacacagccgggcaggaaaagtttcgttcgataacaaggtaatataaagttaaacgaaaacggtactaaaactggaaacaccaataaggtcgtattatcgaaattccgtcggagttattgtcgtctacgatatcacgaacagacgcacttttgagcatgttgttgattggatgactgaagcagaggcaaatttaggagggcctgaccctgcgcaattggcaagtgtaacatccttagtggccagtgaaatctgctattattcttaggtttttttactggtcggacacaaagcagacttagaggagcagcgcgaggttctctacgaggagggcgaatactttgcaaagcacagacgaattaaattcattgaaacatcggctctgacgggagaaaatgttaatgtaatagacaaatcaaaaacaacaaacaaaacgccagtatttaggaggcatttttgattgtatcgcgggagatcaacgccagattcgaaactggtgcactgcgcatatgcgacggttgggatggaatcaaaagtggactgttgcggacgcaatccatcactctatcagacattcaagagacaacgaaagaaaattctcagtgttattgctgataaaaaagttgccttcatttttacacttaaaccgctggcaatgtacaaacagcataaaacttattccttttttagtttgatatgtaccaggtgtgaggaaaaataaatcatatttaaagcaatttttgaaattaggctattacgaatttaataattgttataaaccaattaaacttgaataaattatgtattggcatatgggtcagaaattttgagtctgcggggcctattaccacaaaagcatggattttcaagtaaggatagatcacaagcatatcattggatgggcgtatgatgaaaataagtcagccttggcacaagcgtcgagagttcatcgcagcgtcattttaagaggtcctgcacgtcccacatcatgatagtgcgatcgtatcccaccgtaaccatcctcccgggtttgtctcccctgtcattcagcaccatctccaagacgccaattcgcagttcatttgttacggcaagaggggtcaagctttttgtaagaggttgaatttttaaagcgaataatatgttgagaaactcactcgaattgttctgggtaattttgcattttctcgtggcatgttttgcatatgcgtgccggtttttcaaagcccatagcggggaaaattgacgactgtccgcaacaatcttaagaatttattcataataaaaacacaaagaagaaacactcactcgaacagacagactttccacaagtgcgacagtggtgacgccgaacaccgacgatctggtcaaatgcaaataagcttttctatattgatcgtctcaccttccggtcccacattacacgcaaattccagaaaaatggcgtatcacaaatttcgcatttgtcagagtccacccatgccggggcggcaatacgtcgggcgctcatgtcccaacaaaccaatttgcccgactcatcggcggagaataagcgacgcgagtcggcacccaacgcaagacgagtcaacttggcattgtgaccacttaaccataaaaatggagagcgaagacaaaagacacaacttgagctcataacagttgccgcgtttgcctccgatgtcccaaacaatgaccagcgaatcagtgcttgccgaaaaaagaagctgatggctcaaatcccagcaaagatcagtgattgcccctgaaataacaataagataaaagccaagtcaattcacttttaacaaatgggaaaatgaaataagttggcaattttcacaataaatttaaaagcaaacaaattagcaccggtatgagcagataatttgctgattaattgcggttgctgttgcgtcccaaccaccagccgaagcactgaaatatttccggaataatcgcccacaaaaacgaaggaagcatcgccatcgaattgaagtgtggtacaaggcgaacccgtacagtaacttgctgaaaaactccagtaaaaaattataaataattaattgacaccgattttgcgagtggtcgacgtgcaatgccaaaccaccgttttgtcctttgagcaactgaccatttgttctaatcgttctgaaaagccgagtccactgatggaactgaacaaataattattccatttaacaattaagcgtcccacttggtgtgcgaattccattgccgtttgaatgaaatgctatgggacaataatttattttttgtaagcgctaaatatacctgttgaaatcgttttcaattgaatattcgtggatctgtccatttgcaaaaccgacaaaaatcctttaatgagtttgttaaaaataaattataaaaaatttcttcacgtgtttttctgttcactgcagctgagttttgtggggatgtgcggcaagtcatggataattgaaggccaaaacattcccgactcgcgtctgagcagcactcttagcgttctgtcctcatttacaacgagcagtccgtcctcccgctccaacaaatgaatgccggcgatgcgtcccgtgagctgaccttcgattttctgggccaattctgtgggtaaaaagtaacaacaatctgatcagtgatcaacagaaaaggaatggtacaaaatggttacccattcttgcattttcacccaaactgctggtcatagtaacagaagggttttggttgatcactgctgccataaagtaaccaaaagaaaataaaataataaaattgaacaactttattaaaaattttaagttagttaattgaaacttttttaattatctttcaatccaacttaaacatatgtaattggcaaacttttcggctgtatatagatttgtgtggtaattttgtaagtgtatttataaattaacagattttcatcggaaaaataacaatggaatatgtgcagtcatcagcagcagaaacagatgagagtaaactgtttttaaatttaaatgaatcagagaattgcgagctcaacgaaatttatgaaacggaaagtgaaacggaaagaaaggaaatcgaagcggcggagcaagtgataaacgcacttttatattacaaaaaatacgcattgagcaaactgaggaagcaggcgaatgccattctgtgagcaattaattggacattagcgaaaatggaggaaattttgcaggaaattatcggaggaagaccggaaaatgctaatcgtgccgagtttggaccactttcgaagggttcgcgaatgtgttgcagaaaaccaaaggcgagtcacaaaaataaaatcttatttttttattagagtaaaattagttaaacgaaaagaaactattttagacgctttttaggctttttaatatgatggccgaatgtggcgcccatatgctcggcgggacaatccaacaggcttttgaaattacccaactccgaccggcctcagagcattacatgacgaaggtgaaaagcgtactcaagcaaattttgcgcgattggagtgccgaaggtgagtgattttgatttggctaattttgttttattccacaaaatattcgttggaaaggcgccgatgaaagggcgtcatgttaccagaaggtcaaggaggagatggtgaagcagttcccggacccaaattcgcgacatgccgtcaaaattctagtcaccggtgcggggttggcccgattggcctgggaattgctcggcttgggcttttccgtgacgggcaatgagttctccatcttcatgttgcttgcttccaacttcatcctcaacacttgccgcaaggtgtcctcgtcgtgtcgtccttctctttttgaccttttccttcagtgccatgagtttaccatttacccgtgggcgcttgacttctccaacgcgtggagttggcaagaccaactgaggcccgtctcttttccggatgtcaatccctcaactgtctccaattctcaggtcccatcggctggtgttgttgtttaatctttcgccctttgatattgtttcagcgtctcaataccttttcaatgtgtgccggcgattttctccaggcttattccgatgagcaaaatcactttgattcggtcatttccgttttctttctcgacactgccgcaaatcccctccaatacatccgacttatccataaaattctcaagtgatttatattttttattttgttcctttcttcacctttttcttgcttaggcccggcggagtttggcagaatttcggtccgctgacttatcaccacgaagactctgacgacatttgttccattgaacttccgtttgaccaaattgtgcgtttggttgagaattgtggctttcgaattgaccaacttctcgcgaaggaccaacttccgttgtcaaggcaagggaaggcatttctccaaaaaattattttatttgacttgtttttaggtatacttggaacccgaactcaatgcttcagtacagctatcactgtggttattttcgctgtacgaaaatggttgaagattaaattctgtgatagcaattttattttatttgtctaactttttgtaaattgtgtttgtgtgagttgtgcattatttttctaaaatccaatgtaattaattagacccttggtatttcacttttctctctgtttgttagcttttttcattcatttttcggtttgaaaatggttattcgtcgtaacgacagtcctctttctttggatgttcaagtgagtccgtattttggtcggcattccctccctccccctccctttcagggcactgcgtttgatgttttgcccgagaccgactttcttgccgttgctggtcgaaatactctctccgtcgtcaaaattggcatttctgcgcactcctccgcttcctctttggtccaacttaggcataatcggaacctcgtccgtctcctcaatttcatcccatcggcaccggccg

SEQ ID NO: 5040 - DNA, 1554 bp, Heterodera glycines
  unsure (1)..(1554): unsure at all n locations
tttgaaataaaaaaaatgcnntnngatgcantnanttaataaattanaaatttntaatgggcgtttnntaatttttttanttaaaaaaanctatcannaaagcaatcggtaaattaaaaaatataaaaattaattaaaaaataaatcagtttttgaaaatcaaatttcattttttacaacccgcccaaaacttacatttgccgcgatccgacgagaccttcttggtgcatccgatgttgaaggcagcatgatcatgtctgacgggtcacttgattgtcctggaccggccttgtttttggccacaatcgctttgtccgcctcgccctccgcgttcacctgtaaagattttaaaaaacctcaaaaatcgtcatttttatgtaaaatttctaccaaaatccaagcaaaaatttttcaaaattcgctgattttttgaaaatcctcaaaaattgccatataccgtatttgctctaattatcccccaatctccattaatcccccaatctccaattatcccccagtctaggaggggtttgaagaataatccctctatcttaatcccccagtctacgaggaggttgaaaaataatcccccatgtgggataattagagcaaatacggtatgtatagtctctatcggcacctccccctccaaattccacaaaaaaaaatatattttttagaagtgcgccgcaaaaaaaacatttttgttgatttttgtaataaaattttgaaatgctgatttttaagccaaaatgctgatcttgaaaattttcagtcaagacccctgtttaaaaccctgatttactcaccgaattttttttgccacgtgccgacgtcgatttccggacaacgtcaatttgagcttgggaattgcggggaatgcctccgggtaatgttggggtaccttaaaagaatgaaagattagagaaataacaataaaatttttaacaaatttcgttttaacaaaaattaacaaattggtcgtttctgttggataaaaaaatatttaataattgccattttcgtccacacttcccctataatattgcctcggaaaatcccatccctactttgagcgtgcgctttgtcggcactttgaccagcggaagcggcattgttgacaggtgcgagccgacgcgacttccccggagcagtgccgcttcgcgtccgttgcccctttggcgtgtctgaaatcatccaaaaataaacaaacaatttttttatttaaaattttattaaaatataataaatttgataaaaacttanaataataattatacccgtccttggaaagtccttaaccctaagttgaggcaaggttaatgaattaacaatttctaatgaaaatctgttaaaaaaactttttgttggttaataaaaaatttttcaaaattttactggcaaataaacaatattgaacacgtaaggctaaactaatcaaatccaccaaaaatatttaatttntggttggttgttactgggaaatagtgattcattattntcaactgatttggcgctattgtcctccgccncgtccaanacataccctccaca

SEQ ID NO: 5041 - DNA, 4048 bp, Heterodera glycines
ttaagaaatttttaaactttatttttttaaaaattactattttttttattatcctaaaaatagatttgaagatatccttaattttatcatttatttttttcgtgttttattgaaattgaaaaaagtaaatgattttatcagtcgtttaaataatgaaaaatgatcaatttttcaaatttaattttaataatcacctttggcattggcgcgcgagtatttgcatttgagctcggcaaatttgttctcctgctgctgaaattgcaacttttctggcaatgggtccacccatcgttcttgaggcacttcggtgggcggctcggctgctttgggctgaaaaagtgtaaaatatttttttgtttttttactaaaaattgcattttttttttgttgtaaagcataaaaaagactctaattcttaaattttgactccaagataagaccgcaactatcccaaggagggaggggggggggggcatatcgctaaatgattgagcctttttaaaaattgataaaattaaaattttattttttggacttatttgcaaaacttttttgagcaaacatttaatcaatttatttctaacaaggaaacatttctgacagtaaatattcaaatcacttttaaaccacttttattttgtggaggtattctatcataaattctcgacctttttttggccctcaccaacaaactgatcagaaaaaagtgatcaaactttcaaaaacctaaaaaaaaataattaaaaaatcaaaaaaatttcaattttttcggattaatttgagtcaagacaatatatttttatacggcatcatgacccacctcttctggttcaggtgatgccgccgtaaagtcaatggtggtgcgaatcgatggacgacggacgggggaatgtgttgcaccactattcgaaattaattattattttttatgtaaaattaaaaatttataatcaattaaaagtgattactgctaatctacttgtgtattcgcatgtgcgtagaaagtccacgaggcgtataaaaaggctcgtgactacattttgtgcatctccattcctggaattaatttggttaagtcacgatttttacattgatcgaaaaatcgttgggcaaaatgcatgacttgatcatcaaattattcttaaaatgttttggaacgtttttgaaaaaagcttatatctaaaactttctaacaaataagtacaaaaaagaccgcttgtcttcatgacatttctttactaacatatggtccaaaagttactgtatttcatcgagaaagtggacccaaatcgatcagctcaatttttgtgacgcaaaaataatcacaaaaaatgaacaaacgccataaacccaattttagggagagaaaaatcatgaaggtttctggaaatctaatatggtgctgatagttttttaattgctcaaaataactttttttaaataatgaaattatgcagtgaaattagaaaataattagggatagcaagatcacttaatttgttggttcaaagaaagttttaaaatcagaatttttgatgatcaaacttgttttatttgtaattaaaatttcaaaaaggtatgaaatgttgttacatatttcgcacattaaaaaccaaaaattataattgacccaccagaggttttggtggggcctccggccttttgtcacgtcgggcggacaacgagcgggacctttgcgcgtctatttcattgtgccattctaccaacgtgttgtcctcggacttaaattcgggaaaattaatttaatatttatttcaaaagttttgccttttttggcattttgccgttttggtgccttttttttggcgttttttccaaaaaattccattaaaaaatcatttaaatgactcaaaattaatcggaccgggtcagtttagtacgggccgttttagtacgagcgcacatttttccactataacttttttatttattatccaaatccaactttcttgatatcattcgagagcccttcggatgctctattagcctgcaaaatttcgaaaaattttgttaagtttaaaaaaagttcgagccaaaaaagttggataatctggtttttttaattcttctggccataacttatttgaaccttaacgagatttttcgaaattttgcaggctaatagagcacacttagagctatcgaacgatactaaaaatgttggatttgattggcaaagaaaaaagttatagccaaaaagttgcgctcgtactaaaacggcccgtactaaaccgaccccgacccaaaattaagttatttggttacgttttcggtgttttgctccctaaaaaaattcatcaagtaatttgttaaatcctcataaaatttattaattctttaaaaaaagttacctcccagaaaaggtggcccgtacttctgtgtgcatattcttttctccactttgcccgttgttggtcaggctagcatgaagaaaaaaattttaaaaaaatttaaataaattaaaaaaagcaattaaattaaaatttaattattatacccacagtaagtgttttgttgtccattgaaggaagcaaatattgcagaacaaataaaagctaaaaaataaattttaatataaattttattcctaatcgattcactaatagggaaggaaaggaaaggaaaagaaaggaaaggaaaggagaataaaatttagttgtgcattaatttagggatgcgatttttagttaaatacctaaaattttgcgcatttaatacgcacagataagcacgaaaaaagcattttccacttggttttgggtgtctacgatgacttttataatacctatttttacctattttggagtttttctacctattatacctatttaaggattttcagaaaattccttaacaaaaatgcaataaaatcaaaaaatacacccctaagaattggaaaatttttcccaaaaatttatttgtttttttatgtaacaaaatttttaatttaaaatgtcaatattttctaagaacatattaaaaatatttaaattattcgtttacaaagaaatagaaccaaaattttccccttttgtttgcttttttccactaaaaatcgttaataaaaaattttatttacctattttggtacctattttggaatttttgtacctatttaatacctattttgagatttttttttacctatttaagtacctattctgggatttttcttacctaaaaatcgcatccctaataacaacaatcaaagatttaaagtcgaaaaattttgtaaatacaaaaaaaagcaaatgccttacggtttaaaaagttaactaaatgagcacaagtgatcaaagggaaaatcgagtaacttttacacaaacttattcatggtgacaggaacatgcgggtttaaatctatgaaaataataaccctagtggattacgaaaatttgtacaataattagtaagcctacagaaagagcataaaattcgctaccgaattgccactgaatgagtgatctggttggtggttaaaaaagcttgtttgaacagcataaagagttaaaggaaatttctgttttctcaacttaaaaatgaattttggccaattaaaatttaagtaaaacttgtatcgaggtggccctggtgaagtggccagtatccgtgttttggactagagactgcacgggacgggatgggatcccgcgcgggattaatcccatccagtaaaaaaaatttgagttcaaatcccgcagcacctgcaaatttgaaattcccgtctctattttggactgtggcccccagcagcccaatttctacgagttggttttcgtccgtcccatcacctgcccaacgttgtcgtttttcttcgtttttattttgccccctacggcgagcgtggcgtcgctttgccctttttttctctgccgtctcgtcgtgtgcttatgcactctctcgtccactccaaatgaccgcccattcatttggtcaccacattgaaacacaagcaaaaccccagaaggtctttccttttcatcttcagtcactctttcccccctctttttttggagcataaaataaa

SEQ ID NO: 5042 - DNA, 240 bp, Heterodera glycines
  unsure (1)..(240): unsure at all n locations
tatantttttttaattatatgcatcccctctttcacttttttcccttccttcattgcccccaccctttctcctccttcatttttttttcctttccttctccaaccctctcctccctctcttgatagtttaaactgaaggcgggaaacgacaatctgatccccatcaagctagcttctgcaggtcctgctcgagcggccgcccggggatcgatccccgatctagtaacatagatgacaccg

SEQ ID NO: 5043 - DNA, 269 bp, Heterodera glycines
tataataacgctgcggacatctacatttttgaattgaaaaaaaattggtaattactctttcaacttttttcccttccttcattgcccccaccctttctcctccttcattttttttttcctttccttctccaaccctctcctccctctcttgatagtttaaactgaaggcgggaaacgacaatctgatccccatcaagctagcttctgcaggtcctgctcgagcggccgcccggggatcgatccccgatctagtaacatagatgacaccg

SEQ ID NO: 5044 - DNA, 5467 bp, Heterodera glycines
  unsure (1)..(5467): unsure at all n locations
taacaatttttaattttacattaataaaattaantggcctttgttaaagattttaaaaatatttgtaatttatggtttgaacaaggatttaattgaattttttaataataataaacaattaggtccattccaaatcatagaaaaataattttttcatagaaaatcaactgagattattagtaactattttttgggaaatactcttagacaattttgaaaaatttgagtaaaaattacaaggtttaattaaataattatcaaaaataatactaatacaaataatgcgtatttagaataagttgaaataagaaataaattatttttcaatgattggcggaaatgaaaaataaaataatgttgacacattatcgtatgttgattttaatattgtttataactagggttgagcggtaccggtaccggtaccggtaccggccggtaattaccggtttttttggtaccggtaccggtaccggttttttcaaaaatgaaagtaccggtaccggtttgtctagtaccggtaccgccggtaaaaatttgcactgttaaaaataggagtttagcacaaaattgatgatgcaaaatttagggaaacgagaaattttatattagaaaatgatggatgaaatttaatggatttttgattaattaactgtttatgagtagggaacggatttttatgtttttacttattttttctacggctctaactcgatgataaatgcacgtaaaaacatttgttatccgaaaaattttcgttttactattcgaccctaaaaatccctatataaagtgatcgtccctaaaataagtttttatccctatttggtgtttcgccactatttcgcccttatttcgcgatttttaaattttttcatatacaattcacaaaattgtcccctttttgttgaaaatgataatttgtcaacttacgaaaaatattttgaatttaatctgtgtttatcgaaacatttaagcttttatctccctttgtttattaaatattaattaaataaaaatatctttaattttgaatctgcctgttttattttttcattaatatttttgctactaacatttaatgtataaaatttcgaaacataaatatatacttattttgctgaagataaatagattgaacttttcacttcataccattcatattcgatattaaataaatatttaaaattttaaaatttctaataaattattctaaaattataatctatgaacatcggtaaatggttgctcaaatgttgtcttttaatttttttttatgttgtttattgatatgcaaatgaaaaaaaaatatagtttataaataattgttttggaatttgtttttatttgcaaaatatttaattttttcatcttttattaatttctaatgtgaaagtttttatattgattagatttacattttccaatactgtttctttgtatataaaattaaaaaaaattaaaaaatgaaaaatactattttttagaaaattataaatttatattttatttattggttcgttatttaatattcaataattcaacaaaacattttttaagaggatcagacgatctcgtaaataactgagtatacaataaggattataattaattatttttattataccaagtaatatttagattgattttttaaaaatctattagtttagttttcttcaataagtaagcaatttattataacacatttttcctgataaggatatttattatgtttttaacgagtaaatagtcaactaaatggttgtttgatccttattacggctcaaatcgctgaacattttccaagtgtttagccgattcattgtgttgtttcaaattctttcatcaaaatgccaaaaacagtaaaaaacattaaaaattgagaccttatcttttgttcatttaaatttattatttttaattattagtttcaaaatgtttcatttattattctgtgatttgcatatgtccaaacatcctgtaaacgagtcgcgcaataattgacagccaatttcttcgtcaccatcccgccacccttcttgaaatcgataatcgccgttaattgttccgtctttttcttcagttcgcttttgcttacatatgatattttcttttttatatttaatttaaaagtattctttttaatagaaacttttttaaatttttatacttatctctttatatgtttaggttgaaattgttttgttttttcattttttgtaactcatttattaccaaaattttcatgaaaatatggctaaattaaatttgttctacgttattggcatttctggcaaaaattcagctgaatcccatttaattatttctggcacaatcatttatttaaaaatatttttcttattacattcacgacattggttaagaatgtaaaaattttttaatattccatttaaaaattataaatctaacaatcattatacaagcaagaccaggtttcgcctttttcaaatttcttaatcatttagaaaatttctttataaatacctaaagcagccaaatcaagcgctgtgttaaatcgtcactggatttctaagttcccggaaggaacttattcaactgatggaaaaattatcttttgtcaacggtgccttcaccaagtattagttttgactagagttgagcggtaatcggtaattgtaaaaaaaccggtaccggtactgaccggtaatgcaaaaaccggtaccggtaccggtaccaactttttccacaggtaccggtaccgctcaaccctagttttgacaacggaacagggcgggaaacaacaattaaggtgaccgaaatgtttctgatttgcaattgttctcacgaaattgataaagactgatattaaatatgattttttttttgcgtaaataaacttggattttcctattttttagcacatatttttgcattttttaacacatatttaggccttttttggggtttttagcacatattttgggtttttttagcacatattttattacgtatttcaggatttaaaatctgattatgcataccttgttatttgtttgtcattcttttacataagtatagggattaataaaatttttgaaaaatttagcattaaattacatgaacaccgaaccacaaatactacagctttacacatgatttttttaaatttgaatttttattagaattgtaattttttaactatgtgcattaatttttatatttgggaaataaataattgcaaaactttttataatatttttaatttttaaattaatacctctgcgttggtatttatttttagatattaaagatgaatttaatttaatttaaattttggttataaattgtaatcataattatatatattatatgtttattttccataattcagaaaactaaaaataatcattcaattttatttaattttactttttttaagtaatttatattttcatacgttcacttatcgaaagaaaaatatttttattggttcaattttcgataattaaaaaatctagcatttactttactgaattttaactttttccaaaaaaagccatatgtagataattttaataaaattatttttatttttattataatttctttgtttatcaataagtattctaaatcaatttacaaattaattcttgtatgattttaatgataaataattttttatgcttttggctaaataaaaaaaaaattattgcgtatttacaaatatttcagtttttattatttattttcactgttctcgtcgaccatgtatcaaggccgcatcttatgtganatgattttgattgcagtatattcatttttctagtatgtctttgtttcattaatgcttctattaaaattctctattttatattccaatcttctttcatatattatattcgtacatagaaaaccattatttttaattcctttttttcttaagcctttgtaatttattactttattatattattataagtttagtcatcgctctttaaatttacacgaattagtgtgatttattgcttattacactattaattaatgttaaaaacatttttcaattatctctgattaataaatctattttttttgatctgcgaatataaatagtagtcaaaaaaatttaatattcccctggtaattttaattatttcttttcattataaattaattcctttaaattgaatttttcttttccaaacataatttttgtattttctttaattttacgcatataaatttcaccataacttatattcaaagaggaagtaaatttaactttattattaatcccaataaattatttaattattttttctttaattaaaaatttccttgcacagttggcaatggaacaattttaaaatatgcaagcaaacattgttaattattatttgtttaagtactgtatttatataaagttttgtttgtgttctttttctcaaattggcctaatcaatcaataaaagtaagtactgattgaattcattttgagctccggttagcaaatattataaattttttgtgtaagttcaattattaatggtttttggaattcatacttaaaaatttttaaactattctttgatgccgttttaaatttgaattcttaaactgcaaaattgaatcttgagtaatcaatccccctgaagaaatcacttcaaatctcgcactgatcaataaactagcagctgtttttttaaattatgtttagcaatgcatttattcatatatagatttttcatattttaatgtgtcttacttagtaatatgttaaaatttatttattttatttttattactaactcatataattattgagtaacatatatataacattgttcgtttttatttgtttatttttgaaataaataaataattttcacgaccattttaataatatatttaaataaattttttaatataatcaaatatatttgaatttataaaatttataattaatagtaatataaagagaaatagtttgaatatttaaaaaaatatttttctccgttaatcatattattttttcccgtccaaatactgcagagtggctcggttgggatcactacccttgatctgatcggacaacagacggacattgtccaaatttacttctttttattttattaaactatagagtattcttcgtgaaattaaaataggagttattttgcatgcctttttaaatttaacgcacatttcatctaacacaatatgatttttttaattacttttttattgttttgtctgccatgttaattacattttcttgaggcctattgcccatattatctaaatatttaggtaatgtattcattcaaatttttattctatattcgtcttgtctttatttaataaaattacatcttatattttaaatagttttatttttttcaattttaaacatatttatttatcaatattattntaacattttttaattattttttaantttatttcattgaaaattttactatt

SEQ ID NO: 5045 - DNA, 5374 bp, Heterodera glycines
aaacataataatccgaagagagcaaacagtcgcaacccaaaagcatcgcaaaacgctgcagcttttgcatgcccatcagaagaaaaggaagaagaagcagcagcagaaacactcattccattcacagcgcagcaaataatcaactaaaactaatcatatctttgctggtgctaatgaacgaaattttggctccttctttggcgcctcgtttctttgtttgggtcccagtttagtgaccgtttaattgaaaaggcccccggcccaacacactctgaatgtgtgaagaatgaatgatgagtggcggggtgaacgtcaatgttgcgttgcgcgttaaccgacacttggttaatgcggtgtgcattcagtgggatggggtggaaaatttgttgccgtatgtttaaaggtggggttggtgctctgttgttgcggtcaacaacaaacgggaatggtcctatttgctgttcaaattcaacatttcgagttggggtagaagtgcgcggtacatggaccaaattttgaggaaagtttcctattccattattcatcaaatttgataagaaagtgtcatgcggcctcctttggtgggcaaatgtttgaccatttactccaaaattcggtcgtccatcattttccctgattgcgtttcgcaaaccttcggcgttttctccatttccggcatttccgttggctggcggctggctacgttcaatgctgaccaccaacaagcgtctgcgcaattcctcttcggtcatatttggttctaaaacaagagaactgtcatcaccattttccccattaaagcccgcgagttcagtgggtgagattggcgagttttcaatttgctgattttggggaaaactttctccagcactgtgattttggcgttgcagcgagttctgctgatttccaccgacattaatctgatgtccatttctgtcaacggcaatctccaaattcaacgctcgttgccgtgtcaaaatcggactgcgtgtgatgaccatccagcgaagtcaaatgtaaaaattcggcgagaagacggagaaaaactaagcaccgacccggtgtcaatagtttatacggcgatgtagacagaaaaaaaggttcggcccgaactcaaattttctgataaacaataaatttttcggtgcgctggagttttttgtcgctttttttaactttccgatccggaatagtcaatttccacttcacaacttaaatatcgtccggtccggactgatacttaatacactccaaattaaaacccgtccgaaaaaattttttattcccgatctcaccctcaaactctttaaaaatcgccgcttttgtacctgtttcctcgggagcgccaaattgtacttttgctactgacttaagacagggacgcaattataccaaacacagagtaggccactgtcaaatccaaacactttaattccaaaagacaaatatcgatgagaaacaatttgacgaatatcaattttaaagtcaaaagaaattggacggcacaaaacaataaaaattaccagataataaaattggtatgaaagatagaagaaaaaaaacaaagaatacaattttaagtgagaaaaaacgcgaaacaagacattatgccaaatttaattaacactaatgagtcattataattaaaattctacaacaattttaatgttcggattgtctatctccaaccaaggacaattcaaaaaaccgatagatattttattcgaagatatttattattcaaaacagttgatcatacattgtcttcgccgcttgacaaccgaggaggcatgaacgagctgtgttttatgggccttttttctcataataatttatatcaattttaatatttctttttctatcccaaaatttgttttttattttttgctttaaattattgctgaaagttttaattgcaaaatttgtcgtaggagaaagtgaaacaatttcaaaatttacagtgatcacaataaaaagaaaacgtccattatttattgcatttttgaagataatcattttttatttaaataaaaatgtgtaataacccaaaaatttaaaaaaatcagtcagtccatccatttcacaagcagaaagagcgcggcgagcagcgagccacatcatttaatggtggtgccttttgtcggcggaacttggtcgaacttgttgatccaacactcaactaaaaattcaaaataaataatttttataatttttttttgcttaaaatttaatttcattcttaaaaaatagcttttttacagtattcctgcattctttcaatgtcagtcgcctttctgttgatgataccaccctcaatgatggcacaaataatggcaaataagaaaagcatcggaatgagaaatttcatcgaatagtgaatttgaaaatccttaataaaaatgggaaaaataaaaaataaattaaaaaacaagaaaaaaatcaatattcatttttagataaaatcaagaaattacgaaaaaggttctttgtcttcactctcgagtcgaaagattcttcggatttttggagcatcgctctgagctttcaaatcgagagaaatttcaagcagtccccaatttcatgcaaattccaaatgcggcgccagaaaaagttaattttaagtgtctttggacccaattttaattctaaaataatttttggacaagctaattgagcttggcaacaaaaaagtcattgagctagacgctagaatggccggcgccaatatgacacgcgctgaatttatttagttgtccaacaagggtttaattaatttaaatgatgctcaagaatctcggtctcgagaatggtctcgaatttttcggtcccgataaatcactattatttagagagataaatgattcgtaggtatccgtccaccattccccaaataataataatgtttggaaaaattaaataaaaataaatttctaaccagccaatgcccactaatggaaaattatggaggggggggggggagtggaattggggaaagtgtagtgactaatgaatgatcatcgaaaagcaataagaaattccacaaattctttttttacacattttatgaatttttaatttggacagatggctgggaaaatgggaaagtaataattattctgctgataaattaagtcattgattgatatattggggtgttcggaaagttctttcatagcggacaaaaatttatttgaaaattcgtaacatattaaccaataaaccaattttaatcaaaatatgcaccattattctcgaccatcttctcccatttttgagattttaaaaatgatctatcgattaaattcaagatagttagactcaaataaactgatgggtctacttaaaaaagtggacaaattcaaccactgatttcttggccaagaaaaggctaaaggtacaaaacaaattatggttttgtagagcaaagttgggactatctgacaagctgaaaaagagccaccaagaccgacgggttattttttaaaattgtcctgtctgaaaatgggtgctcaaaagtgccaagattcagcacccactttgtacaacattgttctgaaaggacctaataaaatgaaattgatgttttcatgggcaaaccaaacccggagaatccgaatatcgcctcagatttagtcagttgctgttctatgaccctgtactgcttcaacttcttttcaacgacatggagcagtacaatgccagagaaaattcagagatcaaatctgaggccagatttggattctccggacttgatttggccacaaaaactgcttttaataaatttccaactgatcaaagcaaagttttgacccgtacaataaaagtgatcggatttgggatttagggtgctccattgggataattttaaaaaatcaatttgaatggggaagaacgaaaaatggcttttaaccgaagcaaaaatgtctgctctttcctataggacagaaattgatcggctgtcacttgcggttaacggtgcaaaaaattccgattagcatagcataagaagggtgacagaacttatacaaccccccccataaaaaaaatgaagattaatttatttaatattatttataagttctcctttattcgtacacaatcctaaaataagagattttaaattcaatttactacattaataattacatcaaaaataaataatttgttaagtgcatcatatacccctaataattgaaaatttttttcacaaaaactgtcccaaaagttatttatttatctttgagaaaaatttttgtgtccttattcgaaaaatcttcaaaaatttggaaaaattgaaattttcttggagtaattcatttaatttattgttgaaattattaattatttttttaattcattaatattttaaaaattaattttgttcattttttcttgtattaatgagtattctcgcaagatattcacatgcacagagtcatcaaatagtaacatgttttcttaattttttatagtattatttgttcagattctcacataaaagcaaattttcagaaattcgtgttttcgacctattgttcgaatttgggttcggggatcggaatatgcccaaataatttatgatcagcgaccttgaaaacccccggtgcataaaattgaaatcattgtatggaaattggtgataattaaaaaaaaaatttcaagaaaatcaacacattgaacttatatttgaaggaggcctattcataattttctcgcatatggtccaatgaaaaccaaaatgatcaagatttgatcaatcattacgtgcacttcaatatggaattgacatgaaaggcttcgaaaaaggaattaataatgaatatctatcaattcttattctataaagcacataaatttattttaatcagagcgcaaatgtctattttcgctgtacgacgcaaatgtcgcggcgcaaatgtcgtttttgttaggcggcgcaagtgtcgcggcgcaaatggcacggcgcaaatgtccgcggcgcaagagtcttttttgctgagcggcgcaagtgtcgcggcgcaaatggcgcggcgcaaatgtctgcggcgcaaaagtcggctaaccgaagccaatagtgactaatcatatggaataagacaacgaaaaatttttatatagtttttattgattatggatatttattaagataatttaaattgattatatatattttcacatatttagacaaaataataaaagatttatatatcattataattaatttcaaaaaaacaatgaataaaataaaaaaataaagattaattctagcaattaatgatattttttggaaaataataaaaaaaattgtattcaaaagaatacttatttattaggaggagcaaaccatattaaattattaaatgcaaagagatcg

SEQ ID NO: 5046 - DNA, 5676 bp, Heterodera glycines
  unsure (1)..(5676): unsure at all n locations
cgaaattgtttatttcaatgggataaatancgcgtacaaaccttttaattgtatttgtaagaacacacaaaacaaaaataatagacaaaaataaatgaatttatgattaactatatttggttaaataaatagtaaataaatgaaaaatgagaagagagagagagagacaaagagaattaattaattgctcattagtgcataatgccaaaatatgaatgggcgaaaacccacttctccaaagcgtaaagagaaaacaaatcaattaattaattaactaatataataataactaatggcagtgtaataattttagcattttgccaaaaatggattcaatttttttccttttaaactgccattttacaacactcggtcagcaaaaatttaggattaacttgacgggaattttcgagagaataaattcatcaaaaagcgcttcccttaaaattgaaaaccctcgaaaactcccgtaaattttttatgaaaaaacaaaacaaaaaaaacactcgaataatttgggcaattgggatttcgcacaattcattttttgatcaaatgtggtgttaattagaaaaaaagacttgaaaaattacaaaataaaagaagagaaaaaagagattctataggttttccagcgccattttaatttttaagaaacggaagtggtaggaaaaggacagaaaatttcaaatttaagaacggaaaagaaaaggtgaacctcgttgaggtaaaaatgaactttacaaatcagtgaatgaatgaatagtgagtataaatataaaacgaaataaaaaataataaaaaacaaattaaatatgtaaaaataataatgtaaaaataaaataaatttaaagagtagaaaagcattgcattgcaaaaacccaacacacaaacagtttagcaaatgggaaaaataatatagatataaccatttaataatacgaaatggataaagcccaactcgtcatttattggacaccgttttaggagcaaacttttagattttaatttaaaaattaataaagaatttagaattatcgaataatacaaagcaaaaaatgtttaatttatgtttatgaaaaagttttgacgattttttgtcgaaaaaatgcattatgaattgggggagtgtgaggtgtgttttaaataaaaagcacagattatcaaaaccaattggaacatggtgaatggggatgaatgtttagcaattttaacaatggaacgacatacagtatactcaataatataatatcatatcagtgccgcagcaaattgcgacttttgtgcggtttcattgttggcattgtgttgtgtgaggtgctgttttcgttttttgccgttctccccttttccctctcttttcgccttttccacggtgttcaaacagtaccagcaacaccaccaccaccgttctgttgtgctgctccctccttcgccgtttccgctgccgccgtccgcgttctgctacgcgtttcagcaccattctccgcttccgtcgctgttgcggtggctttgagtgcgcatgttcggtagaagaacaggttgtattcgtcaaatgcgcgcccgcgttgccgctcgtccctttcgcaaaggttggcggaatgtccgatgcggaatctatatgattctttaatatatatactatatgatactttaatatatatactatatgatactttaatatatatactatatgatactttaatatatatttttttttcaatttaaaagctaaaaaaaagttgaatccgaaagccttttttgcactttgctctcaaattttttttaataatttttcaaatttatagtcatagtgggcgactaataaacttttagtaattagcaaaaaaaattaaaaatttaaggatttagtcatccggcagtacctcctgggataattattgaaaatcacagaacataattctttgacctgtatgcgctctgtaaaaaggaggcagccgacagttcgaaaatgttttcggtcacctgaatggcaaaaaacaattattgattgattaattggacgatcgttttggctaatgtctcccatattaaatgatctgttgctaattaggccaataatgatgattggatttgttccccactctgttcgtttccggcggttgacttcgttccgagtcgtcctccagttgaagctgtttgttcccatattgttgacatggcttatattggaagccgttcaatccgccacaatcatcaacaaatagcgtcaaatcatcagtgctaaattagaaatttaaaattatttaataaatttaattaatcgttttattttcacctaatgcgtatttgcagcggaatggtcgggaaatgttcagagaccggcacaaacaaattgaaataaccgttccgtgcatcgcaactttcgttgaagcaatagcgcgcatcgatggtgaagttcatattcagcaccttcaaaatcaattaggcattaatttattaatgggtcagttttttttttgaaaaatgttattttttttttattaatttttataaatttaaaacagcaaaaaactttgaaaaaaattacaaaataataataaaattcaatcaactcagagatgaataaatccatataattttttttacctcaaattttgctccgtttgccaaagtgttcatttgacctattccgttctgctgatccttaaaatttgattaatttttaatataaaaaaagtaaaacccaagtcaattcattaaaatttgcaatttttggagtgtaaacacttttttttttgaatttgtttaatccaacatttcgaatggctaatcgatgcgccaaaaaattcgttcctctattgatcatataccaatcatacaatgtgcttgtaattatctaattataattttttgccattcacttgtgtcagaagtaattgtggcgccggaggcacaacattttccgccacttttgacgccaatgcgacccattcgtccacactcttcgacagtttttcaccaaagttctcttttgatgtagccgccaatttgctgtttattccgcaacagtaatggggacaggtgccgtggccaaccagcggtactgtaaagtatccaattagtgctaattaatgcgcgtattattctcgtgtcaccaggaattagtgacgagagtgaggccatcactgtgccagcgccgccacagaatacggtcaacggcggcacattctgcggccgatcgggcaatttccactccacaaacggcttgaccattttgccgggctcaatttgctgctggtgtggttgccggccatggtcagcagcagccgaatcaggcgaggacggggacgagggatggtgatgatggtggggcaagccgttgtaagagtcgatcagacggacgggaaacacgtaggtacggttgtaccagtccatcacgtacagtgtgcacattgtgaccagactgaacgaaggtgtgtaacagtacgatcaattaggaggaagataattgattaactaattaaaggttattaattgttttaaagcacggcatattttacaataacaaaggataatttattcgtatttttatactttgcccttaatagcccatttattattgttttgctaaaaaagaaccaaacttgagtgttttgagttaatttttttaaattttagcaaatttgttataaaagttttcaattttcaaaactatatcttacaaaaaaggcatcatccttaccaaagtgccatgatgatcacaagcgttacaattgtgccctgagtgaactttgaggtgcacaacggcgaatcgacgacgagtgcacggaccaccgcctccaccagcgccaccgtaatgggaccggttacagtatgccgaggccgacgaataggagcgacaacgatgatggtaacggtcggatgatgatggtcttcgactgaaaaaagcacacagaagattaattgttctcggattcgagtttcgagaattggcaattatccaatggttcgagagttggcaaaatgcttttttggcgccaaattttgaatttaaattttatgtgactgtcgggcaaccttttgccactgccaatgtgttgtttcttcgccttttcttgcacaatgtcgtcgttgtcgtaatgcgtcgttgttggcattgtggtgacggccgacgcaagcgaagtgcgggaataggagacgcagctttgcttgtccccgtccgcaccaccgccaatgccggcaccatcgaggagcgattttgtgccaaagaaagtggagaagtcgctgaggccttaaaagacataattgtattaaaattacatccttttaagcatccaatagtctcacccgatgccattgagccgagttgccgccgtttctgtgcgtagcgggccaatttttgcgagattttctcgacctggtcaagcttactgcccaaattgccggtcaaactaaattgttacaaaaaataagcataattatggggtcattccacagtttaaaacctgttcacatttctctgattatttgcccatttctcttaatttttctcccaccggtataattcctgcgctgctgctacagtatcgtagaacacgcgagtgtcatcgaccgtaagaaattcgccgttgtctttcaccgcctcgggcaacacttctgccaactcctaaaaaaggccgatcagaataagagcactgatcattgggaatgtatatcaaatgctcgcctgcgcaatgacgcccacccggtgcctgtcctgctcggtaaggccccagcgttgggcaatgtccggtttgtaggcaaattcgacgaggcgcatctgtgccacccgggccatcgcttcggcagtgctgacctggacaagtgggtcaattattaattaactgatgcgagtctcgagccttggcaagcacacggcctacctcggcaatgtcctccttcacgcgccggtccgatgggcgtgtgatgttgccggtcgtggcgatgttcccgtacacagtcagagaggcattttcgatcggtttgtcgccgccggcgccgatgcacacttggccagggaaggccaacgagccatgttggccctggcgccagttcaaatcctgatcgggctgctcaaattggccagggtttgacgccttaattgtcggggaaaattaaaattattattttttggcagtgtttttctcataattatgccaaaaagtttctggattcatttaaagtcccaatttggttgaattaaattaccaagaaataattgttacatactcgaacaatcacgcgatcagaatggaatgcttggatgagaactgaaaagagggagcgaatgttgattttaaatttgaaatttttcaagcttttccctggtgagactatcggtgcgccgctaccgtacccgcccccttccccaagaagggtgtaaattctttttcttcaaattttatcataaatcattagtgtattcaaaaatttttccaaaaaaccgttagaaataattaaaattttttttaaattaatttaaattttttttttaaattaatttctttgaatttaaaaaaatcgaggggggaagacctgctccccccaagtaaacttcaaatataacgaaaaatcaccataatatgaatttataattttaatgtccgagtctactgattacaaatataataaagaaataaaaggtaattttattttaatataatctctgattgt

SEQ ID NO: 5047 - DNA, 1484 bp, Heterodera glycines
cggattggcagaaattagaaggacaaataaaatatgctcttattttgaaaaataattgagttagtaaaagaatgaaaataagtacctaattaatttaaaatttcctgaaatgattattttttaaatgcggtgaaaatcaacattaatttagcaatatttgaatattttggattaattcagccacctgttgttggccattggtggaagagttggccgaacttgcggaagcagagttcaagtcaattgcaatgttgacggtaatttggaaatggttcttcttctgattcacaaagcaattatcggaagcgctgtaattgaaccctttgtcggcaacaacggcaactgaaaatgggggaggggtaattagacaatgaattgggcaattaggaaggaatcatcagaaatagttaatcaggaccgtttctattataagaacagtttaagacactaaaagtgtcaccgacttggcattggctgcaaaggacgacggttgaagtcgtacaacacattccactgctcacgcaagtacggttcaaactgaaaggagtgttgaagttaaactaataatttttgttttgttttttcaaggacggtcccccaagggggagggcaaacaccaagggatataagcaaaatgtcttaagaaaaaagcaaaacgaagcgaccaaaagccatataaaaactccttaaaaacaggtggtcaaagtcaaaatcaaatcatgggatcgttattaaaattataattaaacactgaaacaaaaaaaataaaataaaaaagtaaaaattcaatttaacaattgaaacttgctacaatatttgcttttgctataatatacaataccgataagtcggtcattgaatttaacttattttcttgccaattccccgtgcgaccctcattaatcacatccaaaatgccctccctgctcgcccaccttgattgtcctctgtgagttgatgttctcgtccaagtcgtcaaagctttggtggtgcgactggggttgcggcgtttgttgctgttgggtctgaagcagaagcatccgttgttgttgttgatgttgctgatccgctgctgatccaatcccggcattggcagcgcaattcgtctgctgatggtgttgttgtggcgatttgtgtgccgaggaagtgccaccaccggcacagctgctcacttcacttttgatgttcggcaaattcgtgctgttccctagcggcacggaggagtcgcgcgaactgtgaatgaataggataaaaatacaataaaaattggtcggaaaagtatggcaaattgagaaaataaagaacccattgaacttttatgagtggttttggtttacaagggcgaacttgccattattcaaggacagtttcataattcaaatgaaatacttattaaacactaccccggtgttgcggcggagctggacattcgtcggcgcttcagcccgtgcgacgagtgattgttgtgactctagaggtccccg

SEQ ID NO: 5048 - DNA, 2840 bp, Heterodera glycines
aatttttcgaaatgccttcggaaatcaccaaaagtctctgcaatttcctagctaacaataatcatcggtctcgttaattttccttttcaaaatctcaatggtaagtcaatcacaaaacactgactttataaagaaattaatttaaaaaaataaaaatttaaatgttattaaaacaaagacagcgaattcctttcccaaagaacggacaaaatgtaaaatgaaatgaatggtattgattctaaacaacggacggcagaaaagtgaccagtggactgcataaatatgaacaaaaactcagaggacagcttagcacacagatggggcgaggtggaccaattggttggccgaaggacaaaaaaaaaacaatgttttttttccttcaaattttggtcctttaaacctctcaaattgggaggggacgccacagaaaatgcaatcatcggatgttccatttttaaaagctttcttaaagggtgaaaagggttaacgaatattttatcggttgtacgaggagaattgaaaagaaaaggaacctttttgaaaaaatttggaaggtggaaaaatgctttttatggggggaggggtgaacccagcaaatccaaagcgcacaagtactgaaaatttctcgagatttgagaccaagtgacccaaaaatcgagattgaatccgagacttaacccagggagtcgacaccgagacttgactcagagacaaggacttggtcccgcaactcgagaccctaacctgccgagacttatctcgagtcgagactctggaacagcactaggatacagcatcagtaataatttatcatatccagtacaagaatgaatatttttacctgctgtgcagagtgatgggagccgggcgtcgactgtgagggcgggtacgggctgaggaactcggagttcggactgtgcagacattccgctcccgtggcctgcccatcgcctgagcggaaaatgcaataaacatttacatttaatttgcaagaagaaaattcaatgcaaaataaagaaatgaacaattggtaggaaaatcattcacaccttcggcacaccctccgcccgcggcattcccgccacagattgacatgccggacgaggcccggtgaaggcctccgacgccgctgcccatcatttggtgtcctcccatttggccgttgttgttgttgctgttgtggtgatggtggtggttcagcagcagcatgtcgccccgggggtgttgttgaatgagcagcacttcaccagcagcggtgccgccgttcatctccggcgggtgcatgtaacggtattggtcgggcgagaacggactggacgaggcaccacctgcgcggaaaggcatagaaaaatgatgatttgaacttttaaaattaagcaaattttaattgcttttaatggaagacggaaaaacgggcacagcaaaaaagacggcaaaactttattagttgctagcggaacttcgaataattgcgccaaaattaaggcgttcaattagggtttggccgagaccgagagggaaattgtcgggatttcaagaatcggttccggttttggtgcatttatctttctcgaccgattcaatgcttatatttaaatttagaattcattttgtaataatggacacattttttcgcccacgaaaacacacccgaactgccgggcgaaatggaacttgcgccaccggatgcgtcggtgatcggcgggctgtcgggcaataaacgcgtttgaccagcggcgccgccacgcggttctatcactccccgaatgcgaccagcagcggcagcaggttcaggcccagtacagttgttgttgctgtacatcatcaacccgacattatcgagcatcatggcctgctaaaattggtcgaatgatagccatgactttttcggggccaccaaaaaaactcctatccagtgaaatattgcggaaagctgagacgctgctttaactaaagagcagaaaacgattatgggtaccgatgaatttgtttagaattccgatcaaagattccgttgatcggattctcccccctccaacccgtccccctctcatggagtaattcttaaatgccatatcccctcgtgatcaaattcggatggcattttgcatttcattccgcacttgcctgttgttgaagatgatactgctgctgctgttggatgtggtggtgttgctgatggtgcagtccgttgcgatgttgcgctcccccacccttcagcatctgttgttgattttgctgttggttgtgatgttggtggttgtgttggtgttgctgcagttgttgttgatgttgctgtactgctccaactccgcccgttggtggcgcgtgcagtgcctgcaccaattcgctggcagccgcgttcaacagttggtgcggatgctgatgttgctgttggtatatgaggtgactgctgttgttgttgttattgttgcaggcagtcgctgcgccaaaggcagccggactgccactctcgggcgtacttggtaaggagaaccaattaattaataattagtcaattaccgacaaatttgtgcgtttgtttgatcaaagtgttaaaagagggataaatcaccaaactgatatccatgcaattagcgcaaattggttaggatcaatttagaaactgttcgagaaccaaataaagatgtatttcgtcgagggagggggataagctaacaaatttcaagataaataaacgaatatgcatcaaattttcataaaaaaccaggtaccccaagccaaaaaactcactcgccagctccgatgtattggaaaatgtcaaagttgtcgtcgtttccgatcagagagtcgccaaaagccggattccttctataaaa

SEQ ID NO: 5049 - DNA, 6603 bp, Heterodera glycines
cgcctttaacggttcacaaacgcgccaaattcttcgcctccctctctgcatgccttaagacattcgtatcggtcgattgccaatgatggcggatgcgagaataattttagcagtcgggattttgtgtccgcaaaattgaatttcgtgatttcgtccggtagacaaaagcgcttgtactcgctgaacgccgtcggagacaatttggtcatcaacaatttgaccttctgttcatcgtccaaatttgaggcagcacaatccaaagcaaattggaaacgttccagccactcctcgaattcttcagcactgtttggagaaaatgtctgaatgtcaggtaatgtgatgttctgtgctgtttgtgttgtggagggcgcattttgttgctttattgcctgggtgagtttttccaaaatatcggcgagagttttgtccatcttgattgacgatttgaaattgttgacgaattaaaaccacagatagtggaaccgcaaccgcataggtatcttggtttttgatgattccgcgaaatttaaaaatcagcacgagatttttaaatttcccaaaactagcaattcaacacgagaattgcttgaaaattgatgagttcgggcgtcgccaatgttgtgcttttagggtcacaaacaaatgttgttgaacacaagatatttattaaaacaacaacaaaataaaaagcagaatttggagaataatttggggtcaatatttagcggagcacaatatttaggcgagtccagaggagagccaaaaagagaatgaattgggggaaaagaggggaagagacttaatgagcagaatgggcaaaatcaatagtacaaaggacatggaaaagaggaatgataacaaacatcatttaaatgtccttttccaacatacagtttggagattattcagcttcagttcgaattagactagattttgctatcacatttgctcataagaacatgaaaagtggtgttaggtatttacaaattcaagtcaatctttgccatttacgacaccgtcaaaaattacaaaatgaaaaaatgtcacattgggaaaatatgaccaaatattgttgtataatcttataataaatctcataaaattatgtaccgaacatacagccggacatattgcctcaaaaaaccaaaattaataaaacaatttcttgttggatttatatgggaaaacaaatttgatcggaatttttatttctttatcgcgttaaatagcctggatcattcttttttcgacgaagtttcttctcaaaactgttttttccatcttataatgctattttcaaaattttttcaaaaaattttctattgggaaaattcccggtggtcccggtcccggcttttctcgcggtcccggtcctggtcgaaaaacttggtcccggtcccgatcccgacttttctggtcccggcaagtcccggtcccggtttttgtcaaaattcccggtcccgaccagccctactttttaggaatcgaccagccacgggttgtgctattaatgcctccctaatatcggtccactcacgaatggccttgttaatctgttctgttgttcggtgctatgattttttggtgtttgtgccgtaactaattggacttcataaaaaataaaaaccatttgttcttcattgatcgcacatcatcgtttagttgatcaattatttaaaatattttactgaaaaatgtcaaaattaatgtgatatttgaaatattccggttttcgtgaattctgtttataactttttttttattggtcggaagattaattatagcaattttaacgcgcttttttttatacatatattattaaataaataaaaatggaaaaatcaaaataaaataaaaccgaaatgcttaaataaattacacacaaaaataaaaatatgattaaatctttttgtgctttctattttttaacaaaattcgcaaaatctttgtttggttcacttgacagctgcttcatgtacaaacagacgtcagatcaaaacaaattcttttatttagcaaataatgaacatttgtgctttctttttggtttttcctatacacaaatctctgcatttagcaatcgattttgatttattttgatagatttaaaattgaaaaaaaagaatttaaaagggaattttaataaattcttttaaattaaaacaggggaaataaagcaacaaaaaaacagttttttgaaaaacaacaacctattgacactttattttaatttcaacaccttatggtttttttccgtttatagcgcatattttcggttttttaattattttaacagtttttttaagtttttagaacagttcatattttgattttagcacataaatcgaagttttataaacttaaaattaaattacttaataatgacatccaaaaatgatgtcacttttcttcaaaaatctccttcaatgagcgatatgaagccccttcgacttcgtagaccaagcattgtcagcaccagcagaagcggacttgggaatttgggagtggtaaaatacaaaatattacaaaaaaatatatatttaaaattatttttaatttatttcattatgatattttacctcttaattagagtttcgaatgttgagtctgtcaacataactacaagtataatgtaaggattgttttcagcaatgtttgaaatcccgacacttttcttcatgtattaaaacataagttatctatttattattaaatttttctaaaattttttgttgtagttttatttgaattaaattattctgaacaaataaattattcatggaaattatttttaactgtaaaatattttatttaaagttatctttgattatgatcaactgtaaaatgttttatttattttcaaattgttttgcggtgcttgttctgttgcgaccatgatttccaattctcttatatacagttcgcccaattatcggtcagcgtggccatggcgaatgttccgtgacttttctctttttattttccaataaatttgcatttttcccattttttcatcatccgttattcttttacatctttttgtacaattgtgagtttttcttcatcagtttttgatttgtatttttgaagaccaaattctttaatccatttttgaatatattgtcgatttgtccccaatttttttgctatttttgagttaattttactccattctttggctgaatattttcttcctttttgcttaattttctcttattttgtagaattttccaataatttctctttttttcttctcatttcgttgtttttcttctttttcttcccatttttctccaaatatttcatcaaatgttttctgttgcaattttttatccactgattcaacataattaatattaattaagacgatcaaaaaaataattaaagtgaataataggcatagtttcatattaattctttgattggttcttaaatattaattattttgttgttatctaaagaaatattatttgtatgttttaataatcttatttaaaattatcttagtttttataaaaattaataacgaatgattataaaatgaatagtaattattcgtttaagcttatttaaattatacattttccgcagaatgcattttattgcaaattattttaattgattttatggtttaataatgttaatgaaataattttaaaagtttgctaaagaaaatatattttatatttttgttattcagaattttttcttaacaacaaaatcaattaaagcaaaacaatgttaataataaatagaaaagaaaaaatggaaatttttaaggtcattcaacaattagatttttatgaaaattgaaattttggcataattttgccattcatttgtgtaatgcattcatttatattttatttacaattcttttttttacaaatattaaattcaaattgaagccttggctaaaaaccattgaaataataattaaaaataaaaatttaaataaataattaattaatttcttaatgaccaggcatgagctgccaccgaagcgttttttcagtgtgtttgacccatttgatgacgaatacaaacattggaacaaatacggctcaaaacggatggacgagcgattgaacagacaatgctattaccacaacaagcggcattattttgttggataaaatgccaaaaaaagaaaaacataacggcattattttgttcgacagaatgccaaaaacgattgattgatttcaatttttttgttatgataaaaaggggatctacaaaaccacatcctgggctaaatctctttgcaaaaaaaaaatagggctggtgatttaagccacgaaaaatcgccaaaaagtcgactaaaaaaagttttaaaacagcaaaaaaggcactaaaaagccataaaaagacgaaaaaaagtaaaattaaaaagaaatatccaaattaacaaaaccaattaaaaaaaaagaataacggagccaataaattttcattttttctattttttgttcctccgttattcttttacagcgaattccaaattgtttcttccattcttaattatgtctcggccgactccaattttcttacaaatttcgacataattttgtttccattctttttcaacatttttcggcgctaaaatttcatttttggccgttttacgttttacaccaattttctgaaataatgaaatttcataaaatctctttaatttttctaaaatctctttacattgtgaatttattttatttttattgaaaatatgtttattattttcgaatgagctccagtagaaagtaataaaattttatttaatcattaatttaccaattggcaattattttgtcattaagataaaattattattattatttctttgaaattaaacaggatttccttattttattaagtaaaataatgatttattcagttttttaatcagaaaaaaaatcatttaaatgcctcaaaaaatgaattgccatttaattgaagaaaaataaaataaaatcatttcgagacgataaaaatgaaattatttccgctactattattaattatattatttttaattgtcaaaattggagcagaaaagaaaaaattgcaacaaaagtcatttggcgaaatatttggagaaaaatggcaagaaaaagaagaagaagaacgaaatgaactcaaaaaaagagaaataattggaaaattttataaaataaaagagaaaataaagcaaaaaggaagaacattttcaagaaaagaatggagtaaaattaattcaaaaatagcgaagaaattggggacaaataaaacatatattcaaaaatggattaaagaatttggtctccaaaaaaagaaatgctataaatcaaaaactgatgaagaaaagttagaaattgtacaaaaattcattgaaatgataaatgaatataagcaaaaaagaaaatattcaaccaaagaatggcaacaaaatcataaagaaatttgtaagaaaattggagttggttatgacacaattagaaaatggaagaagcaatttggcattagcaagaaaataataacgaaggaagaaaaaataataaaaatgaaaatgtattggcaaataaaaaaagaaaatccgaaaatgagtgacaaagaaattggaaaaacattgaaaattagtcgaagtagcatttttaattcgaaaaatcaattagaaaaagaaagaacggaagaatgaaaaggaagaaatttactttttcgcatttttcgatttaactttatgttctttccttagcccatctcgaatcgtatagtcaatattaaaaaccacaagcatctgagaattgatgttggacaatgcgatcgttaaagaggattcggtcgaataagttaaggtatgaacttaaatattcattgggataatcgtccaatgaatcaaaatattcaatttctgtcggcgaatttacaaaacaggcgacccagtgttcacctatcgtgcccgcccggtcagtattcgccacaaagcagtacggaaaatgcctgtccttaaatttaggcatcttgtcggaagcaaaaaccccgataaaatattttcgggttgtcagatgtttggatagaaatatttcaatctcatgagaattcatcatatgcttccgtcgctactgagcacccgattagcattaatagacaaaatcgaatcaaatttccccagaacgatcatctcaacgggcgatatcaaaattaagtttcaccattgtttcacatttcgcaccatcagcaaaacgtgacgctctgtttttaaagccgctatttgtataatcatcctggtcgacatcgtcgacataatagcaagatgcttcacagagaccctttttgacatcttctgaaaatcccaattcagtcatcatatattccctaaacgcatagtcaaatataaaaagaaaaaaattcgcttttttcgtaacaaatcaggacagtcagaaaattttatatactcaagaaaaaacgggtcagtagtacttgcatgaaaaaaaaggaaaatcccaaaaaatgagtgattaggaaatttaattgtaatttttattattattatttctttaattcaaaatatacttctttttcgcatgtgcctgataataaatgctcaattgcatcatttattag

SEQ ID NO: 5050 - DNA, 2323 bp, Heterodera glycines
  unsure (1)..(2323): unsure at all n locations
cttcaaaatttcttctcctaattgtttcttccaattgaaaatgctctttagatgaattttcattatttttgcaattttattatcactcatttttggattttcactttttattctccaataaattttcattttttccattttttctttctccgttattcttttattgcttatgccaaattgtttcttccattttctaagtgtttctctgttaactccaattttcttacaaatttccgcataattttggtcccattcttttcgtgaatgttttctttttcgtttaaattcatttttcatttcaatgaatttttcgacattttcaagtttttcttcatcagtttttgatttatagcttttctttatttgtttttgaaaaccaaattctttaatccattcataaatatataaacgatttgtccccaatttcttcgctatttttctttgaattttatcccattcttttgctgaatattttcttcctttttgctttattttttcttttattttataaaattttccaattatttctctttttttgagttcatttcgttgtttttcttctttttcttcccatttttctccaaatatttcatcaaatgacttttgttccaactttttattttctgcttcaaattggtcaaatttgatgattaataaaataaatttaaaaaatagcgggaataatttcattctttataattctttggtaaaaacttttaaattagcaattttgtaaattaatttattcaatttaatgattgaatttaggtaattatgctgctttatgaattatttatgaatgtatttaaacgttacaaatgagaatttattgctttgtattgattataaatatggattaatttaaaagtcaggaaattattcggctaattcagattatctaatgcaaattattttcaaaattattattcatagtttttcagatattttttaaggaaaatttcttcaatttttcttaaaatccctcattaaaccctccaaaatctcttttccaaattgttttttccattttgaaatgctctttctatcaattttcatcattttgcaattcccctttgattctttttttggattttctctttttatttgccattatttttacattttttccattttcggctatttcattaccacgaaatgccaaattctttctttaatcttttaattacatcataatttactccaatttcttacaaaaagcggatttggcaaattttatagaaatttataaatttcatcaataaaaaaaatggcataatcccgatcctgtgctggcacaggattcgaggcagtaggtgcattaatttgcaccccgctgactaattatgagtattactgttaggacatttttgtaggagggcttgtaaaaaaaaattttttttaatagaaaaatataatataataattcagatttcaaactcactcattcgtttgttcgttcattcattcattctattaatggccccaagtaaaaaaactccccccccccccccccaaaatgctccgtaaacccaaaaaaacttgtaaaaaatgtgagcgttgccaagaagtgcggttaatggcagaaattaaaaaagagaatgtaaaggcaggaaaatgccggggagagcatctcccaggcatgatcatagaagcccacaaaactaagcccacacaattcaaagaattgtatacggatggggatggtgtgcttgaaaaaatattggaaggtattccgagcccctacagccggaatatttttaaaaaatattgaaaggtccagcagttgtgcattgcgatgaatgtgccaatgactttgcttattataaagatttgtggaattgttcggggagtatggactgtggatggggtccgggcatctcatggattggagaagattgtttagtattgcattttataaattcttttccattgtgtacatttattcctaaaacgaaaagattacaaaatttgtttgtccattaactgcaaacggtgctctaatttcagtgaggttctaaatatatttttaaacaggaaacattactgacaacttgccctcggattcgacattgagtgcgttgtgaaaaaaaataaaataaaaaagctaaaatggattatttttttaaatgtgcaaataaagtgacttatgcaataggcattactgccttttattacgncaaaatagttggcctttttttcataaaaaaaatcgctaatcattgtaacataataaacttagccaacagcaaatagaattatataaaatctaatcatcatcattatcatantaatttnatgcattacagaatttanngaaaatgtt

SEQ ID NO: 5051 - DNA, 2172 bp, Heterodera glycines
ccccccccccccttcagagcccgacaaatatttcacaaaaaatttgaaaaattgactagagcaatcaaacgctaacagacgacctaaaggaaaaaaatccccgaaggagagaatttaattaaatcaattccttcgggggtccgtgccgggtgccgcggggtaagcagtgctggtttcgtttcatcacggccccatccttttgactagtcagccagcgttgcttaacttgtcagatcggacgggtacgcatgattccattttccaagcaccccaccgaaagttgaacgaaataaccaaaatataaggaaaaaatttagaaacatttttattcttcatccttattcataatataagcctaagaggaccttgttaacatgtaaataaaatttggtgcgtttcagagcacgttctgaaaaaattaatatgaattaatttggcaaaaataaaaatagaagactcaggattttgaaatttttataacaactgatgacaagctaatgtgataaaacaggttaattcttttcctttcagtatcactgcaaagtttggggcgcttctgataagtttctgaaaaaaaagttaagcctaaactttttggcatgtttaaaaaggaattaaaaatttttaaaatatttaaataagagtcagagtgccttattcaacttgtaaataaattttggtgcgtttcagagcagtttctgaaaaaaaagttaagcctaaacttttttgcctgtttaaaaatgaattaaaaatttttattcttcaccatttttcataatatacgcctaagaggaccttgttaacatgtaaataaaatttggtgcgtttcagagcacgttcagaaaaaattaatatgaattaattttgcaaaaataaaaatagaagactcaggattttgaaatttttatattcggtctccccataaatctgggcgcatcggttcggggggactgccccgaaaacaaaaaaatcgattttttcaagtgtccgtttggggtactcaaacaattatggggagcaaaaatctatttttttttatttttctattctttttttttaaggattcggtctccccataaatctgggcgcatcggttcggggggactgccccgaaaacaaaaaaatcgattttttcaagtgtccgtttggggtactaaaacaattatggggagcaaaaatccaacgcagaattaaagtacaggctatagggaagctattcccgaaggattcggtctccccataaatctgggcgcatcggttcggggggactgccccgaaaacaaaaaaatcgattttttcaagtgtccgtttggggtactcaaacaattatggggagcaaaaatccaacgcagaattaaagtacaggctatagggaagctattcccgaaggattcggtctccccataaatctgggcgcatcggttcggggggactgccccgaaaacaaaaaaatcgattttttcaagtgtccgtttggggtactcaaacaattatggggagcaaaaatccaacgcagaattaaagtacagactatagggaagctattcccgaaggattcggtctccccataaatctgggcgcatcggttcggggggactgccccgaaaacaaaaaaatcgattttttcaagtgtccgtttggggtactcaaacaattatggggagcaaaaatccaacgcagaattaaagtacagactatagggaagctattccggaaggattcggtctccccataaatctgggcgcatcggttcggggggactgccccgaaaaaaaaaaatcgattttttcaaggggccgttttggggactcaaaaaattttgggggaagaaaatcccacccccaaatttaaaaaaaaaaatataagggaaaacttttcccgaaagggatttgggtccccccataaaatttggggccattgggttcggggggggatgtcccccaaaaaaaaaaaaaaaaattttttttaagtgtcccctttgggggaatcccaaaaaatttttgggggagaaaaaaaaccacccccaaaaaaaaataaaaaaaaaataaaaggggaaaaattttttcccgaaaaggtttgggctccccccccaaaaaattttggggggggggctgggtgtgggggggggggggggggccccccccaaaaaaaaaaaaaaaaaaaaaaaaaaaa

SEQ ID NO: 5052 - DNA, 2604 bp, Heterodera glycines
  unsure (1)..(2604): unsure at all n locations
caaaaatccaacgcagaattaaagtacagactatagtgttgctattcccgaaggattcggtctccccataaatctgggtgcatcggttcggggggactgccccgaaaacaaaaaaatcgatttcttcaagtgtccgtttggggtactcaaacaattatggggagcaaaaatccaacgcagaattaaagtacaggctatagggaagctattcccgaaggattcggtctccccataaatctgggcgcatcggttcggggggactgccccgaaaacaaaaaaatcgattttttcaagtgtccgtttggggtactcaaacaattatggggagcaaaaatccaacgcagaattaaagtacagactatagggaagctattccggaaggattcggtctccccataaatctgggcgcatcggttcggggggactgccccgaaaacaaaaaaatcgattttttcaagtgtccgtttggggtactcaaacaattatggggagcaaaaatccaacgcagaattaaagtacagactatagggaagctattcccgaaggattcggtctccccataaatctgggcgcatcggttcggggggactgccccgaaaacaaaaaaatcgattttttcaagtgtccgtttggggtactcaaacaattatggggagcaaaaatccaacgcagaattaaagtacagactatagggaagctattccggaaggattcggtctccccataaaattttctggaaataagcttaatagggcctagttaagctgtaaaaaaaaatttggagcgatttgaatgagaatagaaagagccaggttcgatgaagttttggtaagccaaaaaaaaatccaaacatttaaaaatctataaaaaatttaaaaatgagaattcatgcgagattttctggaaataagcttaatagggcctagttaagctgtaaaaaaaatttggggcgatttgaatgagaatagaaagagccaggttcgatgaagttttggtaagccaaaaaaaaatccaaacatttaaaaatctataaaaaatttaaaaatgagaattcatgcgagattttctggaaataagcttaatagggcctagttaagctgtaaaaaaaattggggcgatttgaatgagaatagaaagagccaggttcgatgaagttttggtaagccaaaaaaaatccaaacatttaaaaatctataaaaaatttaaaaatgagaattcatgcgagattttctggaaataagcttaatagggcctagttaagctgtaaaaaaaatttggggcgatttgaaagagaatagaaagaaccaggttcgatgaagttttggtaagccaaaaaaaaatccaaacatttaaaaatctataaaaaatttaaaaatgagaattcatgcgagattttctggaaataagcttaattgggcctagttaagctgtaaaaaaaatttggggcgatttgaatgagaatagaaagagccaggttcgatgaagttttggtaagccaaaaaaatatccaaacatttaaaaatctataaaaaatttaaaaatgagaattcatgcgagattttctggaaataatcttaattgggccttgttaagctgtaagacacccaccacttttgcacttaaaaaagaaaaaatttgatcgttcgataaataattggtaagccaaaaaaaaatccaaacattttaaaatctataaaaaatttaaaatgagaattcatgcgagatttttctggaataagcttaatatggcctagntaagctgtanaaaaaaatttggggcgattagacacccaccacttttgcacttaaaaaatttcaaaaaatttgatcgtccataaataatttgtaattgatcaggggctcaccaaattttgcagagatacgtatcggaacactacaaaagattactaattttcctagatttattaaacccggtgaaaattttttgcacacacccaccactttttcacttaaaaaaatttcaaaaaatttgatcgtccataaataatttgtaattgatcagcggctcaccaaattttgcagagatacgtatcggagcactacaaaagcttactaattttcctagatttattaaacccggtgaaaattttttgcagacacccaccacttttgcacttaaaaaaatttcaaaaaatttgatcgtccataaataatttgtaattgatcaggggctcaccaaattttgcagagatacgtatcggaacactacaaaaccttactaattttcctagatttattaaacccggtgaaaattttttgcagacacccaccactttttcacttaaaaaaatttcaaaaaatttgatcgtccataaataatttgtaattgatcagcggctcaccaaattttgcagggatacgtatcggaacactacaaatgcttactaattttcctagatttattaaacccggtgaaaattttttgcagacacccaccacttttgcacttaaaaaatttcaaaaaatttgatcgtccataaataatttgtaattgatcaggggctcaccaaattttgcagagatacgtatcggaacactacaanagcttactaattttcctagattnattaaccccgntgaaaa

SEQ ID NO: 5053 - DNA, 3347 bp, Heterodera glycines
gacgccaatttgtgccacatttgtgctccattttctcaactcatgcgtgaacaacgggatgtcattttttatttttttcggcaccatccagcacgcatattccatcagttcgggcttcattgtctcctcattattcaatgctgtctccggcgcgctggtcaatttgatcattatttagtaagttcatcattaatgaaaattagataattatctcttttaaatattatcaaatatgtttttcaaaattgtttaaattaaaaaaaataatgtttatataaaaaaatattcagattaattcttaaatattaaataaattaaacttaaatttataatatagtaaactataataataaagatgtccctagaaaacagtgaactttttaactaaataatgattcaaatcttttgttgaaaaaatagaaattggaatgttggactaattatttcttaacgaatttttctttgaaaaagcccttcaaagtgcgagtttttcgaaatggttaaatcaattaaagtcttttttttagaaacagctttttcaaatccgacagttcttagaaatgattaaaccaattaagtacagtcttaaaagcggccaacccaacccaattcagtacaacattcctagaaacgatggacatttcttagaaaatgggtcatccatttaattagttcctgaaatacaatgccaatttgagtccttaaaaactatcattttttatcgtgaaaatttctcaatttaagccatcatccagtgctgaagaaaaaggccaagaaatggttgttgcgcattgttcagctgccaaaaccccgtgtggacgatcaaatgcttgcaacaaagcgcttgagtcaaccgcgaaacatttatggccaacatttgttgaaccgatcggagcgcgaaaatcatttcaaaatgttgcaaaaccagtggatgcaaaccagcattgatgtggccacaaattttactagtgatcagtaattattgtcgttcattggtgtggtgttttttttggttttgtttatttttacgtcagagatgtaatgatcaaaaaactttcaaaataataatttcgaggcttcaaaaattttcggaaactcagaatttccgctacatacctgatgtacagtaagaatttcattttacaaaaaacaaattttcatttgtatgtatttttgtgtacatatgattttttgcttttcgtttcaaatatttaaatttttctatggctaagattgtatcaaaaatatttttaaaaaatttcctttttaaaattaaattttcaattgaacaatttgtctaacaaattagttattcgaagagtatattttagtatttactctgaattatgaatttaaaaagcttgatttatatttgaagaaaaaaatagaatattaaaatattttcgatgaatcactcaaatttgattttatttctctttattttatgtgacaaaagaatttctctcattttcaatttcttgttgagtgaatgtgaattttgtaagtggttgtctattattgtgttcttgtgagacacatttctccgttattgtcaccaagttgaagtatatacaaacataaattcattttcccatatttaaatctttacttttcactattatgcacaattttttaatgcaacaaaaaataaagttaatttaattgaattatattatattgttattttattattttgaaacctgacctataagttttttttgattttttttttgatctagttttggtaactaatatggatttaggttttttacgacccctttaggcttagaaaaaattaatccttatttttgtccggttttcaaagctaatttattttattttattttcaagaaacccttttaaccaattgtgttttttttatcttcggggccaaaagtgatcagaaattttagaatgacatttgagtaataactgttttttgaatgtcagcaaaatacacaatctttggctggaaattttggttgattttttctgatcagttttggtgctggagccgaaaatttacaatagcccatgctatactcaatcaaagtgattttaaagtgattttggcacttacagttcgattgctgtctattaattgtgcttattttagcgtattataatttttttgcgctattttttttttttgaaaattatcaatttagacaaaaaaaaattaacaattagtaataattttaaagcaaaatcagcacaaattaattctttttaaaatgagtgatttaagtaattttgcaaccatcataattgaagtcgtgctgtgcttcgttttgccggtacaaatttaaaagaatttttttatttaagtaatatttttagcccgttgctattcttatccattcgggggaatgcaacaatcacgcactcatttcaataatactctggtattattattttttttgtcaaattaaataattaataattttaaattttttaatttatttagttttttgttgtggctgcccgctgttcttcacgcgctttggtactgcttcttccgttgaatgagcgaaaagaggaaaataatattatgatttcttcaaagtcaattttattttttgatgcctcgttaaatttaatataaatttaaatttattaaaaagaaaattttttctttatttgaacaaaaaaaaaaaactttttcattttattgcatttttattaaggatttttccgtaaatccataaaatctacgccaaaataacgaaatatgcattataaaattaatcttagaagcttcaaaccaatataaaaacgcgttttttgtgcttatctgtgagttattaaggtgcgcaaaacaaaaaatggttaatgaaccggttaaataacagaaaaattatttgtgaacgaattaaatattcaaattaaaggggaaaaatgcaaaacaaaggtttttgaggctttttaaagcaaattctcggattcgagacacgagaatggaaacgaaaaggtgctaggtcgtttcttaaaaaccgccacattgggcgtttcttaaaaccgccagggcgtttcttaaaaccgccagggcgtttcttaaaaccgccaactcatatgattatgtatgtatatccgttaaattaaatatacaataatatctattaatttttatttgttgtgcaagtaagtgtcagccggaaatattattagtctagcagtgacagactaaaaatctttattaaattaatttacaattatttacttaatttttatttggttgtaccaataggtgtcaccaggaaatatgaggctggtagaattattacaatttaaagggcataaatagctaaatatcaattgcatacatatattataaaaaaatattattg

SEQ ID NO: 5054 - DNA, 3955 bp, Heterodera glycines
aattggccgaattattgggacattccaaaacgatcattagcaaatacaaatcggattttaaagaaaaataagatgctttgaatacagaagcgaaactttcatttttttaaaagaaaatataaaattattcattaatctcgagaaatttttacaaaaaatcactttttcgaaaagtcctatctttagggggtcatcaaggtcaatttagctgatgggggtctgttctaatagagttttttggaaaaatgactctaattatggacataataccaaatatgaacaaatatggcgggctaaatcgcgaaatatggaaatagaactccgtccaagaagcttcaaagtaagcttaaaaaaattacgtacgcctaccacattccagcaggaaaaaactatggacattttcatataattttatgccttaataatgaataatacacaaacgacagtatgattacgtttacaatatctcagtgtttgtcaaatggtatgctgtatcctcaatttccgctaagttatgataaaagtcccaatttttgttcgcaaacacaacaaaagaaagtgtttttcctactatttagaccatgtaaaacccaggaaaaaaagatgtatttaaataaaattgctagccttaattatcagatagtttttttaggttcggcccttagcacgggaagatgggaaaaaaaactatttttaatcgaaaatttcggaaagtttttcaacaatttttgtccagacacttttctttttctccgtcactgctttttcaaatttctccaatttttcttctaattgttgtaacattttttgaaatttcgaattgttcctttcattttgaaatgaattcaaaaattccttcttccattctgtcaatttttcttcaatttctttccatttcttgccttgatcatttttataaaatgccaatttcaacaaattccattctatcatttttacatcacttaaattggcaaagtgccaatcctcgtttttaatcatttctttcaaatgatcaatcaaagggtgctaggtcgtttcttaaaaaccgccacattgggcgtttcttaaaaccgccagggcgtttcttaaaaccgccagggcgtttcttaaaaccgccaggtgggcgtttcttaaaaccgccactttgggcgtttcttaaaaccgccagggcgtttcttaaaaccgccaactcatatgattatgtatgtatatccgttaaattaaatattcaataatatctattaatttttatttgttgtgcaagtaagtgtcagccggaaatattattagtctagcagtgacagactaaaaatctttattaaattaatttacaattatttacttaatttttatttggttgtaccaattacgaattagcaattttatattcgaaaattttgcagttgataattgttgctataaccaacataaataaatatcagaaacgttacgattgtgatattaaattttgcaattgccttaatgaatatcctaattgctttcaaacaaaagtctgttctccaactcatatcttaaatattttattttttagaatatattatgctggtcagttcatatttttggagaacgttttaaagaaggataaaaataattattttattttaccgtcactagatatgcatatgtattttaaattttttattgttatgtaaacttctaatatatatatatatatatatatatatatatatatatatatttatatacataatcatatgagttggcggttttaagaaacgcccaaagtggcggttttaagaaacgcacacctggcggttttaagaaacgccctggcggttttaagaaacgcccaatgtggcggtttttaagaaacgtcccagcaccaacgaaaacactatactgagaaaaaatatccgggaaccgcactttctttttatggataatatcaatcccgcattccgtgttttcaaatgctcatccagcttcatccatattttattatgtgctgttattagatgattagagcctataagtcagtcactcagatttgtttgctgcgcaacttaaatttatagaatagaaattttttgggattcctgtacataaattgtacaatctttttatttatttaaaattgcatttttaaattgtaatgtaaaaatcaatcaatgcaatcaatgcatacttctaaattgtatagtaaatacgtcatttgcacataatgcgcttcattaaaacacgtcaattaagcctactctatttgttgaataatgccaattgtggccctctcaaagtgcctctccccatgtttcatgccaattttgcctctccccacaatgatgccaattttgcctcacgccctctctatctctccctttctctctcactttctctctctctctctccctttctctcgctctctccccgatgccatttttgcctctccccatgttttcgtgcaaataattttgcttctttgttgtcaattttgcatgcctctttcctcttgtttcatgccttatttcggccctctcattataatgccaacgtgtgatttattgaaaaaattctctgcaatataattttgcataaaagcaaatataattcaatttggcatcatttttttgttgctcattttggtgatattgaaagagattcttttccttacaaagctttaaaatagtaaaaaaaaatttagatttttttttgaaattgaaatgttttccacagtttccattgcaacactttttttgataaatgcttacagtttctattcaatcacggcagaagaagcgaatattggcaacattccggcaagcaatgacaaaatgccaaaggatttggcgagtgatgacaaaatgccaaaggatttggcgagtgatgacaaaatgccaagatcaggtaaagtgcaaagcgaaaggggaatggaaacgaatttgacaattggaaacaaaaagccaagcaatgacaaaataccaagatcagctcaaataccaagcgaaatgggaatggaaacgaattcgacaattaaaaacaaaacgccaagcaatgacaaaatgccaaaggatttggcgagggatggcaaagcgctgcaaagcaaagtcaaaacgaaaaagaatttgacaattggaaacaaaaagccaagcaatgacaaaatgcaaaaggatttggcgagggatggaaaaacgtcaaggtcagataaaatgtcaaacaaagacataacgcaaagcggaaataaaacggaaacgaatttgccgaatgaaaataatttgccaaataatgacaaaatgctaaatgacgatacagaattacttgacgaattcaaaggtatttttggtagaatttttttttaagtttaaatttttagcattactgaagagtgacacatataagaccaaaggagccaagtaaatttaataaataatattcaaaataaatgtcaaataatttaaatttattagggtagggctccgatcatttggggtgagaaaagtcggagttcgtcggtgacatttaggcgagatcgggtggaccaaaagggtctgggtttttcaatttttgccataaattaaaaacaaatgcagccagaaaatttaggaattcttaatgaaattatatatgttttagacttttgaacaaaaatcaaaaatttgacaaatatattttaaataaaattttgaattttgccattttaattttttttggcaaacggaatggaaccccaacaagaattaattaaatagtgtaatacaatactaacaataagcacaatattatcgaaacaatactcggcgaaacaaaattatattttgatcaaaaactttcggccaaagataattaaaagcgaaaaattgaacaaactttttttcttttctctccgtcgttttcgaattccctaattgccttaattctcgggggcataggccttatccaaatattaaacaaagctcacttttgaatttaagcgttttgg

SEQ ID NO: 5055 - DNA, 1516 bp, Heterodera glycines
gcacggtcgtacgagccctctggccttgagaacaccccctccgtatcttttatcgcctcgcccccaacactcgccgatttatcagaaaattttatacggaccgtcgaaatcaccgtttcgccgcgaaaacgtccgctttcgaaaagtccggtagcctaaacgattctctcttccgacaaagaaatagaatttttatccgtttgcttgttaaagttcaaaacaaagaaaaatcatttaaatatgtacaataaatataaatcattttgttccctgaggggttcaaagtgtcatgccattcttcttcatcttctgatcagatcagtcaactcatccggctattgttttcacacggatgtgtttaggccgagcagttggtgcctttcctcttccgttccgccggcaccgcgggttggcaccgccgcggcatggcgcgccctcagctcaccgccagccgatggttcgggcactgcagcgcggcgcggtgcgccagtaagcagcatcggatgcgctacgccggagccattttttgcagcattaggcgaagtagctagggaggagctgaggccactcttcgggcgcaacgacgtctcagactcgagactcttgagcaaaacggcatttttaaaatcatccgatcagtcagaacggacacaaaaacgggagttttgttcggttggaatcggggatgttctgggttcccgagacccgatttttccgcgaccctaaacccgtagactttttcccgacccgaaaaaccagctgttgggaccctcgggcacttacccgagggaattgctgtcgcattggtcgcccaccggcggactgttcttgttccttgcgacgacgaactttgacacaccaacagcacaaaaagcagagaatcagcacgagaatggcaccgacggttgacagaatgcctgtcagccaggtcaactgaatgtgcaaatgtaaaggtgaagttgactggccaattcaaaagtgcatttattgggtcattcgcaaaacggacagaaattcaaaaacttaaatgccccaatttaccatccgaatttaaatgttcaaaatttggtgctgcattgtaatagaaagtgcactcaccatgttgtccatctctcgcgaacggcaccacggctgggagcctttgttccattcaaaacgccacatttgcggaaagttgtagtccaccacttgggtacctgaacttttcataaacagggagaaaccttggcacatttctctctagttgatcacagattactttactattttctgtctgtctaattctacctgtcactttaatttggtactttgaattagggttgctccccgtccccgagctccccgacatttttgggcctattccccgccccgacccccgacatgtcgctccccgaggtccccggcccccgacattttgcccccccccccccccccgaggggtcggggacagggacggtcccaggattttggcttgggggggggcacctccccccgggcgacgaccaagggttttttt

SEQ ID NO: 5056 - DNA, 1932 bp, Heterodera glycines
ttttgatccaatcactgtgaccgttattaaattatcaattcgaatttggcagtataaatttcatcagattgttcctgatcagtccctggcccaatcaaaggagtcaaaaagctcatatcccatgttttaattgttgatcgtatttcatcacatttaaactcggcatcccctttgatccagtgagtttggaagcactcgaaacgcgcaatgtccccctggaggtagccggaggagagtgccggagttttgatcagatattccgggtactcaatgttgatcgggccacaactgttatctgcgcaaattagggacaagacgattacaacaaatttggcattccgtttaaaattggaatttgcgccaaaaatgccgtacaattttgaatggcggaccaacggtcatggaagaacgcgttccacgtgtccttcacttcgttgcccaacacttccgcgttcagcagcgtgtaatcgtacagacaaggcacattgtcaccacattcttgcaagatttttccgggattgtccgggcattggctggcccagtcccagtacatttggccttggtacggctgaagaccaactgaagagttcaagctgtactcagttgggtatcagtagcagcaggagacagcccgaataaggtgacactttgataggtcatgtgaaatattaaagaaatgatttatcatcgagagccgagaaatggcttcaataatgagaagcctctttggccccaagattaagaccgagaatttatcccgagaaccgagacggtggaaatgacgcgaagtgtttagaccaagaattagtcccaaccaaagggtatgcgaaatttcgtgttgttttcgtttcgtcctcttttttcgtcactttttcagtttcgttttcgtccatcaaaatattttcgtttcgtttttgaatttaaaaattttaaattttcgtccttttttcgttttcgtcaaaatttttttttgtttttcgcatacccctgtcccaacggcctttattggcaatatttagactctggtgccctccccgtcaaactcacttgtctctcggttggccaaatcgttgcactgctgcagcatttgcattagcacagcgccggtccgaggcacaaaacgatactgaggcctaagtcggatggatcatttgtccgttccccctcatagtttgtttatttttcccctattatttattacgtttcgtagatggccgccgttttgtagatgggctcacttttgatggacgcctcggggaacgcctcgaacttcttgtcctcctccttgctggtggtgaacatgttgtcggtggggatttggaattggttcaacgcctgctgctgatagtccgtgaagcgttcgccggagcccgggattcgatctgcggaaatatgccaatgtcaattcaaaagccacacacaaaagatgccaaaatttccttttcctgttacagtaaccggacaattacagtatcccaacaattttgctaactgtataattgaaaaacctacagtagttgatgatctgttgccgtatcgcctccgagttcacttcgttcagtgtcagggtcgagtaaatggagccggtggacgtgtcggggaacggcctcatcaggccggacacccgtggcaaattgtaacgttggcgtgtctcctgctcccgcgttttgtccccgtccggttgctgtcgaaattcaaaattttgaacaaacaaattgccacactcctcaaacttaccacgccgtactgcggtggcaccgacagggcaatgtccaacatgcccatggactcttggtacatcggcatacggtcaatgtccaccgcgtaggactctctgatgcggaccccgatctgagcttcttccagcacaacgtacacctcgggctgaccccgctccacattgttcacgtagaccagcacaccttaagagag

SEQ ID NO: 5057 - DNA, 3646 bp, Heterodera glycines
ccgaggtacggtagcggaaccggcgcgtgtctccgcgtgccatcacatgcacgcggtcggtgccggtggcctccagcgtaattcctatctcatgaattgtaattagccacctgggcgattgattgggcggagcaattaccggtgattacagtggcgttggtcggctgcaccaactgttcctgggacaggtagcggccgagcatgccttttttttgggggggggggaacatattcattttttccccccattcccagccacaatttgtcgtactgaaatcgacgcgtcggttcgggtagcgctcaagtcggatttgaatgcgtacttccgggttgttcaccgtcttcgggatgtacaacagtgtgtacacaccgggctcgttgaacacaaatttgtcattgtcaattgtgtggaaagtgccggcgcccatcgcttcgcctgcgcaaaaattatttcaattttttaagagattgaattcacattgatattcggcacttaaagctaaaaagaaatgttttattaaattcagggcggcccaggcctgggtttttcctggatctgttgggcccgttcccagccattttcgacaaaatgggtttttctattttttaattcagatcaaacatagaaatcaatcaaaattcaggtacagattaggcttattaggcataaaaaatctgaatttcttggataaaattttaattttatttcaagttattaaaaaatgttaattattaaataattaaggaaaatataattgtcagttagataatttagatgttcctaaacaattaacagatttaaaaaaattaaaactaatttcgtgaagtctaagcctggatccaggccttgacaaactttcatatctcactgtttacaaatataaaatcaaataatatttcagtgcaatccgtggcgcttgattttctattgttttggcttacatttcaaataggcaaatacacttttcttatattggtgcattaatttcatttcaaattggcacaaatttccccccccccccccccaaatgccattaaatgttgcccatgtactaccgttttgccttctgtgcttaccaatggccggcggttggtactgttggcatccgctgcttggccgccgccagtagaacagttgacagcgaaacttggcaaatttgcagcacagaaagtatggcatgtagtcgtggtgaaacgcggacagtccgggaacttcgaactgtcccatgtaaggggaagtgccgaattcgtaggcacgcaacggatagcccgggttgtacggcgtttcttcaatcactttgataaccggctaaaaaaattaaaaaacatgatcatttgatcataaaggcccgaaggctttttttccaaaaataggataattaaaattttttttacaattattttaaaacaataaatttatcaaaagttaaaataaaatattttttcatgtttttgttcattttctggaacaattccgaatgccgagctctttcaaagatcaatcccatctctctgatcaccttttctttgctttaaaattacgcttttatattaaattctgctaattaattgaaggtgagtctaaattgacctggtaagtggtctgcatcagaaagcccttttcgtcataacagcacacttggccataatgcgtgggaaaacggctggacaaatgaaaaatgttttggaatgtttgatcaatgaattttcattggccatttatgggcccattaggtccctaatagtacttcacccactttccctggttcctctcccgtccataataaccgccgtaaccgaatggcccagcgccgccgccttcggcaccaccgggaggcacgccttcgtcgcggaattcacggccaaactcgccgtaggcgtagccgtgaccgtaatcaaaatgctggccagaataggagccgtaaatgttggaggcctgtgaacaaaaaaggatttatcagaaaacaggaaaccggaaaacaataaataatcaatgatcagccgatcactctgaaaaaggtgatagaaaaaggggtgattaggacaaaacaatataaatgggaaaaaaagaagggactgatcagacagaaaacgtagcaaaaaaagagaacatatcaatgtgggggaaagataagaaaatttatcatactgattaaaaaaaaactaagatcaagtgctgatcagaaaaacatttggataatcaattggaaaaaataattttttaaaagtattgattgatcgggcagaaaaagttgagtgatgtcagctgataaaataaaaaaaccagaaatggtttttagcttcacgatctctgatcagactgacaaagaatgaaaaagaggctgtgctgatcagcgatgacaaaatgcaaaaacatacgctcatgtagcagtttttggcaccgatggtcgacgtgcaggcgatgtcgcggaaggtctgcgagcagcgcgggtgcggcatgaagcggcccaagtcgaacttggcctggtgctccatgcacgggcacgacgcgttggtctccacgtcgcggatgaaattccacctgaacagaatgccaataattttttttaacccaaaaaatggcacttactgtgccccgtcctcatcgtaccaatcgtggcacatttccttggccttttgcgaaatgaacgcctgccgtgagtccgcctcctgacgtgaaaaggttgtggtgtcgtacatggggttgccgctggtccacaaccaatgcagtgagatgggtgccgacacaagcctatttgtacagtatttatatcgtattaatttttcggtatccctcaattaatgatctcgttccgaaagtcgttaggaaatcacaaaatttattgctcgatggcacggttttaggaacatgattttaattaccataatctcctgatagttagtcacacgtgttgtattagattagaggattaagtttatttggggaatcttgagacccaaattttagcattttaaatatcattttttggcttaatcaggcatgatatcctttaagagaaaatggcaccaaatttcttgttatatactgtagaatataaacggtaacgcacccgcagggttggactttaaccaacggcccttccaatttaggtagctcaataacttttccggccacggtaaatgttctactggtaaccgctgcgctaatattcgtcccacccacccggacagcagttgcggtgccacaaatgcttgttcgttggtgcgcagcggtgccaacttcaaatagcccactcggtaggtgaacagttcgttgatgcgctcccagtcgttcaggtaccactgctccacctggttcaaattgatgcgctctttctgcgcattccaccgatattcgtaggtgttccgattggaataggtggccaagcggcagagaacgcgatgttcgggccggaattttttgatctgaccgggacaaacgatttaattttttgcttaaatatttttcggaatttataaaacaaatcacaaaatcagagtcaaaacaaaagccaaataattatagctagaattttgccaatttcatagaacctaatcatcggaatgggatttcaaaaatctgccaaaaaatttcggaatttccttgcctggaatcacatcccaattgaagcatagagcaaaatga

SEQ ID NO: 5058 - DNA, 7237 bp, Heterodera glycines
  unsure (1)..(7237): unsure at all n locations
ccgatgtgtgggaaggcgcaactcgncgggagaaagtcgccgaagtcagcgaaaggaggggcggcaccattctattcggcattggaacgaactgttgttgtgttggcaacgtcaacttctcagtggaatcgttatgccaaacaattttggaaaattcgctttttgaactttgattcgttgactttgaaaatctgtttatttttgccgggtcaccaaagtgatcattttcgtgacagttttgcaaagagtcgctaaggggtcgcggtcggacggaatcgaagctgcgagtcccaaaaagacgaaaaagtcgtcggtcggagtgctgctgttcctctgcagcggttggttcagctgtcagtgttagccttggggaactgaacgattgataaggcaaagttggacaaacacgcacttggcattctcatggaaatgtcggctgctccgttggcatttctccgtcggtttccgtctgtttttccgattgctcaccgactcccactgctcctcttcttcctctatctccagcgtcattcgacgttgttttgccactccgtttgctgccaccgcaatttggtatgcttcgacgctctcctgccgttgaaacccggcgaatgccccgcccatcggcgtcgaatagtgcttttcccaagtttcatcgaggccgccttccttcgttgaaatgccgcccattccattgagtcgcggcacgtccgttattcgaggcaccggagagggaagcatcgtggctgccaatttagccgggtcccaactgcgattgtcgtctttggcacattgtcggagcacagattcgttgcgtccaactgcaaattgtacggaacaataagcaagcggcggctcagaatgggcacggcgccgttttcggaagaggcgaaggttttctttttcgcacaggacaagtgaactttcttcgaaacaaccacacataacgccatcaaaagtcacttgagcacattcgccaaaacattttcccccggcacagcgaaagccatcaaaatgttggccaacaacttccccattcttcggcatttcctccagcgagtggcaaaagagacggcgaagagtttgatgaaaggaagcgcaatggacagagtcaccttaagacaacgcaacactcaaacgaaagccaacgaatggggaaaagcaaaggaaaggaataaatgacaaacactccgaagaaacgcaaaagaaacgactgacaaagaaaagaagggaaagaggcagaaacagaaaagagacttaaaatggtctttgaaaatgcgaccgttgtggagaatgggctgtgtaaagaatgaagtcggttggggcactgccgtcgttggcagaggcgcggccgaaagtgccaacggtttaaaggtcgccctgggtgaatacccgcactgtgccaatatttgcccgaggtcgaactccgtcctttgttgccccgccgcgttgtccgcttgtcggccgctgcttgggctcggtgtgtttctgttgtgctccgattggtccgtgccgtggtgtccgtgatggactatcagttgcccgcgcagtgcacccccattgattgtcaacggaaagtgcgtgtttccccgtgccaatgaatgaacgtcggcaccgatcggagcaccgcccgttttgattcgagcctagcacaataagcctttttctaatcaggcatttcgacagggagaaactgacaaagacggggtttccgttgaatgtttttccgagtgtttggagatggaaaaatgccatttgagtgtccttttcagaggcaaaagtgacgtaccaactgaaaacatttgggtgaatggaaatgatcagcagaaatatatttgtctttgctggaggttccgtcccatcgcaaaaccgaaattccttttccgcccgggagagtgaaaaataaattgagccacgaggactcaaattgtgtcatttggcactttcacctgttgttgagtccgtagaaaagagttcggaagggtgggcatccgtcgccgaacatcgcttttacctcctaaattggtccttgcttcgagactgatcagtctccaagcccaacaacaatggctaattaattgttggtccttcgaatgcactgactttttcgtcggcgtctgcgggaatctcgcgcaaaatgatggtgcaccgtcgcgacaatggcctcaccttttgaccactctcatcgacttgcaattggggcgaagctgaaagtgtaattaataattacgatatttacgatttgtaaaatgaaaaaacggaaaaagagacaaacatttgagaatgtccacgattaggttcaagtcggtgctcagttgtgacacctttgagaaaagaaaccgtggcaaattggaaaaaatgggagacttttgggaaatttgcgacgattttaatgggcacgtattggtcagcgtccatttggcatctcagataacggtcgttgaccaggttttcccttcaaaacgaccactgatttcgcaatctccgaagcggacctgctgaagtaatattccaactgtcgtcggatgcgttgtcgcaattgttccgggctcatcggctgctcgccgacgctcgacggcggacgcgtgtcgggcgtcggcacgcgttcatcgggcggtggcggcggcacgcccataagttcttggcgacattcagcggtaaaccaccagggaagcattggcaaaggcgagttggaagcgcaggtggaaagaccggcgaagggaaagggacgcagcgcggaaggaaaagcgggcggagaagcggaagccgactgaaacaaaaaccattaaatggcattcgaagaagcattgaccgtttgagagggccttctcatggcaaatcccttcagggcgtcgtcgacgtcactgagctgaaaagggaacaaatggcaaggcattcactgctgtaaatttatgcaagtgttgtctaattggttcatctcattggatttaattatacttttaaaagtgcgaattggcacattaaaggcatagacagcattcaaaaaaaataaaattaaaaaataatttttaaaatttgcaaagacaacaaaagttccccaattcgcaaaatgctctgatgagaggggggggggggggggggtatttcacaaaagccaatcttgtccttccctgtccatgtatgtacctacaatacatcgtagggtcggggtcattttggcgcagacaagtttaaagattcataactttttttaattcgaccaaataaaataatgttgatattaattagggcccggatttttatgtgctaaaaatcctgaaatatgtaataaaatatgtgctaaaaaatgctgaaatatgtgctaaaaacccccaaaaatgccaaaatatgtgctaaaatatgtgttaaaaattgaaaaaataagtgtgtttttgcataaaaattcccaaaaatctcattctttatcatttttagcccatacaacgcaaatcaaatacatttcgaagtgtttggggtaaaattgtctttttttgataaatcatttctataaattgaaagttccagcagagaacttcgaaatccaatgacgaattaatgaattcgagatttcattagtttctacaatcgaagaaaaaattttttaatttgaaaattatgttaataattaggaaaaaagtcgatttttagggggtgtatttttcaattttcttgtatttttattgcaatttttctcaaaaatgccaaaatatgtgcaaaatatgtgccaaactccaaaatatgtgctaacatattttatgtgacaaaacgccaaaatatgtgtttttatgtttttataagtcgctctaaatcaaaaattgttcggagataatgctatttttgggcttctctcgccataactaagccgcaaaaaaaatatgtaaaaacataaaaatccgggccctaatattaatcaataggtctaaatgttctttattagcctgcaaaatttcaaaaaattatattaggttttaaaaaagatatggcgcgctgcgccaaaatggccaggaaaatgcaatttttgaggttttttggccataacttttttgtttctcagctaaattttttgaaactttgcaggttaataggcactatcaagccacttaaaatcataccaatattatttaattttgctgtgaaatcaaaatgatatagagtcttgcgccaaaatggcctgcgccaaagtggccgattcccatacatcgtatgagtctgtcttttgtttcaatttttcaaaattttaaaaatcttctatttatttttaaattattttctcttttcctcgtgttcattttttctgatgcgtcccaaccaattaataattacgcgtttctttaatccttcggttccgctcattaaaccatttttcgttgctgcaattttcacctgttgaattgtgtagcatcgtggcgaaatttccgtgcacatgaaaaaagcaccgccgtccaattcgaagccgcgcatttttaaaaagtaacgggggaaagattccccctttccttcgtatatccgttaatatcagaaaagaaaaaaatgagaaaggatgcttccgctaagaagcttaacagttctattaatgaagagaatgcttctgaaagtgaatggatgaacaaaggcaaaaaaggagttgagtagagggaaaagcctacacggacagcatagagacagaagcgaattgacttttaaagaatacagaaaaagagagaggaaagagagagagagagagagacgtggggagggtgggaggatgagagagaatggagaagaaagagagagaggagagagacggaaggtgagggagagagaggagaagagagagagagagaccgatggtgcgagagtgagagaggaggagagagaggaagactgggagaaagagagagagacggggggagggtgggagaaaggaaagaaatagtcgtttcatttaaaaccctttaaattgtgaatggaagaaaatgaaagtgagcatggcataaggtcgggacttgcataacatcagcacgaccgaccgtgaaaacagtcgtttttccttttctttttcctttgcggcgtcgtttccgtctgtccctttccatgtatgtctctgctttattcatcctctttcgtttctgttctttatatcgaacatctctttcattgtgcaatgtttaaaaaaaatacaaaatgacgagaaagagaaatttgaaaagaaaatgagaaggaatggaaagagagaaagggagagagagatagagaaaaaataaaaaagagacagggaaaaagaggaaggtgggggagagaggaggaaagagagagagataaagaaagagaagaaggtgggagagagagatggggaaagagagaaatggagagagaaaaagaaaaaggagcgagagagagagatagggaaagagaaggtgggagagggagatggggaaagagagaaaaagaaaagtagcgagagtgtcccacatcgaagtttcaatccaagttgaaaatgcgttttttgtgaatattaggtaatcctaagtcacacaactaaatacccgccctattaacacatttgctgccagttttgccaactctgcgaattcaattttgtcagtttaacctttaaccctgtcaaaaaggaatttggaggactcattgctgcggaacttatcaacatgttagaaaagaaagagtgaacacgtcatcaacacattgtcaatgacaacgaatgattcgcttatccgacggaggcgagggacgggggaaacccgccgaagagcagcagccaaccaaccggttatgctgaatatatctgcacaatcacttaagaaatgctgatgatgttttgtttctgaaaattatgttcgtaaatggaacacaattagtggagaaaaaagcagcgaaaagggaataatgtgaaaaatgggaaaagaaagcgaggatctttttactataccctcaaaagagggggagggggtgggagagggtctcttcgtcaccgccgaatttaagtgccttagtttgttccttacaattagccaatttaagcatagccggtatcattttaaagtactttgtgttgcgggcagccgcgcaataaagtcaaagttacgatgatggatggcgaaaaacccaataaattaatttttaaagatttttggccataattttgtaactaaaaaattgcagtttaatagagtttgtcaactcgaacagaagaaaagcctcgttttgaaaatttaatcggtctctcaaaaaccacaaaaaaaggcaaaagcctcacatttgttgccagcgctgcttcttatatacattgatatttttgttgtcatacatatgattgaatgaggaataagaaatattctgtggaagaaattgtgatgcttatggacgggagggtgcgcccttttgaggctcaaatgatgacttttggacgaccgttacaatcgaatgattaatgaatgctccacaaattaacgaaaagcaattggccaagggaaatgatggaaagaaaggcaatgaatgacaaccaaatgcattcgaataagccaaatatgaattcgttttcaaccatccttatttgttgcccccccccctttcacattttgttgctgctggcgacgaatggtaggatcgtgcacttttcggtgaaaaagcgcgccataaaaggtgttataacttataagcaaaaaaggttgttaatttgcatggctagacccagttcgtaaactaggagaaaccggaaaatgaaaaatttttaaatgaaaaatgggaaaatctatgaaaaattatacggcgctattttaaaagagtactacatatgtacagtcatggtcataagtgttgtcccatcatgctttgaaaaaaataattgcgtataaaattgtcattttccaatttcaacagataagtagcataccattggatagcattttttatgggctttccaatgataccatatttgcatttgtgacataaacatttatttgatttattttaccatattcacaatttgatcaaaatataggtggtcaaaagtgttgtcccatttcatttttaaaatattgcttctctggatcagcattaaaaaatctaaaaaaattcaggtaagcataactttggatgctgatcaaaaaaggtagcaacaccaagttgatcagatcactccttcatggtgatctgatcagcccattttggctgggaacgaggggtaaatttcaaaaaaaggtcctagggggttgggaaaatttttctggaaattttgagt

SEQ ID NO: 5059 - DNA, 1069 bp, Heterodera glycines
gccccccgaaaacaaaaggacaaacggcagcagcaactggtggacacaaaagccgttcaaaatgcagaagcgatagacaaagtccaaagattttgaattgaatagacgcattgcatcaaccaatgactattccgtgcatttggatcgattttgtgcaataaatatgcattttggtgaaaaatgaaattttgattttttgttcgaattcgggtccggggttcggaattggtcgaaatggatgtcggattcgtgattagcgaccccgaaaaccccctaaaacctgtttttaagcatttttaaaaattttaatttttttttgaaaaaggggggggataaactttactattaccggttttttgggtcgctgatcacgaatacagcacccatttttacaggaagtataaaatttgaaatttgtatggatgatatccttattggcaccttgcccatgagggtaaccttggtacagtaagcctatcaattctttgtccctatacagctcatgtagtgaacggtagcgctggtctgagcccggattcgtgatcagcgacctcaaaatgtatgttaaaagtatcatgtaaactccacaagtaccatctttccgttaaattgaaaaaattataatgctttttaatcattgtgctgcttgaactcacctggggtcagcagttggcccacatttgcacaaataatcggccgttttcccaaccgcgcgggcgacggcgttttgaataaatcggcagagaattcacttatcgcactcacagtttcaacagtttgttttggagaaagaaaacctccccagtttttgaccggtgaaagaaacggaagttgccgaagagaaggggagggggcgcgcaccaaaaggaccaaatcggaggaggacggcacactccgcccgaactcagtgccattgccagcggatgaactctgcgtctcatcggctctttcgtgagtcaactaaaatatgcattctcttctatttaaatagggtgagtacaaaaaattggccaaatcgtattttgtgttagataaattggatggcaaattttttattttttttaatatt

SEQ ID NO: 5060 - DNA, 1836 bp, Heterodera glycines
tgcctatttaggactggctgtttacgctattcgtttgaatagttttgttatatgtttttttgtgagttctatcaaaattggatgagtcagtcttccgatgccaccttcgtcatcgtcagcaagctgtttcagcagcttatttgataatgcagaaacacaacgtcgtactgatgaagaacgtttcatcggcgaagtggccgaggaaggcttatgacgacgataagaaaacgtagatgacaacggtgtttccgactgctcttgtgtgttgatgttattgtgcaagcttttgatgaggcagcaaggctgatgctgttggttgagagactgttgcagctgttttcgctggtcaactgctgtcaaccgctctcccaaaccttttaacggctcgctcaacgaacattgaacctggcgacagattttctgttacattcatttatatttttgggtccatgatttttgcaaaaaaatttgccgtttatatcgcatgaaaacccttcgatagaacgtaaatattttaagggatgtggctacaaattaaattccacttggcttttgacacgctgtgaaaaattgcggatcaatgtgcgtgaatcgtcgacccgagcagcttttaacagcagtgcgttgaaattctctacacttcggccttgctgatgctgctcctgttgttcccgagtgcagttaggtaataacaactctttacgtgtgatggatgcggctgtgaaagaggaattgccgccagaagtgcgagtgatggacaccgtttcagcagtatcaacaaaatgtggtgactgacggatttcagagtcacacatttcgaaggaattggacaccaaaatattattaataaggattttttaaaataaagtcgatgtagttcattgatttatgagtgagatggtggatagaacatgaggaaattggacaattaacgactgctctacgggatgaatgactgtgagagtatgaggcaaccagggaacgagggataaatgtcggaaaggccagtcggcattctcccttttcaccctctaccgctgttgctgtggccaattagcgtgaaagcgatatgagagggatgaagcgggccgcggagcaagcaatgagcttgaagagcaaaggaatgaatgcctcttcactctcttaacatgcagaaagtgaatgggataaatggcacaaacgggggagtgataaatgggggagggagcggagatgagtgtgtgtgtgggggtggacggacggttgccgtgatgacggaaaatgaagttgtaagggaattagaagagaattgacacatttggattagatacgcgcaaaaaacatttgacaaaaactaatatcgattaagaaaaaattacttggtaatattaacgcttaaaaaccaataagcaatttcggcattaatatggttcgttgcgcaaatacaatttaacgatatgcttaacaaaaaaaacagagaaaataaagtaatgaaaagaaagaacaaaaagacagtcattccgtaaattcattagaaaagggcattaaacgaacgaaaaacgacccaatggcattcattaccctatgcgaaaaggtggttgcccatagagaaaccagaaaacaggaggaaaaaggcagaaaaggaatgaaagggataaatctttataaaaagcaagcaagaaacgaacgtatttacagtttacattaatatatgtatatcaaataataaaaaataataattaaatcccactgcattaacacaaatatccatttgtattgtatgtataaatactaaatacacacaaaattaacaaaaacaacaagacctttctttgtcgaagtgactgtttgttcgaa

SEQ ID NO: 5061 - DNA, 639 bp, Heterodera glycines
tgttcatgtgttgcttatgaactgttgtctttttgcgctgtatcagctcgccttcgagactaaattgggtactttgtgcagcatttcggcagtgcaaaaatgagttgttgcactgtttgctgtcattgaccggcgattgctgcgcggagtaagccaatttcataaaaaatcggtcctttagactcagattatcagaagcaaactgttggacagatgagaaaacttctgttgtttaacaaattgacgagggaatttgccgttccttttctgtgttgtcgggaccattttaggaaaatgaaaatatcgtaaaagaaaacgagataagaaaaatggcaaaaggcggcagaatgaatttaaaattgaattcgttcttccggtcttttgttatccggaagtgagaaaagagaaagagcagatccttaacaaagcggggatgggcagcccttagaaatagtgacacaaacaaaaaagagaaaattaacttttctgacattgtcaagctaaatatgttttaatttactagtagttcaacattttaatttggacttaatattgttatctgtgtaactctgtccataataccacaatcttttgaattattaatattcatatgaaaacgaactcaaaattatggagcta

SEQ ID NO: 5062 - DNA, 2118 bp, Heterodera glycines
caaatcctacattattggtatcattggcaagcttatcatgtttcgaagctatttctaagctatcgcttcgcgattagactattaccaaaaaagttatacatgaaagttgcgaaaaagccgaaattagtcaaaattttgaagttttttcttagtaaaattttttccagactagaaaatttttaggttttttgaaaggctaatagagcatctgaagagctttcgaatgataccaacaatgttggatttggatgcaaatgaaaaagttatagacaaaaacataaaatatttttgaaaatctgtacacagataacatataagtaagtacctttgatttgactgactaacactcctgttaacccttcgtcttgcatattatttattaataacaagcacttacaaaactctcgtccatgaccatgttcatctccaattccacacattttcatcagatcctcatcctcatcatctgacgacgaaattgatcggccctccatttgattcaatgttctttgaggaaaagacgattgtgctgccatttataattagaaacctctctctatatgtaaaaaaatttttggcaaaaaattgtgtatttgaccaaaacagtgaattaaaaagaaaggaaacgataaaacaagcaaacgcaaaaacaaaatcaaaacattattcattcacagaagagaaaaaggagaaaaagaaagctaatttgtaaggaaaagagaaaagaaaacatttaaaaagaaggaatttaattgaaagaaatggagagagagagagatagaagaagaagaaaagggagagaaattaacgaaacgaaaaagacacgggacaaagcaatttcttgtggggttggaaagataaaccaagcgaaataataaaatttctataatctttattgaacataaatttaaactgtgttttttagcttttttatgaatgtgggtcttaaccaaaaaagaatgatgcgattttccttcactagactcctaatggaccctatcagccaaaaggtttcgcccaattgtaacagttctattcgaagctttctttttaggcatgtctttgcttcgccgtttccgctttactgatggcctttctgatctattcagtgtcggtaacccgttctttggtccttactggacttgcttggctctccgttttctcactctttgtcattttttccacaattgtcgcttttatctgtgctgccagttcgtcaaataaaaggtcactcactcgtattacaaacatttcgaagctcattaagatcttgaaatatttcaggtacacttttggcctggctcgagcacccgttttggccgttttctccaccactgttctagctcaattatccgctgtgtttttgacaaaagaggctgttgagcggttatttgattctgggcaacaccatcacaggtatttttgtaagtgttaagttttagtaacaaatgatcttaacagtcaccacggaggcgatgccgccccactcagtggcggagatattttgaaaactgaatatttgttctatccagcggctcttgcctcctcttccacaatgcttatagtggcttacgcactcgctaaccaaccattcaactacgtgcttaagcatgcccaatcttcggtgatccaggtatttgtataaatcgatgtttttcagtttaaatttcaatcaccaatgtttgtctaggaacatttcgctgatatttgtgcggcagtttgttatttcgtgccaggattggcccgtctgttgttgccgcgcattaactcgctgactttgttggcatttatatccacttgttgtgctattttcgtccattggtttcgtttggaattcccttgggttgactctgtcgcctcaatggtactttctttcacgattttcacttcaatggctccgctctcttcgtataccggacgaattcttttgcaaactacgcctcctcatgttcaaaatttgattgacaggtatttcaaatagtacttttatatttgatttctaatttttaaggtctatttccgaagcttctacaattgatggcgtgctcgagttgattaacactcatttttggcagttaaactttaatacgatcatcggcacagttgacgtattagtaa

SEQ ID NO: 5063 - DNA, 2170 bp, Heterodera glycines
ttagtaatcgattaaacaatttttacgttttcaattaaggtacgtgttcggagggacgccaacgaacagcacgttctaagagatgtacgcattaaacttggatcaattgttaactactgcacaattcaggtaggaaacaagcctattttatcaatttttttttggtaaatttgtgggtaatataggaaaaggccgaaaaattttaaatatcaaatcctgttttctgcataaagcacatggttaaaatttgatttggacactaacagttgggggatttctccttcattgggttttttttgttgttgttttatttaatattatctgtgcaggtgttgaaggattctagcacaaattgggcattacatcggcaatatcagacaccgctctatcagccaccttcggcagcaccgacacattcttcaccatatcaccaaactttgccgaatggaattgctttcagggatcaaagcttaggcagccatccgcaagagatgcattcccatgatcatcatcacgggcattcccatgatcatcacgggcacggtcattcacataaatgaattcattctttttcccgaattgatattatacatctgaatctgtgaaagttgttttctgaacagaaatctttttcctaaaagaaactggttaattgtaagccaatgttcctttgttttttcaattctaacacaaaacgtccttaaaattagattttggcctcaaaaatctgaattttttactccgcccttcaaaaaaatttctgcagtaggaagagagcagcagcgctgccgtcaagcgcagccggaattttggaattttaattaagtatttattctcacaattcagaacaatttgaaaaacaacacctttggaaactttgttaaagctaacatttctaaaaattccttaattattcctcaaaaaataatttttgaaaaagtgaatgttaaagattatacgagtcaaaaaagggtcaccgtggaaggggtgaaaaatttgttagtcgcttgagatggttgattcccctcgatattcttccgctgtaccttcgaatccgtgtgttgcattgtgatcattcatggcttttctttgttgattgttattttctgtacatgttacaatactttttaatttattttacgctgaaatttttttattggataaattatctgggcacaaggagaaaatttattttcttttcgttttagtttatttatctcttaaatatcttacacgaaaaatcatcgctttcatgtgttttacgcgatgattcctttttttattgaattgagtaattctaacaataagctatgtcccctccattttgccttattctgcattttagcggtgtatgaatccagaagaaatatttacgaaattggagcccatcggacgaggttcattcggcgaggtgtacaagggcatcaacaaccaaactgccgaagttggatatttttttgtttcttagaatttaatgttttcctccattttggaacacataattggagagtgaaccgaatgtgttcaaaatttaatttgttcattacgtaaaattatttaggttgttgccataaaagtgttggacctggaagaagcggaagacgagctagaggacattcagcaggagataaaagtgctctcccaatgtgacagtcctttcgtgactcgctatcacggctcctatttgacggttggtccgtcacacttaaaaaattaattaagacgcagtagttcaggggtcaaagctttggattatcatggaatatttgggcggtggctctgcgttggatttgacgaaaagtggtcgcctggaggagaagcatatcgcggtgataatacgcgaaatcctgcgggggttggattatttacactcagagcgcaaaattcatcgcgatattaagggtaacatttcccccatttgccttacaattaaattttgttttcaaaataattttaatgaaaagcaaatttgtgttattgaatttgttaagctgcaaatgttcttttgtccaccaacggagacgtgaaggtagctggtaggtccccgaaacaacgaaattccttccattgaatccaattattcagactttggcgttgccggccaactcactgagacagtgcgcaaacgaatgacttttgttggcactccgttttggatggcgtgagtttt

SEQ ID NO: 5064 - DNA, 1479 bp, Heterodera glycines
  unsure (1)..(1479): unsure at all n locations
ctcggatttgtaattttcgatatttcgttgatttcaattggctttatntaagacacccaatgcgagtgctgtttttgatccccaaaaacccaccnccgcagttgcacggcacacaatggagcaaaagtttcagagagtttgtggaactctgcttgaacatggatccagagaatgtttgtatttacaaattttaattgtttttaattgagtcaaaatttgcaacaaaaaaatgttaagcgcccttcggcacgcgaattacttcggcacaaattcattctgacggcaaagaaaaatgaactccttcgcgacgttattgagcggagtaccgaatttcggattcggcaacagcaacaacagaatttgagcgctgattcggacgtggactccgacgttggaaatgtgctattctgttttcaaatttaaaacaaattcagggcaatgatggcactacttgttgggaatacccaactctaaaaaacacagacattttggaccatcgacaattgtcggacatcgaacgggcagtgctcgatgcagcagacaatgttgcgacaattaaggtaatcagcattaattatgggttttggacttttattttggttgccataggtttcttcttcttccgctcatcagttgcacaacaacgcatcaataattaacattgacactgtccgtttcacttcgcactcaaaagagaatgacaccgaaaatagcaatggaagtgatttcactgtgaataatgggggcacatttgtgaggcgaaaggacccagtagaacggaaagtccaaccgaatgtgaacccgtcttcaaaccgtaattttcgtgttttaatgcttctttactttacgtttttcgtcagcttcgtcctcttttacttcccatgaccattacccaccggtcgttagtgacggtgatgaaactgccgacgatggcaccggaactattcgaatcatttctccctcaaaagcggtccctccaataccacctcatcattttcatcgacaacaacaacaacaacttcagcacaaccaggtcaacaatgtgccatctacttttgttgccgatgtttcggttggcattgctccgccaccgcctccaatccgtggcgttcgctgtagctcactagagaacacactgcttcctgcactggatgagttgactcgaactcggcacggtgccgcccatttggacacaattgctgtcgcactgaaacgcgctgaacaggcaagccccgggctgtgcgatcacttagtcaccgaattgatcaccaccatggcacatccccaatgcacgaacgcggagctgcgcaaggctatcgaccgattgaccacgcgaagaaacgactgatccttttgtgcttctgcaataattctttatcagcagctattactttcaaagaatatttgagattttaaatttttttgattttcttttgagggagatacgtgcacattcgctcattgacagcactttttgtt

SEQ ID NO: 5065 - DNA, 1873 bp, Heterodera glycines
  unsure (1)..(1873): unsure at all n locations
ccattcatttgatttgtttcccgctgcgatgatggatggtttggaggggccaaatcaacaatttctgctgnccaagcatgtccaaatgggttcactctccgagaaaagatggacaacccaagcgattgcgttgcggtaattacaacgaccaaacggactttgattggatcaacaatttcaaggaggtgtggcataatctcgacaaatcactgttttttgtttcnaaattgtttagcatttcttcgtgccaatgccatttcttccgtcagttacgaaattcatttttatgttcatgtgccgtcaatacaaatggtgccattcgaattggtgaacgaatggacaaaggaaaagctgacattggccaaagcaaatgaaaatgaattggacaactgttggataatgaaacgctgcaaaattattggggagaccgcgacggttcagcggcaaaagaaaaatgaaaatttggacaacagttgtaacaatgtgtccatttggctttatactaattgcattgggtgagcaattaaaaaaagcatttgatttttatccgaatttgaattttgcgcttaatttaggcctttgtctccgccaccggaagaagtggaagatgaagcgggacaaagcatcacaaaggggccgtcttctgctgacaaatgagtgacggacaaaagaacaaaaacagtgatcagccgcagaagaagaagaaatgaattaattaagaatgaccgatcgatcataattcaaatcagtgatcaaatgcattttatgaagaaaaacctctcaaatatatataaataaatcggatatataaaatggtttgctatctatcgaatgaatgaattttcctttcaaaaatgtgacaattatttttcgggattttggcgggggatttccgacatccattagcaatacttgttccgttgctgctcctttttctcctccattttcctctctttctcttccgtctctcctccttccaatgttcttgcttctgctgatgttgttgtttctgctggtgttcagctgcaattttctttttcctcttcttcagttgctgctcctttttctcctccattttactctctttctcttccgtctctcctccttccaatgttcttgcttctgctgatgttgttgtttctgctggtgttcagctgcaattttctttttcctcttcttcagttgctgctcctttttctcctccattttactctctttctcttccgtctctcctccttccaatgttcttgcttctgctgatgttgttgtttctgatggtgttcagctgcaattttctttttcctcttcttcagttgctgctcctttttctcctccattttactctctttctcttccgtctctcctccttccaatgttcttgcttctgctgatgttgttgtttctgctggtgttcagctgcaattttctttttcctcttcttcagttgctgctcctttttctcctccattttactctctttctcttccgtctctcctccttccaatgttcttgcttctgctgatgttgttgtttctgatggtgttcagctgcaattttctttttcctcttcttcagttgctgctcctttttctcctccattttactctctttctcttccgtctctcctccttccaatgttcttgcttctgctgatgttgttgtttctgctggtgttcagctgcaattttctttttcctcttcttcagttgctgctcctttttctcctccattttactctctttctcttccgtctctcctccttccaatgtcctgcttctgctgatgttgtagtttctgatggtgttcagctgcaattttactttttcctcttcttcaattgttgctcctttttcctcctccattttactctctt

SEQ ID NO: 5066 - DNA, 3433 bp, Heterodera glycines
tcaactcggcctcaaattggcacttctttcgccacgtttcgatgcgttggtggacaaacatttcgatggcaaaagcgaattgactatttggagaccaatcgaaattcgtcgcaaggacaaaggaccagaaccgaagctgtctgtacgaatcgattacgaatttgtgccatttccattgcccgaccgtccgttgcccagcaaaattcgctttaagaaccttcggattgagtaattaaaaatcagagagctatgacaataaaagcattccttccattttcacagttacatcgatcacttcgtcatcgcttttcttcgtttaaatcaccaaatttttgagaaaagaggcaccgatttatatttgtggatttcatcatcacactctacgaatggccagccgatttgggatgtttttgttcgtgaaatttggcccattttttcgacaaacattcgctgtttgggctttaccggtggtgatcatttggaccatttgcgtcgtcgcacttcgccaacaattctcaccgatctcaaccaattgaattcaatctgttcctgtgatttgtcgcccgctgcgtttggtgatgattttgatgggccaaattcaataatttctgctggccaagcattgtccaaatggttgcactctccgagaaaagatggacaacccaagcgattgcgttgcgaagactttaaaggacaaacggacttcgattgggccaacaatttcaaggaggtgtggccataatctcgacaaatgattgatttttgtttttccaatcaaattgtttagcattttcttcgtgccaatgccatttcttccgtcagttaccaaattcgtttttatgttcatgtgccgtcaatgccaatggtgccattcgaattggtgaacgaatggacaaaggaaaagctgacattggccaaagcaaagaaaaatgaatggggcatcggttggataatgaaacgatgcaaaattggagaggccgtattcgttcagcagcagaagaaagatgaaaagtggatcaacaattgtaacaatgtgttattttggcttgatagtgacactaattgcattgggtgagctaaaaaaaggcatttaattttgttaagtaaattaaaatttcgcttaatttaggccattgtctccgccaccgaaagaagaagacgaagcaggacaaagcagcgaaaaaggggcgtcgtctgctgacaatgagtgacggacaaaagaacaaatacagtgatcagccgcagaagaaatgaattaattaagaatgatcgatcgatcgatcataattcatccgtgatcaaatgcattttatgaagaaaaacctctcaattgctaaataaatcgggtgtataaaatggtttgctatctatcgaatgaatgaattttcctttcaaaaatgtgacaattatttttcgggattttggcgggggatttccgacatccattagcattacttgttccgttgctgctcctttttctcctccctttttctctctttctcttccgtctctcctccttccaatgttcttgcttctgctgatgttgttgtttctgatggtgttcagctgcaattttctttttcctcttcttcagtttctgctcctttttctcctccctttttctctcttttcccccattttctcttccttctcctcccccttcgctgtttcctttttgctgttgttgatttcgtgtcacgacatttgcggccaccagccaaaaacgacaattgcggtccgtcttttgcggcccgacatttgcgcctcggacatttgcggcccatttcttaagggccattttcggacatttgctgccaaaatcaaaataggtctctcatcgaaaatcctttttttctcttcaaatttatgccgaaatttactcaatcgagtaattctttctcgaaattgggcttgttcaaaaccccatcagagcttaaaagttttttattaaaagtaattatttggaactttttcgccactatttttgccactatttagttaattattttgggatttttgccactaaaaatccgatccctacttctaacatgcattttttgagactttttttgactttttacactttttcggatttttatgacttttttgagtttttgcgacttttgttcgtgatttttttgacttattgaggcaaagtttgagttttacagaagaaaatgccaaaaaataaaattttcggtcgataaaaaggcaatgaaacctggatgaattttttcttaattattggaagattagaagtaatcattaagcagaagctaagagatgaatcatctcaccaaaaagctatgatttataagacttaaaaattcaagaaaatcctaattttttgtaaactataaatcaactttttggtgagatgattaatcgcttagcttctgcttaatgatagcttctaaacacgttgagctttcgttgaaacaaattttgaagaaattaaatgacgaacaaaaaaattatggccattcccatttgaaattgtacgaactgccttgacaccgaaaatcccggtcccgtggcactctacttaaaatagtgaaaatttactattttggcgttttgtcaatatttttttactatttcgacattttttggaaaatttcgcaacacaaatgcaataaaagcgaaaaatacacttttaagaatcgaacaaaaattgagccaaaaatttattatttactaattgcagttgcaaatgagtaggactgggatttttaaggccaaaaaaccaaaatagttacctaataaataatttttaaaaattaaaaatttttgccaagaaagtgaatttttgagaaaattttttcatttcttatgaaaaaaaagaagttaaatcacgataagtagcgaccctagtaatttgtctgccaaagaaaattggttttctatgccaattaattaatccccgacatgcaaaaaagacattctctaaagcataatattttcggctctagtgcactttatgagtccaatcaattgacaatcccgggtttttatacaataactttattcatgtttgaacaacccctatctttttggcatcattcgaaagcacacagtctaacgaagctaaaacatataaaatcgcagcgtttaggcaattatagaattgacgccaattcctacggtatcgcctgcaccgtaggaatattcgacatttattcctgtttctttcccattaatccaaatctttccatcactgtcaattgcataagtgccctttcggcttcgaattgttccatccaatttgttctgctgtttgactgcaaatccgaagctcatccaactgaaaaattaataataataataaagaaataataattaaaatttgaatatttctgaaaaattttatattcaaaaaataaaaaaatctctctcttaccatttcaaatttccaattgaaatttcgtagtaa

SEQ ID NO: 5067 - DNA, 3688 bp, Heterodera glycines
  unsure (1)..(3688): unsure at all n locations
tcaatgggaaaattaacaaaaatcataaatgaatgaccaatataagtgaccgcatttttgaatatttcatcattcagaaagcatccaaatcaaatttgaatttgggcaaaaaattcgcctcaattttgtcaccagagtcgcgcaaagaaacgaatggataaaaagaatcatcaccaaaagatgaagcaaccaaaagatcggaggaatctgtgaaaaagataagcgagttcaatttgcacaaattagacaattaatgaaattatgattttaaaaatttaatatttttatttgccaacccaattgttttccatttttggtgaaagtgatctgccgaataacagaattgacgccaattcctacggtatcgcctgcaccgtaggaatattcgacatttattcctgtttctttcccattaatccaaatctttccatcactgtcaattgcataagtgccctttcggcttcgaattgttccatccaatttgttctgctgtttgactgcaaatccgaagctcatccaactgaaaaattaataataataataaagaaataataattaaaatttgaatatttctgaaaaattttatattcaaaaaataaaaaaatctctctcttaccatttcaaatttccaattgaaatttcgtagtaaaaattgtcagacgaatttttgtccagcaaaatcggatgttttgcaaaggcagaagaacagtaaccttttgaggagaaattagtaaagtaaattatttataaaaataccagaaaaatttctcttataatggacaatgagacttttgttgccaatgatttggaggttctcatgacgaaaattggcatcccaataattttgtcggaaatttgaaaatgccttaaaataatccattttaaaataaaattgttttattatttaaatatatttttttaccccttaatttaccttcctctgctttggttcttgctctaatgcactgattgtttccacaattttcttctgatcattttgaatttttgaagttgcttaaaatcgaattaatttttaataaatgtaaataagcatttaaattgataaattttattttcgttttaattttctttccctcaccttttgactgctctttttgctgtttctccaaaacactgattttttccaaaattttcttctgatcattttgtaattgtgagagcttttcatcgcaagcttaaataggtataataaattatttactaaaatgaataaaagaaatataatatcagaaaaatgattttgtttttgccgtttttctcctttttctgttcaattttggccattttttccttcaatgccttctgttcgaccatcatttcctggtgctttaacttttgttctagtgccttctaaaaataatttaaaattttttaattttagtcgaattttttatggcaaaactcctcacattttcgagttccaatttggccattttcaattccatttccatttttgcaaacttttcacggaattcctgaattttattaattaataaaaattttggtacttatgtgtagggcgtgtaattaattatatggacataaaatcgcaaaatatggccataaaatggcaaaaatatggacataaattttaaatatggagaggtaaattttaatttctgaaaatatggaatggagactgcaaaactaaataaaactttgttttggggttttaaggcagggttcggatctgtccttatttgtaagatttgcccttatttcggctattgttcttattttgttcttatttcttaaatatattcataatttggaaatttatggccaaatgttcttattttacctataaattttaaaaaatttccaggcggcgcctatcggcgccaccggacgcccctgtccaacctccaaaatttttaaaaaaatatcgcaaaaaaagccttttacatttaaaaatggtcgccaattgtctcaaaatcgcaaaaattgataatttttgatgaaaatctgttaacaaatcaaagaaataacaaaaattttttgtgtcggcgcctatcggcaccgccggacccactcccctcccccgttctccaaaatttcttagaaaaatgtgccgtaaaaaatttgttaaaaattttattttttttagataaaaattgcactaaatttgctatttttctccccaaaattgttaaaaataatcatgggaggtgaaaaatataatatttgatacatttttgatcgaataaattgtaaaaatatctgatttgaagcaattttgcgaaatgttcttatttttgaccatgaaatcttgttttttggccttaatgttcttattttgaaaaattttcgatccgaaccctggtaaattttacacccataaaaatgaagctttttaatgcctattttccatttttagttattttttcttcatcatccatacattaattactctcttttcttttgatatgaaattttccaagaaattatttagttatatttattaagcaaataatctaaaaaatcaaagaatgtcctgcatttacataacgtgtcctaattttgaaaaagccaataaacaggcgaaaatttttctaatttacgtcatcaaatttatggattatttttaataatatattcaaaacattaaacaaattctgccaaattgtgcattttatttgaaaaattagtaatattttaaaagaatgcatttgaaattgtgcctattattcttttcaatattatttttgatcatccgaactgatcagatcggatctgaaaataaaaaattggaacaaaaatcatttgatgaaatatttggagaaaaatgggaagaaaaaagaaacgaagaacagaaaagaagagaaataattggaaaattcaataagataaaagagaaaattaagcaaaaaggaagaaaatattcagcaaaagaatggagtaaaattaatggaaaaatagcaaaaaaattgggcacaaatcgcaattatatttatgaatggatcaaagaattgggattaaatcaaaagaatttttacaaatcaaaaactgacgaagaaaaactcaaaattgtagaaaaattcattgaaatgtcaaatgaatttaaggaaaaaggaagaacatattcgataaaagaatggaacaaaaattatgccgaaatttgtaagaaaatcggggttagccttttcataattaaaaaatggatgaagcaatttggcattagccgaaaaataacggagaaagataaaattgaaaaaatgaaaatttattggcaaataaaaagagaaatgccgaaaatgagtgacgaaattatcgccgaaaaattaggaattagcggtagaagcatcttaaattggaaaaaattgtactgacgaacaaattatgaattgttttgcttttttgcccatattcttctgttgcggaccattttttgaattcagttttctcatttttatctgtccaacattccttctttttccacaatatttaatttattcgacttattattattattttaaaaaaatgttaaaaatttaaaaatattcgataaaaagtttatgtcctgtctcaaatggaaattaaacatttagcataaatacacatcacaaattagccagaaaaatggacaatttgaaacaattctcttgggatagggattatgcttttttaacgcanaaaatagcaattggaaaanntgcgcaangtaata

SEQ ID NO: 5068 - DNA, 4055 bp, Heterodera glycines
atcacacagctaaaaataatccaaaaaaatttttcttaaacaaattaagaaattatacatattattcacagtttaatttaataattttattaaaaaataaattggaaatttttaaaatatttgaatatttttaaagaatttttatcaattaagtttaaactgcttttcacacacaaaataaaagttcattttaaaaataaaatattttttttattcctttcttataaataatttttttttaaattataaattagataattaattaataatcgaacataattttaataaattcttttaaatgttaaaatttgccattcaccgagtgcatggcttatagcacacaaattcagcttcacccgcgcgcacataaagccaccggtcttcgtcaaatggtggcaatcctccgaccaccaaatttggccgaaaatgtcgcgcatccaccgaaatttgctaaattttgaaaatttaaatttaattttaaaatattttattttattttttgcctgtgaggccaaatgggcattgaggtcgtcgacagaggcggatgaaaatgccatatacccggtcaagtccatataagcaatctgaaaagtgcaaatgcaaaacaaaaacagggggaaaattcggggctcccggaaaatgcgtcagtgcaaattttaatgtcataaaaacaagttccctgcattttcgaggtcactgaccacgaatccggtatccatttcgaccaattccgaatcccagacccgaattcgaacaaaaagtggaaaaccaaaatgttcgcatttaggcactattgattcaaaataggcttgatggggctttcagttagtttccgtgtattaaatcgatttttaaccaaaaaggctaatttcgaaaatttggaattcgatttctttgttcgaattcgggtccggggctcgctatcaaaatgatttcacatagaatttgacttttatactacaagaattttaagagaaaataattggaccaatttaacaaattttgccaaacaattttccaaaattcgaccaaatgccacaaaaatacatacacaaaaattgttgtttatttcgggccaaaatcagtttgaacagtaaatagggctagtaggaggggtaatgaatgattaattagttcagttttttgaattgcctaaattacggaaaattgccaaggacgatcggcattttttttttttgaagaatttccacggagctaaggatttactgtacccagcagtgtacaattaggtatttccgagtctcgagaaaaaaaagtcggacttcgcgttttcgggtttcgggtagagacaaatttcgggtctgtgaacgaccgaagaaaattcggattggatttcgagtggagacaacaaaaccggatttcggctaacctggcacatcccctggtatgaattttgttgtgccacaccttgtcctgcacatccggcaccgggttgttcgaccaccagctcttgtccggcttcgggtcgcgttccgtgtacagccagtcgccaccgtagtaaatcaggcgcagctttctccctaccgtaccaccaccactaccgtcctctgtcgtcgtcgccgccgctttgccctccaacaaaaactcgtccaaagccgtggccacttcatccccacagtccaacccatccgtttggaggtcagaaaacagtctaaaaaccggttttgggagtcaaaaaatggcattttttgtattttttgaaaaaaggtgtgccaatatggttggtccctggcattttttgggcggcgccgaattgacgggttccaatttcctgggcccaagccgaccattctcaactgggaagcgggccaagacctgtgtgtttgtttgtgtgagacaacatgcagttgggagaggaggtgtgaaaagacgaaaggaaacgatgcagccgaatgagtgccggcattttcagtcccggcaaaaattcagtcccgaatttcacccgagaaatttaaagggcggattcgggtgacttttgtgtatttttatggattcagcagaatctcggcattccgttgaattcctttagcgagggcccgaaagtcagtccattttagataggaataaatgccaccaaaaaccatggatggcatggcatttgatcaaccaaaaaaaaaaataattgcaaattccctcgggactcggctcgagagcgaactctcgaggaaatttctttggttttctttatctccagctggtttttttggcaagccatgtcttaagactcaaattgtgacccttgaggggtcaatttccggggttttgccgtttcttggtaccgattctcgacagtctttgggtcgagacggtggatttttctgcaaaacttttttgaaaataaacgaaaaattttttcgaaataaaatgaagaaaaaaaaattcaaaaaaaatagaattatttttttttaaattttgcatctaatagaaaacaatcacttaagctattctattgtaaggatatccttccatttgaccaagcccccgaggcaaaattactgcctcacttttatggaggcttacgttttccgattttaaaatttgccacctttctgttgctgtggccaaaaacaacttactttgctcgtaggacaatgtttcgctcttccacttccttcagatttacctacaaaaaaaatgaacattttgccaagatttttttgccaatttaaaaattattaaaaaattacctccacagggctgcttcggttcgggaaatcaacacggagtacgccctgctcgacatggacactgatcagcaacatttttgggtaaatgcggccggtcagcatttgattttgccgtgccgaatcgaccaccaaaaagtgccgatcgcgctgttctccatgggcacaacctcgctcgccacaatcaagccagtcaaccggaaaagcaattagcatttgataaattaaaatatcatccaattaaatgtgcatcattaccgtatcccatgtgcattgtataccgtattacacagaaagagagagaggggaggggggaggaagagagataaaaagagagagagaaagagagagagagagaggtgagagagagaagagagcccgtgggttatgattttttgaaatttggtgctgtattcagttggaaaagactttattcgggggaatacggtctaatacagtatgtgaatgccaagaggaaatatggtacgactactgctgcatcggctgctgctcactttgttccctcgacatgacttcattgggtagatgtaaagctgttcaacatgtccagctcgtacatattcttctgtgttgcattgtctatgacaaaatgaataataattttcggacaattggacacagtggtggacggacaattcgccaacggaaaatagcgccaaacaaaaaaggccccagaataacattaaaagacttgcgggtgttggatgaatggtactcgagattctcggtctcgagttgagaaaaatttttgggtgccattttggtctccaaaattatcgaacatggatggcacactatatgaatttttgttggatttccccaacgtttcggaaattggcacaaaaaataaaatggggatttggattcggagtcaaacccgaaatgtgatttgctttttcggcattttgtcaaatacaaaaaattcgatgccactcgaaagcgccccaaaatgcatttttcgttcgcgccgcattatttcggcttcagatcgaacaaagcctttccaatcaaaaacatattttcaaatttattaattaatcagtgggctaattgccacccttttggactatccaaaacagtctttggcatttttgttgcttttctgatcgccgctttacctttgcttcttcttccgctgtacaagcagcagcaaaaggaccgctaccgtacccagcgcgcacacagcgcctaccgtacccacaattttggactgttgctgatcactcataattaattaatgcatattaatacaatgcttaaattgtgaaaattgtacaattagcaaactcttttttatttttatgaaattgatggttaattaattcgtcc

SEQ ID NO: 5069 - DNA, 4198 bp, Heterodera glycines
  unsure (1)..(4198): unsure at all n locations
cccctcccccgtccaaaaatattgcgttttgttttgttggttggatgggtttccctccggcgcattattttcgcctttcccatccatcggccggcaaaaatgtgctcccccctcccctctctcactcactctgtttctgatgggaaattcccagggattgtgtgtggggcgggagggggggggggagataaagattttggcggagaattggggtgggaattgggcgaccagcgagggaatggacgaggcggggggggacgatgggcggggcggacgcaccaaagttgtcgctcgggacggaggtgcggtggacaagccgaagacggactgacggaccagcagggcaccacccgggcaggttctgtggcattttgctgccagttgccgagagtagctaaaatgccattccatttttggcattcggccaattcatagccgacgagcgatcttttttttttttgttccgtgaactgccaaattccgatgatcatcccccggcgatgccacacaatagtttcggacaattttttggtctttgtccgatggcatttcaaaattgaaattggaccttttccgttcattttcagtgggtgaactatgccaaaattaaagtgggatggatcagtgatcggacacatttttctgttgagtgaccgaccgattaccattttatttggataattaaaatttgcatttttaaattcattttagcattaataatttgatcagaataatgaagagtgatcagcaacaacaaatttaataattacaatttcaaaaaccaattttagacacaatttcaagcattaataatttgatcagagagagtaatgactccaatcaaattggaacaaagtgatcagcaacaacaaccgcaacancgacatcaacaaggtcagcagcaaccgtaccatgcgcaactgacactgatcagcaacaactccagcaacaacaaattgttttcgccccctttgctgttgatgaacagtagtgatcagcaacagcaacaagaacaacagcaacaattgtccccttctgctgctgctgatcagcagccccgggttcggcggcacaattgtcaaacagtgccattggcgacgacagtgtcgcagcaacaatggcacggagtgcccacggcaccacttttgcctccggcaatcgctcccgccgacaatggtgtgaattatgctgggggattttgttaggattgtgttgtcatttagataatttgacctcaatcaatgggctaaatttatgaaaattgtttgcgaaatgttatgtcaactatttgaaattttctggaaaaaaattttaattctaaaattcttttagacatctaaaaaattccagaaattttcaaagggccctagaaagattttagcgctaacttaaaaagtgtggcgtcaatgtttgcaaaattacttgtcgtaaatcgtgtaaacttatccccggcggggcttttcggggttgttgatcacggagtttatatcaatttagaccaattcctaatccaaattcgaaaactcaaattttccgaattttgatttttttttttgtgcaaagttagattaggggcttcagaattggtcaatcaaaaatgatgtcagatacgtgatcagcgatccaaaaaattccttaaacaatttttcatagtagacatcatttaaaaaaattattttgggtgccattttttaaagccatttctgccgagccaacgatggaaaatttcttccgttttgtccaattggcaaacacttttggcttccaatttgatttggaccaaaaattgttgcgatggaattcgtcgacagtgccaacaatggtgcctgaagaagaagaagcggaaatggatgccaaaacggcacaatgccaacaacaccaacagcagcagcaaccgatggaaatggaaactgatgagccgactctgatcacttggactgatcagcaacagcaggagcagcagaagagacaacagcagaggcgaaaaggtgggcagacaaattaaaaaaaacgccaaaatgagtgccaatttaaataaaaatcgaacaaaaacggttactgtagaaaagtttgagtaaagtaccgcatttcacaaaaaatgccaaaatgcgtgccaattttaaatgaaaattgaacaacggttactgtaagaaaattttgagtaaatgccgatttcctaaaataaagtccccgaaagctctgtttaagtggagggggggggggagggctatatttttttcggagtacggtattggtgataatcggtaaagaaaactgatcaaacccatcaaaaattcttcaattctgatcattaatgcctgctggcggagtatcataaatttattcactgttggatccgacccccattttatttatattttttgaaattttgaccccaaaatggcaaaaattattcttttttttggccaaaaacggttccaaattcttgtttttttttgtgttccatggcgtttaaatttttaaataacaacggagagaaaaaaattcaaaattttttggcccggagagcgaaaaaaagatcttcgtgttctcccccgccccccttccccgaatttttttttttggctacggacttaattgagttttgatcagtgcccagagacaattaatcgccggcaattaaaatttggtcgcgcaaaatcggccgagataaagaaaggccccccattaatttcccacaaacattaaaaatgccgatggatgatgcgatgcacttctgtggcgggtcctccatattgcacccgcccggcggagtgcagcagaaatatgaggagaaaagcctttttggggggtcggcaaacttttgagggcgctaatccccgccggaggggtcaaatggggcacacaaaggttgaagaagtttaccttcctccttttccaccgccgaaagatcattaagttgagtgcgcgaaaaattagcgcaaaattaccgtattaaatttggcatttcacacaatgccaatttggcgctcaaattaaaaaacagcgaacggcaccgaatgcgtgggcgtgaaaaagtgcaaattttgtgccgattggcttcccaaaaacatgaaaatgaatcattgtccgcggggagggggaccaatgaaagtgcgcccgcccgccgccgctgtcatggaaaagtgccgtcaattttcccacgaacaacgaatcgctgcaacggcgccccggagggcacaaaaaggggggggggaataccgtaatgccgagcggagacagcgggcaaagagagtgagacagtgtggcacgagcggagagacggagaacagtcagagagggtaacacaaagaaatagtgtggggcgaggagagagcggagagaagggtacacaaacaatcgagaattgatgaatgaatgagtgagtgtgtctctgtctcgagaatgaatatgggctgctagcagcttcttagggcctcttcctccccagggcgttggcttggcccaacaaaaggggggtaaacagaagcacaaccttcattggcaaaaatgggttgcccccccttcctccccctccctcaacattggcacatgcattgcgctctcggcaccgcccccctcccactgggccattttgcttcgtgccgatgctttttacccattatcccctcccccacttttgatgctttttccctctctgatcggaaagccaaaaaagcggtgatcagagccccaatcagtcaattccccattagatgccatggttttttttgtgccggacatttcattcgagagcgagcagtgccaatgccacaaaatgttttgggttttgccgtgggattgtatcgcctccctcccttcccccggagatccccacaccatcgctcgtgtgaagatcccacaaccggcaccggcaggcaggcagcccaaatcgaaaatccatccccagagccaaccccgaccgacccctgcttttgttgtccccacccccggctctctggcgtccagtgggagcccattcccatcccatgcccgtgaacaacacagtcccatgccatgctcttaattcgtcctcctgctgctggtcccaggaggagggggccggggagggggaggggacgccatgactgacttttacgaggcacccaccgcaccccccggggggtgtgagagattcccatcccaaaataacacatagaacaacgataacaggctttggcactggcactgctctgct

SEQ ID NO: 5070 - DNA, 1834 bp, Heterodera glycines
atttttgtacccacctataattaatggtggtggtaacggtagtggtgagcatgagtacggtagcaacaacgggttttatacggtgggccagcaccaactgctgcacaaccagtggaagcagtctttggccatggccgctgttgcaactgttggcaaggcggcggcccgggcacaaaatgcgggaggaggagggcataagagagggtcggacggaaagccaaaaagtgaatgaacgaacattttgaaaatgccgaattcaaaaatgccaggggcgtaaaagcgataaaatgccagaaaaaattccagaattgagagcgaatgaaattgaatgccaaaaagggaatggcgctaaggcgagaaaattgtgaaacatgaatgccaaatttaatgagtgccgttttcttttttgggtatgtgaaaattccaaatttgaaacactaacgactaacaattctaagaaaccaaattaaaaaaaaaaattattttttcgatggacggaaagccaaatttttataaaaagccaaatttgatggcataaaatggaatttttgaatttttcagcctcgaacacttcgtccagtggtcatttgactgtgccgtcgacctcgcgccgttcgtcaagcgcgtcgacggtgaaggcgcatttgtcccccgctaccgtatcgccggtgcacagcaatgggccagctgagtatacggtagcttacgccagcagggcgaggggtgcgaggagacaaatgccaatatggcaagacttaggcctatttatacaacattttttcgatgggaggaggtgaaaaaaatgtgtgaaaataccagccagggttggtacggtatttaccgttttaaacatcgacacggtagcgcaaaaactcgcgcaaatcattgcccacccatacaagaaagcattgaattaatgaaaaaacggaacctggaatcccgtgccgaattttgcggaaaacggaaactctagccctaggggcagggcgaaatcccttacagtatactgtaggttaagtacagtaagaaaaagggtaaaaaacttcttgcagtcgccggcaggccaattcttcccgctgcttgcccagcttgggcctgcccaacgattgaccacgactgtggtgcgcgactatttgtctaacccggcccggtacgattgtgtgctgtggatgtaccatgccaaggtggcacagaagagttacggcacggaaaagaggtgggcggcaaaatgccaaaaaccggtggaaggcgggggtaattaaaattaaattaaattctgagttagagtgaagcattattggtcaagaatttgcgtttttttgacatttttgagcattggccgtttgcttttgtcattaaaagggtgatattattattgttttttaatttgaacgttttttaatgcattaaatttgaaattttgaaattttgggtcagaaatattccaaaaattaattttcataattttattttgaatttaaattttattttgatttactattttcaaatttttaatttataacacaaaatcattttttaaaagtgtaaatgatccacttcattctccagtctacaatcacaaaaattaattaacccattttttcaaataaacccatccaaatttcgcgcatttttttctaatactgtacattcaaaatgctaataactgccccactcggggtaaaacataatgaattcctctaattgtataactgtgccattcatttaagctgccctccttcagccagaaggctccccccggggattgggacatattgtctcggccaagtgtcccccgagggttcatcggtccccctaatgggggggggggggg

SEQ ID NO: 5071 - DNA, 867 bp, Heterodera glycines
tagggcttcctttttaggcacaaaatcgcgaaatagacacctaaaaaggcataaaaaaatcgcaaataggcattaaataggcacaaaaaccttaaaataggcaaaaaaaaatttttttttttattaacgcttttttggtattaaacacagcggcccaattttgggctccaagtacaattatactggatttttcgtcttagtggtctgtgagttagtcaccaaaaggggggtcccaggttcaagtcctcccctatgttgtgtgttaatttcaatttcttcttttaaagaaggcagaattatttttttattaataaaagttttcgtgtcaataaaaaatcatattcaaaaagcgttggttacgtacagcatcgacaattttatgaaaattttttagcttataacttggtgaatactagagcaaataaaaccattttatgctcattttgaagggaaaattctggagaatattgtaaattttaccaatattttgacctcctctagcgattccaagtttattttatggaacttaagtttttaactcgagatcggctcttctaattttacaagggaaaatcccaaaaaaattttaagttttgcaaagttttggcgttctgattactaaataaataataaacctatttgcactgagagcccaaaattgggccgctgtgtaaaacaagtaaaaacttaaatatttcaattgtaaatgaaattattaaataaggacaaaattttaaaccaaaaatttttattaagaaaaaaatatattaaattttgggatcattttttgaaaatattttcaattcttagtggtgtattttctgaatttttttttgggtcatttcttaggggtgtgtttttcgtttt

SEQ ID NO: 5072 - DNA, 3232 bp, Heterodera glycines
gtgtatttaattgtaatttgcttaagaaaaaacacattttccggatgtatttttaattgtaatttaatcattagaaaattcgcattttacgtatgtgttaatgtaatttgctcatgagaaaacacattttccggatgtatttttattgtaatttaatcattggaaaattcgcatgttacgtatgtgttaatttgcgaatttttttagatattttcagcaaattctttaggtattcgattgtcgggagccggcgaaatgataaggaatgagattttttggaatttttatgcaaaaacacttttgatattccaatgtttaatattttagcaaatattttggcatttttgggggttttagcacatatttcagcatttttataacaaattttattacatatttcaggatttttagcaaataaaaaacccagctctacttatatgcaatttcatacttacagttcagcatgttcccttgtcagtgagacaagtcgaattcatgccttgtgaaaagaaatttttgccttgtgaaaagaaatttttttttttggaaaacgggggcggggttctatctattgagggcgttgtaacttctcatcagcaaccatagagaaacacgaaaagacatctcaacgaattttgaacttaaattcccttttccatagcaggaaaatggagtgcaacgtctcaacagacagacgaacccaaatgaaggtagcgaaccaaaaatggaagtgtgttgaaactacaaaatattcagccttttatacccttttgagactcataaagctatttttgcaaatttgtagtttttgcgggaaatgtatgtataaaagggcgtgcgtttttccttttcaagtaattgtccttaagatttgacacaatttgcatttcatttcttcctaatttttgttctacatcgaatcatgaaacgcccaatggactcaacagcaactccgccttcttccaaaaccacacgtatttccgcggacgctttggctggacaaatcgactcactttctgctgcagtcaacgcactgcttgttcaggacgacatttcacaggccgtcaaacttcagtttggcgttctgcttactaccctccacacgtgccaacacgtcatcgatggtctgaacaacaacgcaaacaacaacagtgccgaggaacaggaacgccgccgttccttggtcataatcggtcttccggagaacccttcagcccgtccttcggagcgtgttcgagaggatcaaaaggttgtctcggggattttggacgaattgggtgttgaggcggtgccaacgacgacctaccgaatgggccgtcctgatgttcaccgtgcctcgccacgcttggtcaaagtggtgctgccggcctccgtccatcagcacattgcactcggcggttggaaaaaggagcgcactcgcctccgttctctgccaaactggggccgtttgctgattcgcccgtctctcagccgtgaacaactccaggcggaatacgaacaaagacaggccaaacgcaacggaatgaccaaccatccgccacgtgccaacaatgctagcgccatttcaaaccaactgcacgaacttggacaaaaaatgcagcaaaattttcgatgatttcaaggtttccggggtttgtgtgtaacgaaacccaatttcaaaaaaatttacaaaaattttcaacacacacaaatcccaatctttctttttttgttgattcatttgatcatttttcaattcgatctcatacaccatcatttactttttctaggacaaaagccacttctgttatttcaaaatataatcctgaacttcacagatctccaacaatttcagacaataaccaaaatttcaatagatcaattccagaacaaaaatttataggaattttatcaaatgttcgatcaattatgaacaaaattgaccccctcataaccacacttaatattgaaaaatataattttatagtattagtcgaaacatggttaacacctcaaaattttgatattttacatgcagcaattcctgaaaactatcaaatcttttcagcccttcgtgaaaacaaacgaggtggcggagtttcaatcttaatagaaaaaaaattttccgtttattcagcctttgcggaatcagtttttggatgcgaaattgttacattgaggcttaaaaatctcaaaaatttttccattatcggtgtctaccggccccctagcacttccctttctaactccaaaaaattctttaactatattgaagaaaaaattaaaggacaaacactaatattgggagattttaatctaaatagtaaaagcgttaaatggcacaataatacaccagccccttttaacaaaattggacattactttgtcgaattctttattaaaaatgaattatctttgcactgccaaacaccaacaagaggtacagagatgttagacttatgcctgacaaatgattaccgattatcacttgaaaccgaaactagggatagcttgataaattctgaccatgaatcgatctatctcaacctatctatctctctaataaaaaatcccagtacaaacatttctttccgtaaatttgactcaaaaaatactagtttaataaacgcattcctaactcacaatttagaaaatgtcacccagacagaatataacatagaaaataaatacagtcgatttgttaaagaatctctaaacgggctaaacctttttgccccaaagataacgttcgaaaagaaacctaaatcagtcaattatcctaccgctcttaaagcatcaattaaagaaaaggcagctctttggaagaaactcaaaaaagaacctgaaaaatatcttcccctatataaatccatagcactccacatcaaaattcaaactaggaaattccaggaaaaacaggaaaaaaaattcttagaccaaaaccccggaaatatatataaatatattggaaaagattttcagcgttgggaaataccacccatctctcataaccaacaaatcataactgatgacaaaactaaagctgacatttttgcaaaccatttttctgaatccttccaaatttatcagaataccccaaacctccctccataatttctgttaatcaaccttcaatttctgacgttcatttcaatgttttagatgttctcgaaattttaaccaccttccaaacaaaaataatacatctcctgacgatttaagttttaattttctgaaacgttttcatctaatt

SEQ ID NO: 5073 - DNA, 2339 bp, Heterodera glycines
tcaaacccatttaactcgaaattaattgcaagagtatttattaaatctaattaattttaagtgtgatatttgtcgattattatgatggaagaaacagaatcgacacaaacggagggatcggtgctacattttgaggaaatggcgacgaatcttttgcacaaaacctctgccgattgctctcaaagcaatgaaagaactctagcagtgcatttcgtcaggacaacacattcccgaattacttcacgctgctgacgaattggttggattttgtgtgaattaaagaatagcaaacgtattaatgcttcaggtgctttcgattccacgcgaaacgaaaggacagatttcgtatgatgtggcaactccggtgctatttggtcaactttttgctttgtcgctgtgagggagagcgaggctatttaaagaaagcagcccgacttgcacaattcaggacgacattattggtatatcggattctccggtccttagaactccttatactatcttctcacaaaaactcttttcagatttattcaattttctctctaaaatccgggtaaactacccaccgtttggaaaacctcaattattctaccactatttaaaaacggagataagaatctagcatcaaacttccgtcccatttccattacctgttcttgctgtagaattttcgaaagaatattagccaaaagaataacagaatttttactcggaaaataacttaatttctcgatcaacaattcggtttcctcagaaagcgctctaccaccctccaattaatttcgactctcgaggattggtataatgccatacttctcaataaaaaaatcgactgtatttatttggacataattaaagcctttcgacaaagtccctcatgaattgctaatttataaaatagagaaaattggaattaagggcaaccttctaaattggcttaaagattttctaactaacaggacattcaaggtcagaattagtcagcagttttccaaagaatttcccatcaaatcaggtgttccccagggatctgtcttggggccaattctatttttaatttttataaatgatctatccccagtaatccctgacggaatttcgctaaaactttttgccgacgatactaaaatttatttttgctatgacaccgaatctcaacgtaaaaaactagacgaagccttacattgcgtcagccaatgggccaaaatttggggtctacaattttcaccagaaaaatcagcttctctatacctcggcaaagataatttcaaaattccatacaaatttaatggaaagactattaaagagacccaaacaattcgagatcttggaatcttaattgacaacaaactgacctttaaatcccatatttctgctattcttcaaaaagcctaccttagaagcagaacgctttttcaaaaaattaaatcaaaatcatctaagacatggattaaaatctataaaagctatattagacccttacttgaatattcatccgaaaattggaacccccacattaaaaaagaaattattcgccttgaaaaatttcaaaaatttttcaccagaaaagtgttcttaaagtgccatttaccggttttaccatattcagaccgattaaaataccttaatatttccagtcttgaaaataggagaaaatatttagatctgatcacagccttcaaaattattaaacaagaaactcacctaaaccctctaaaattatataacatatctcaaagaagaaattcaccttttcccagattaatcactaaatctaaaattactaaaactgaacattcttttaccaatcgtaccacaaaaaatttacaagaattaagcaaaacaatcgacctttcatcaataaactcaattcaaagttacaggaccaaacttaaaaaactgttggagatctaggacatttccatatgtgtaagcggcttttgtccttcatttggattcttttatttgaataaatttgaaatttgaatttgaaaagaaatttttgccttgtgaaaagaaatttttttttttggaaaacgggggcggggttctatctattgagggcgttgtaacttctcatcagcaaccatagagaaacacgaaaagacatctcaacgaattttgaacttaaattcccttttccatagcaggaaaatggagtgcaacgtctcaacagacagacgaacccaaatgaaggtagcgaaccaaaaatggaagtgtgttgaaactacaaaatattcagccttttatacccttttgagactcataaagctatttttgcaaatttgtagtttttgcgggaaatgtatggtataaaagggcgtgcgtttttccttttg

SEQ ID NO: 5074 - DNA, 2922 bp, Heterodera glycines
tgccttctcttgctccttttctcgctgcttttgctgctgttcttctcgttgctttctctgctgctcttctcgttgctttctctgctcttctctctgctttctctgctcttcctgctgctttctctgctgctgctcttctcgctgctgtcgccgtttatcctcctcctccctctcttttttgtctcgctcatgcttcaagcgaagttgatcaagttttgtgcgatttttcaacggatttaatggtgcttcttcaggctcttcctcctcaacgacttccatgtcaacaatctccccctcatccgggtattgtattgacctttttcgggtcaggtgtcgttccatttccgctatcatgccgtggtgcattccccgttcaagctgctgaggcgaaaggaagctgccccttggcactctgaaccggaacttgcgaccaccgcgcaggtgcaccactacgtattgcctctccagggtccctacagtcgcccagctaaactgtacaagggcaatgagaactgtacaaacccactcacctgttgggatatattatgccagacatgcccaccatccatcccggcccatcaaacactaatttctttggcaagtgtactttgaatttattcgttttattgccgacaaatcccggcgtattgctgggcaaaattacaaagaaagagttactcattttaacgaaaaatcaatgaatgaatggtcaaagatcacttttccgtcttgaaaaaggtgttcagtcctccgttcttctgtggtccatcatcctttttttggtgtttcatgatcaggtcggtgcagtcaaagttcaacttggcacagtcttggcagaatgtttgggtaaactccagcttctcttggccactgccagtgttgaggatgaagcgcttgtcgcctcgcttgaagttttcgttacggcattcgttgcacataaaggtgaacaccccatactgcaacagaagaagaacattgtagggctgccaccagagcaaacattacctttgggcgtgcgagcttccagaaaattgttgggtagtcgaagacgttggctgctttgcgttcgtcgacatctgtgacttcaacctctgcggggttggacttctttgcgttgttcacgtcctccagcagtttttcccagcgagactttcggcccctcttcttgagcgcaggacgttcctctgcgtgagatgactgcgagtcaaccaacttgacgtcatcatcactatctgaaacatggaaaaatgagaaaaaatccaaaatttttgtaaaatttgtgaaaaattttacccattttatgttttctttggttgttttgtgcttcttccacgtggttcgcttctataaaatgcttatatttgtgttttattttaaaatttactctggatttcgtccaaaaactgctcattctgcttacgaggagccattttcgaggaatatttttgtgtgttaagatgaaaatgagaagggaaaagtgtgggggtactgtatgtaacgtgacggagagggcggggggtgtcacgtgggaataggccactcccactcaactgagagcacgcagggacctccagacgggaggatttcgaaatccatccacagtatgccctcctatgccacgccccttatcattcacttccctgtcagtcatttagatgcccccactgacaacagccttatccaagctgctgaactgtaaagctgagaatttggccgagtacctgaataacccagaagctgttaacaaggcgagtgcatacctgcgaggaaagaagctcaagacaacctactcgaacaagggcggcactacaaaggaggtcgagtttggcaacttctcgctaaagtctgcttcggagacgtacgccttcgagggattccttggcaagtgtcctttctgcaaacattcccacattttggaaagttcagaggtcaaagttcaccagtacttctacataaagcaccggatccgcctgctgtacccccagctgaagtgcatcgttgagtaccacagcaaaggtcattgcaagtattatccgttgggtaagctttaggctgcgatgaatgcccataatctcgcacggtttcagagttgttggccatagaggacagtgcagagataacaggcgaaaagccaacagacaccaactacttggactacctcggcttccgaagtgtttggcagccaacccccgtttattgacccgcacagagatgaagcgttcgagaccgtcgcaggagttccccgagattgattttaacgtgaacacgatgggtgtcacggtgtacagccctcgccatctgaagacccctcggtttgtgccatgggatcagccgggtcggtgtacacgctgcaagagtgggaacgtggagctggactacatcatccagccagagggagtgaccatcttctcttcacggctcaaggatgacggagagaactttctgccatttgatgagatcggtaagggtttggactattgcgaaaaagtaatcagcagcttaagtggactttggcgacaatgccaagtttcgcgtccggtcacggaacaaaatgttcaccctgccactgagacacccggaagtttaccaagctgcacaagtcgcagcggaagcgaatgaactgctggcagaagttccaccaatggctgataacaatgatgatgatgataatgttgacccaaagtgataactcagtgtgttgataagccattttgttatcattcgtgatggattacccgtgaataaatgagcgtgaactcaagtttcccattccctccgggattgttgtcagcgggccctcctcttcgggtaagacgcagttggtccttcgcctgttggcacacgccagcgagatgtttgatcccccgccgaaagtgatagaggaggacccaatgccatgagtaatgagcagtccccttgggt

SEQ ID NO: 5075 - DNA, 4277 bp, Heterodera glycines
aatgagagtgccaaggtccaatgcgctgtacatctttctgatgcgtgcgcccagcgatatgttgagcatccgtaatttgtccagccaaatgtttcctcgcgagcaagggtttctgatggacgcgtacaagcaggcgtgtgccgatccgtacgggtatctgttggtgacactacacgcaaacacagacaacatattacgactgaggacaaacattttcccagacgacgaagataagattgtctttgtacccaaaaatggttaagaagcaaatagtcggacagcgggtgttggacaactacgagtatctgaagtcccttgggaggacgacatctcacaagaagaggcgtcatttgttgagcagtgcaggttgtgaagagctgttgactatggtggagatttgcctaaaccttctgaacgggtccttctgtttgacacggaaacagaagcaaaagttgttgccttttgctaacaccattcgacggttggcacgcgtgagaagtgtgagcagagtgcgagaaagccgatcttacaacaacagcaaccacagcaggagggaggttcactctttgtccctttgttggcacccatactgttagaggcagcacgttatctgctgcgcaaagatggccaataagctcattcttctgccttttgagcattaccgaggattagttgcatcgagagagggtgtcggccttgcgaaaggagacgacgatgtggcagggcagacaaatttgggattcgtcaaacgacagctggagaccgtgaagaggaaacggacagcgaatgtcagcgaacgaaatgtactgtacaaccagcagctgaggagatatttgaagctgagaaaggaggcaaacgacaggccttccaactcagcaacggtgctcaactgatgaataacacggtggagacgggcgtacaggtacgacctggcccctcgaaccgaaggacaagtccgtattgattgctggcgaagatgaagagattgaagtgcctacgccaataagtcagacgccgggaaaaagccgattgcccaggaccaacaagaaagcgatcaagcagaaagaaatgaacgaaaagaaggaccacctcttgcccatcattatgtctgatccgcagagattcggcgctacggaccgtgggaaaatattaaatccaaagacggggcgggagttcatcgactcggacctggcctggtcaattgaacgcctagtggaccctcgcccggagaatgccccttcaccaagcggaaccaaagagttgatgaggaaactcgcacagaatccgctcgccagtagcctacttaatcgactattcgttgggtctggacaagtcaaacaaacgggaggatttgttccctctaaatggacgaaaaaataaacaaaatatacaccgacccggccaatcccggtgggtttgcgggtgcgagtgcactctatgcagcggtcaagaagaagcacccaaaactgaataggaccgactttgatgactttttgcagcgtaacaccacctacacgctgtttaagccaaagagggagaagtttcagcgccttcgcacagtccccggagggttcatgaccagtgagtttgtccacgttattttcacgtgatcggctcagacgttcaggcggacttggcagacttccaagccctttcgcgaaagaacagcggctatcggtacctgctgttggcggtggatgtgttgtcgcggcgtatgttcggctcacccgtaaagagtaagaggccggcggacgttaaaagggcatttgaggaggtgtttggtcaaatgccaaagcttccggaaacactgtacacggaccgtgggctggagtttgtggccaagcccatgcaggagttcttcgccgagaatggcattaagaagtatgagaccagctcaaagaagaaggctgccgtcgcagagagagccattcgtacgctgaagacccggctgtacaaatatttctctgccaaaaatacctctgcgtgggtggatgtgttgcccaaaagcaacttgttgctggcgtctcctcaccaattggagcgagcggctcgcgcttcatctcctcgtcaatcaggctgatccagctgggatcctcctcctcatccgcctttttggtcggctctttgttctctttgttggcgtcctgtaagtccatttcgggataagcgttgtttatccaatcggtggcaagaattaaatccatttaaaatctgtgaaaataaaaaaaaactataaataaaaagaaggcaatgtgccagtcactgtacacagcggtgtcccacgcgcggaacaagtgcgggagtgtgccaaaaaagaaaaaaccttgctggtgctggatgatttggtggtgggtatgagtcaacaatataacattggttaaattgatttttttgtttaaagacaaataaaggattcaaaaattattacaactaacgcctaacaaaaatcacaaacaaaaataacacaaaataaaaaaacaagacgacaaatatattaacaaatatctcttttgaaatatattttatttaatgttttatcattggtattttattattttaatcgtatcctctaattttgcaaatttatattatgcgcaatttaattacttgtttagaaattattcttggaaagttaatgcaatattgtctgatgcacaaatgcatttagtaaatatttctgttttctattatagcttaatgtgagacaaaccattctgctggtgttctgtgtaatcgagattatgtattaaaattgagttgtattcgtttgatatttatttatttatttataaagtaggcaattgcattcaatgttttaaaatataataccctcaaaaaatcttttcaagcataataaagttaggtttatacattaacttttataattttcaaaattataagggctttattcatacttgaataaatataatgaaaaatattcgatggttgattaatagaaaaattctttttatggatttttcttctttttattattagtccttttaattgtttaattataatgaaaacaaagatttcgaattaattagatcaaatgcgaccgaccatctgacattctaaacatcggtttgaggtatatttagatggaaattgcgcaagaaaatgaacaaaattttacttctttttatttttatgttaattttctactttgcttttggttgttttcgagttgagcgatgcgctgaatggccgcgataaagagtcggatgctggtgaaatgtcggtggcaaccgctttttgacgactgatagaagctctgaaatatctttaaaacctatttgttttaacggaagaaaatatttgtctgatttaattcattcccgtcgacaacttttcgtgggagaatgcatttttatgataaattcaaaaattttaattagagaattattagttgtattatttttttctatataaattgtatcctttcattgtaatgacttgaatatatttttgtttaaagaaaatattattgttgggtatttgataaagataatatttttgacaattttgggaatcatattttgaattggcgcctttcgcaatatttcattttttataattatagatcttttttgttaagttttgttatacttcttattaattaatacctttatttcttcttttcaattgaaacattgactaatattacattgaaaaaagattatgaaatttcatcaattttttatatgcttaatttttggagtaactaatatttgatttataaatttaaaaaagaaccttaatgattttaattatgtatattaaattttttttcaaataatattaaacaatgtgtaaatttgagtttgttttatactgcaactttctttcttattgtttatatttattattatgtttcaatatactcgtcttgcgtttatttttttacgactatatttaagtaaaattaatcaggcaattaattctctattcctttttatatgagatttgcaaaaattcttgctcaccgcatctatgccaactattttccagaaggaaaatcctcgtactcagttgaaaaaagcgttaaaaataaaatacaaaaataaatttattttaaatattgttgtaattgtgaaaaagagataaatgaaaatatcggccgatgtacaatttttgttgaatatattaattcgacaataattgataaaacatttgttactaagacacttctgtacaaactacactaatatacaaaagcgattcgaaaaaccccagattgactttaagaaatataatcattagccgtaataactaat

SEQ ID NO: 5076 - DNA, 1236 bp, Heterodera glycines
aaaattagacaattcagtaccaaaataatactgaaagacataaatattttgttttataataaactattttacgaaaaataaataagaatcataaaaattggcaagaaaaaataaataaggatgaaaatatatatgtttattttcatttttaatgttatattatttttggttattgttttttgtttttccttgtttctgcttattttttatcattggattatttttaaattgtctattttcagatacatttttgaattctattttaccttcaaataattttcgaatttgatcatataaaatgcttttaaattttttttttttaatttttttttccgttttgaaaatttaatttcccatgacttttctttagtatgctcacaaattttacaagggtaattttgaaaaaaaatgcggtgatataataaagttggtcattgtaatagaggatattattgaaaaaatgcccatatatgtgcataattttttttttaatttaaaataaaaaaattatttttttgcgcaattttgcagattttttttcttttataatacaataaataaaaaatattaaaaaattgtcaacagtatcaaacagcttctaaatttttatagaaataattgatttctattttttagaaaattatctcccaatttttttctaaaaatgcttggagcgcatcaaagtttaaatagtcgttatattttcccaattaaagattttaagaaatttatagtccattttctattttaagtccacacttttttcttaaaagaaatatttttttcttgttttgtattttgtttaaataaaaaaataattaaaattaatagttattgatttaaaaacatgcacagttttttaacattctatttgtttttttgattttatttaattatatctggttcaattccattaaaaaattttattattatttatttgtcaacattgcaacacaataataaaaattaatttattagttaagattttgcatcacaatattctttatgcacggatcattgaagatcgaatctaaaaaatataaaaataatatttgttaaattcctaaataatttttaatctcgagtacagttacgcacttccctgtgttcatttctgaaccccatcaacaaaacggtgtttaagcgaagaattcgcgtaaaaaatataaaatagcgataacatcgagaccattttgaaagttgtttctcatttttcaaataatatattttttaaat

SEQ ID NO: 5077 - DNA, 841 bp, Heterodera glycines
aaagtaatcctaaaaatgattcattttttccggccaatattaattttaagaaaaggagacaaaagaactgaccgcacaaaatgtcaaatgagccaaatgatttaaaaatttgccaaaaaaacacttttactttgtattcaaattttcaataattctatggcttatttcagggttgggatttcatgtttttaacaatatttcgagttttcgtatataatttttttgtggtcaaaaatttgctaaaaattcagtaaaacctaaaaaaagaaatatgaaaaatttctaagagaaaaagtttctaatttttcttgccgtgacgaaaattttaattaattttgacaaaattcgtctggaaattattaaaaaatatttaaaaaaggtaaaaattattttttatgaatttttaagtaggagaataaatttgtggtttcaattgaattttttgagtaaaattgactcttttgaataatttttttctttatttgtgatgttcttatcacaattttgtcatttttttgagtttttagcaatattttgagactttttagcacatattttattatatatttcgcgattttaaaagtgaagatggatttttttcccacaactgcaaaaattgggcccatttaaatggaagagaaaattggccgaagaataagccaaatgaggcattaatagtgaaaagaatgacattttaaatttttcggccattaatatattttttattatttcatagattctattcaaaaattaagtccgctaatggatatttttttcgactctaaacggttttcccggctttacaactgtactcctaccgcgttgacgatgttccgtttga

SEQ ID NO: 5078 - DNA, 3146 bp, Heterodera glycines
  unsure (1)..(3146): unsure at all n locations
gcatttcaatgctcgcaattttcttccttttttcccttctaggaanannaacagnaannnnnnaanngnncgcccgttcgccccccttnaaanncagnctctccatgctatttgtctgtatgcaatgcgcatattcatggcccattcgtccgcttacaaagtgatgtttctgatgggagttggccatatttgttcgctgttcgtcaccgctttgctcaccggactgttttcactctgtggcattgtgttcatgttcggcgccctctttgaacttttttgccggctccacggcactctgttggtgccactaattaagcattagttagctcattaaagcattaattatctcattatctattaagtctgctggtccctgaccacctctctgtccgttctgttggccttcgagcgttgcgtggaacagactttgcccaatttggccaagtcactgttccaagggtgccgaatttggggctggtgtttggccattttggcctattccctttactacggcttcttcacaattccgctcacattcagcggcatcaccgctaattggcagttcgacccgcatgtcggttatttggaggacagttcggcgaatggccaaaatttggtcagtttttaatgggaaatatgaccgttaaatttcaaatgtagggggtgtaaattgatttgaaaaatttcgtttcgaataaaattaattgcccagtgcaccaatttcattaaaaaatcaatattttgtgaaactttttgaattttttagatgtaatttttgacaatttttgaacaaattttttaatttttacataaactcaatttagggatatacttttgaaaaaatttatgtcatttctttgggtatttttcgttcttcttccatttataacctaaaggctttttttcattgtttcaaaccaaggagcgttctaggaaaaaaccatataaaatcctagccctaattcgtgacaattaacggattaaaattttaagtattggaacagcgttgatgcaattcacacaattgtcgtcgccattctgttaccgtcgctatatttgctttttgttgtcatgttttctctgaagctcactcaaatcaataaattgccaatggcggagtcaaaacatcgaaaatcggtcattaataaattattaaattaattacattaattagttactgaatttcaacatttttgtttttaggtgttcctccaagtgtttattctgtcatttgtgctcaccatcttctccattaattacactcttctcaattttgttcccgtccccgacctaatgatctccgtaaatatgtacctttgggtgcttttggatggtaaattcaatataaaaataattttaattaattttttttaaattttacaatttttggcgttcctccgtttgtttacctcgcgttgaaccgttcaattcgtggggaatgcgttcgcttctttcgacctcatgtcaatgcgccacaaacgcttaaaactcagctgataacacgacggcatcaaatgccaaaaacactccgcaattttggttaataattttgtcgatgctgacaaacaacggacaaaaacaacgacagttgaaaatgtaaagcatttaataaaacttttaataattaaaaaatatttggacggttttggagtttaattgtgaaaattttcccaccattttcaagcagtatatgtgaagcattggaccagcaaaatggtcagtcagcaaacaaattgactgacaaatgagtgcgtaacaaactgaacagtgaaaattattgttttgcataattttatttaaatattggttattgttgactagttgattaaaaaatatctgtgtaaaacatgtaactgactgtgtaaaaactaattcatcaaaatttgcattaaaatgtcccaataattttttagtgtttttaaaggttagccgacttttgcgccgcagacatttgcgccgcgacacttgcgccgctcagcaaaaaagactcttgcgccgcgacatttgcgccgtacagcgaaaaaagacatttgcgctctgattaaaataaatatatgtgctttatagaataagaattgatagatattcattattaattcctttttcgaagcctttcatgtcaattccatattgaagtgcacgtaatgattgatcaaatcttgatcattttggctttcattgggaccatatgcgataacaagccttcgtattgcctgatcattaagcggcggattttaagcgaaaaaaataggtaaataaataagggcataaaaatttcgaaataatgcgaaaaatggtaaaataggagcgaaaatttgaaaatcagtgcgttttttcaatgaaattaaattaaaatcgatgaaaataacttattgagaaaattaattacaaaggaattgaatttcattcttttttcgaagcaaaaaaataattggggtttctacagaaaattcttttttttcagttttttgttagtttgtattattaatcattttttcatatctttgatgaacctattcaatgttaagattttaatggttaaaaaattgaatgtcaatctttgtgactagtaattttttcgaattttcaattagttatttttgtcgatggcttatagttttagtaaaaattattgataatagtggaatttttatgaatactataatatttttgacagcgaggcgcaaaagtccatttttgctgggcggcgcaaatgtcgcggcgcaaatggagcggcgcaaatatccgcggcgcaactgtctgcggcgcaaatggcgcggcgcaagtgtcgactttgctgagcggcgcaaatggtgcggcgcaaatgtctcatcacgatttttaaaacgatgaaagtaatagaaaataaaaacgtgaaataaaatgtttacatacataattttaaaaatatattaaaaaatcccacactctctgctgcccgggatgtgaacgcaaaaacccaaaaacccccggcaaatatccggttttcagcgatacgtgatccgcgaccgcgggatttttctgtcagcgctgcacccctgtgtcctcagctctncgcctataagagttttcagcttccctataaaaaaaaaaaattttttaatttttaaattaaaataattttttttatgaatattgttttactg

SEQ ID NO: 5079 - DNA, 4802 bp, Heterodera glycines
tgggccatttttctaagaaaaaaataggagtttttggggcatggcggtgcaaataggcgccgccgggggaaaaattggaaatgttgaccatttttaaacaagttttcactgaaaattagcctatttatagacaaaattttaggggaatttaattcctcattcttagggggtgtaatagtcgcatttcgtgcaaaaatgcgaaacgcgaaaaacgcgaaagcgaaagtgacaaaaaaaagcgaaatttgcgaaagcgaaaacccatccctgatgtaatggtaaaggacattcaatataatggcatttttcaaaaaaattttcaatttaaaaaaaataagaaaaaacgaataattcaaagaaaacatttaaaaaggaaaaaagaatgaatgatttgagccaaaaaatgggttcgtactgatacaataatataattattttgcaatgtatgccttctttttttgaacgatggttaattggatggagatatttgttaaaaaattttaggtttctatcttgatgaaaatttacctatccttttaaaattcttgcatttttagacaattaaaaaatatttttattttttaaatccttaaaaattgtccatatttttgcggttttgagccaatttttagtagttacttgtgcagattttcgtcgttaattttcagccccgccatttcagtcccaatggaaagggacgtttcagtaccaaatttaaacctttaaaaaacacctataataaatatatccaatcccagaagaggtaaataattgaaaaaacatctgaaggataaaacccaaggccaaatcctattagagaagggaaagggaggcagaggatgggcgtcagctgtcatgccttatggggaagggaagggacgcataccacctgagcgctcgcgtgtgtgccatttaagcgctcgcgtatgccatttgagcgcacgtagggaccatttgagcgctcgcgcgtgccatctgagcgcacgcaggggccttttgtgagcccgcttgttaaatttgagcgctaaaaataaaattcgagttaaatgaattagaattaaagttgataaaactaaaattatattaaattaataaatgaaattagattaaaataggattaaaattaaataaaagttaaagttcaaattaattgaaataaaaaaaataaataaaaaaaagattaaaaaataaattaaattaaaataaaataaattataaattaaaataaataaattaaaaaaaaatttttataatttaaaaaataattgaataaaaaagctaacattcattctctctatatctcttctgtctctctcactatctttcttttctttctctctctcactctctctctctctctctctctctcactctctttcttttttctttctctctctcttatatctctcttttctctctctcttttttctttctctctctcactctctctcttctctctcactctctcttttctctctctctctcttttctttctctctctctctcattctctcttatctcactctctctctctcactctctttcttttttctttctctctcttatatctctcttttctctctctctcttttctttctctctctcactcttttctttctctctctcactctctttctttcttttctctctctctcactctctcttatctctctctcactctctctcttttttctttctctctcttatctctctctctctcactctctctattttttctttctctctctctctcattctctcttctctctcactctctctcttttctcttgctctctctctctcattctctcttctctctcactctctctcttttctcttgctctctctaataccacacaaaaatataaataataataaattaattaaaaaattaaatttaattaaaattaaattaaataaattcaaattaaattaaataaataaaaattaaataaattaaaataaaattaaaataatagataaaaatttaaaaataaatgaaaaaatataaaattaattaattaaataattattaaagtcaaatcgtattggagggacggacatcagctgtcgtggcctttggggagggaagggatgccaggccacctgagcgctcgcacgtgtcacctaagcgcccgcatgggctatctgagcgcccgctggtggtcatttaagcgctaatgactgaccgtggatggcataaaatgttggtcatacggcgactcattttagtgtagtgtggcatagcatgaacaatttagttggcaacctgccaaatggtggtcgtataacccaaaacttatttgaggggtgtggtgacatgtggcgactggaggggtggcaaatggtacttgtgtcataacccaagcctaatgaagagatgaagagttgtagaaaaaataaatattaaaataaatttagtaaaataataataatggtgatgatagttaaaaataaggaaataaatgaaaataataataataattaagaaaaaagcgttaagaatttcatatcagatgggaggcggagaggggtagcgtgcatatatggaattttttacttattgctaagcaaaaacattttaatgatggaagaaagaaattttatattgaaaaattaattaataaaatgatatataatatgaagtatacatatattcttatcattatttttagattttaataaatgaattaaacttatttattaataaattatattttacaataattaactactaatattttattaagttcattttgttaaaaatttcaagttaaaatgttctttgattgcattaaacactacaaaagtaaaatattaatagaaatttcaaagaaataaacaattaaaacaagtaaaaatattgaaaatagtgaggatatcatacaatgctaaacggtgcacggttaaagtaccttttatgccgtgctgagcggcgaaatagcctttattggatagaggttctgaacaactcctttaaattaactgaataataaataaagtaaaataaaattcaaattaattcaaataaaaagtaaaataaaaataagattaaaattaaaagaaaataaatgttaaataaaaataaaaataaataaaactaaattaaaaaattaaattaaaattaaattaaagttgtattaaaatataataaaaataataaatacaatagtattgattaaaattaagtaaattatacctaaaattaaattcaatttatggtgttactgacaataaatagtaaaacttttctcctcaatttatttaatatccccatccactaaaaacaaccacataaatctttcaaatataatgaagggtctaggtacaaattctaccacaactatcttctcaactggaaaatttgtatttacagaggcaattaatgagaaaaaatgtaatgacattgaaaattttaatgacagcgctggtatcgtttaggagggaattatttgatgtctcaaaggaactaaggcattattaagggaaggcagcgtcttttagtatccattgatgtactaaaggaatgtatgactagtatacggcctgtatgcgatatttctagatcaataacttttcaactgaacacttggcaaattgatcattattctgtggatgaatagttggaaacagagagaactgcaatagaagtaagcggatatgtttagcatgcctgcaattagcgctacctagaagatgtatattaatgtctaattgaaaaaaataaatgataaagtgcgggagaggaatgtaaaacgttatgaatttatacgaagtcaagttgtccatccagttgtaagtgtattaggctgcgagatcgcgaaaatgttaatgagcaacaaataaatgagcggatttgaagacggaatgaaaaaatttctatgtgacttcatttctctctaccccttcgttaattttactacactctactcgattggtaaaccaatgtacatgtgctgaatgataagtcgagttaaatacccggaagataaacactaccccttgacaatactcaaagttttggatgattcctccacgaaaatgcgatgtgccagtcctacccgtcaaagtgaatggtaggctctgattctctttatttatgaagtgcaccaaaaacaatcaaaaaggcaggatagacgtaaatacatatgcaaacataatgacaaacaatgagatggctgagcaatctgcatttcaatcgaaattaatgttactacggttgaagaaggttacccatttaccaattgatactgacataaaaggaaatggtgagaaggaagctgaatttgtaagagagtgcaaagagaaattagagatcttaacccaacaaagatagctgtgaaccaagaagagtaggattgttaaactatgcttgaacaatttgtgcgacatatttctttacgaaattacagcctttaacagactttacttcattaatgatgtacttgattttggagaatatttcggataatagttcaatagacgtaatggccatcgaggatttggacatggagcacattttgatcacctacgaaaataaaaaaagtgggtaataaaactattcagaaatgatgatatagccggggcgttaagtactctccaccgacacggatagtcttgttttctcacatctacgcgatgctttttagctgaataagatagacaaaacagttcattgatggaaatagtagaattctacactgctggtgcaaaatagtatgcgttggctttaagacgtataaatgttctacatgatgcggaaatggaatacgtgcttaaactccgtggatgacactcaatta

SEQ ID NO: 5080 - DNA, 1394 bp, Heterodera glycines
agccgagcttcgcccacccctgctccggagtaggacaaaacgtcgtcagccgaaacgtcgttgaacgaatttttcgaccataacttttttcttaaacacatagagctatcgaacaacaccaaaaattcttaatttgattgacagcgaacaaagttatggttcaaaaagtcttccgacgacgtttcggccgacgacgttttggggtgcaccgattcccctctcctcccccttttttgaaataacgtgaaatgttaagaccaagtccagtttattgggataccgaaaaattgagtcccagtgattgaaatgccgaggaattggtgagatttgggtacagaagaaaagtggcgaaaaattacgaatattgattcagattattgcaaaaaagcaataatatgcaaacaaaattggacattttgttgaaaatctgttaaaaatgcggacaccccgatacgacgcttttttgtgcttctgctaaaaaatacagccctaaaagataagctcaatgcctaagaatgtttgactttttcgacttttcaaaattatttcgttttgtgtgagagaatcaatataaaataattcattggttaaatatttatttccaaaacggtaaaaaacaagttataataaatcgatttatccgctaaaaacaaagagatagttcgccaaactgagagaaattacaaagaaacaaagagattctacactaggtttttctctgcataataaagttgactaaatgtaataggataaaaaattcttttttacgatactttttcttaaaattgctatagaatttagaattttaaaagtctaatgaatcaatttggtgtccaatttctcgtccatcgtcttaagttggcacatggaattcccaaagtttcagcaatttctttccaatttatcattggatttctttttctcatctcctcacttcttttcgcatattccattttctcagcatccgagtaaattttccttttctcttaaattgaatcaaaattaattgtcattattatattaaattcgattaaaatttcaacataactacttaaattggttgtaataaaatgttactagctatagagtccaattttcttttccaagcagaaattgtgttcattctagcaccaattttttccgctattttttctttaattttccaatttggttccaaactgaaattttttgcaaattcttctttcactttttcaaattcttttactttttcaatttgttgttgcgttgaaaatttcttttttataccttaaaatgagacaataaataataaaaaatcgaatatgccattgatctcttaccaatttccaattccttcttccatttgtaaattttatcccgactaattccaatttcaatagcaatttcactttcaa

SEQ ID NO: 5081 - DNA, 4438 bp, Heterodera glycines
ttatctgatcatcagacgaaacattctgatcaacttgctcatcaaacacattttctttgcttaattgttccaattcaatttttggcacatttaattttgtccgtaaattatccaatgttttttcctttttaattttttgcaattcttttggctttatgtcttccatttcattttcattataattttcggattttatcattagtttattggcattttgttgtttacaattttcattattatcaacagtttcttcctttatggcattaatttctacaaatttttgttttttgatgttttttgagtttgatggctttaggtttttccacaaatcatcaaataaatcttcatcaattccatcaattagaacgaataaaaatgagaagaaaataatcattaaattaattttcagcatttgatgcaaaaaaaaaataataaagaaattaaatttgaatttttggttgctatttacttcctcccccgccgcttattgcatcaatatttatttttccaagcttgttgtttatgatttttatgtcaatctttttgtaattaattttttatgtatggcttttttaattaaaaaaaattacaatataatgttttaatgacgagataattgatttaaacacctaaaatttaactttacttcttcctgtttttaatttgaactaattttattgaattacaaaaaagatataatagataatgataaaagaaattttatgccattaattttggaaaatttaattaattttgttatttcagctatattgtaaatggaataaataaaaaaatctttttttcattaagaaaaataccatttaattgcaatttatcgtatttttatgacgaaataattgattaaaaaataaatccttttcatatttataaatgttgaaaataatttatttattcaaaaaattagaaaaaatttaagaggaataaatattttcagaaaaattttaatttataaaatttaattagaaaaaaaaacaaaaatgcctaagtatatatgtatgtaaaaacctttgaattctaaaacagtaaccaaattccaaagaaaattttattaaaaataaataaattttatttattttttctgcaacagttgatcattggaaattgttttttgtattttttaactaatcgctttccgtgttttttttaatatttttcataaaaaaatttcgaaattttccacttctaaaaactttaaatttccattatgatgccttaaaaatgctttacagttttacttacagttaagaaagttaaagtagaaatatggcgagattttattaaatttaattaggggaaatcaattcgtaaaatctctgacaaaaattgtgccaccattttccaatttgtgctgtgcaccgctatggcaaaatttgttgttaggtttctcgcctttacgggtggtcaaaccgtggcacttggccacaaacacatatattattggtggcactggccaacacttttggccacggagtgccgcagcggccccggccgcggtgctaatgagcgtaaagtgccacggcggaaaggtgcttcctcttccgccaaatttcagtggagtgaccgcaacgcaaccccaaaacatcgagcgactaaattggccattgctttagcatggaatttttattttattacaataaataaatatttaaatttaattttatattttttaaggtaaataaaatttgagactctccaaaatataaatattttttaatttaaaaataattagttttattgaacaaatagcccaagttttgtaatttttaaactatttttaattgtaaaaataggggctagtaaaagagatacaaacaaaaaaaaaaattctttccgtctaaataaattataaaaaatatttaaaatgcaaatgaaaaattttttataattaaaagataaactttattttaattaaatgactgaaaattaggttcgaaaatctgtaaaaagtattttggttaaatcaaacatggcttaaaacttttaaaattattcttccaataaatttaaaaattacattttgaatatatttaaaaatatttgaataatttttttttataatcccctctcatatcttccaccaaaagtaagctaatcctccctttattttactggttggcttatctcttatacaaatctcagttctactagacacaatggcactcacaatttgcattatttttaccatttgatcccctgtggtcattcattttcattgagtgccgcgtgtgggagcggtcggtttctgtccccgcaggggatgaatggggcggcatatggccactggcactcggtcgccgcctttgtggcggtgccggtgccgttcatcttgtcgtgtatgtcctttaaaatgcccaattgcttagattagtgcagagaaacggagaatggcactctcacccactcagcagaattagagaagcagaataacggttcataggcttatcccttctctgaccagcgctgttcggcacggcatcgcccacgagggcaccgagtggtggtcatttttaaatggcttggctttgtgttggcttttgcgcactgactgaccgtcgtatgccttttctgcactctgtgtgcttcatctttgtatggcttctctggcacaacaacactctagcgttttttgtttctctgctttacacgcgatgccgatgttttttcttttattacttctctggccccaacgcttgactgaacactctcgctgtttggccacacagttcatcattctctctttctgtgccagttttctctgctgctgttccattttatgttgtttgcatataggcagagaagcaaaagtgagaaaatatgccctccggggatgccatcggccgtttgtccattctgtccattcgtctcccatcaaatgtaagcggctctaaagctgaatgaccaccattgttcgttcttctcgcgctgcttttggtccttctactgtcacttttttcatcgatctttggacatcttgctgctgtgggcgtggcactaattagctaattactctcgaattgtgtaagtcgaattaattgtccattttaaagaattatattattaaatttggtaaaatttgatttttaaaattttattatattttttaatagctttctattttatgttagcttttttaatattttttttttaatttgaatttatttggtgctcttccacgagcccgattacttatccataaaaaaattcgtatccgattttttaaatcttcttggattttatttatttatttttgtactttagccatttaagtgcactttgtgccgttgatttgtagaaaaataaatgttaaattaaaataaattagctttttaaacactaccaatgaccaaacctgcgctaattttatttgttttaatgctcttctcgttaatgtaaatattttttttcaaaagtgagattgatcactgatcaaaaaggtggttccaattttatcagtgctttcttagattttttaatgtgttgacttttaacacttttagctgcacatttaatgtgttgaccgttgcgagtgtttatttattttggccaatttggcccatttatgcgctgactctctgttcctctcccatttgaggctaatagaatcactcaaatgtcattaaagattcggccagcagacaaaataaacaaacaaagtgtcaatgaacttttccacctacactcactaacaattttgaatcagaatccggaaagcaaaagccaatgttacaaaattatttttcaaatttgttatgtttgatttttttttcttttattttggggacgggtaatatttttttaattttttttttacatttttttaagttctaaatttatggttgataatttattttcgtttttttttgcgaaggcactttttcctatggtttttcgggggtcattgaccttataattcggactcgaaactttggatatggaaaaatgtggatttttttatttcccattttattttttgttagaattatatacccgaaattttgtcagaatcatcaccaaaaaagtttttccacattttatgtttcaattgctctcacccaattaattgtttttaaccaattaaaaattacatttttaccgatggatgtctagcggagccaacagttatccctaatttaccataaaaattagcttttgcgattttattgctaatattatgtccctaacatatttttggcattcgaaatcgccacccagcaggcggttccgaaaacctcatttcatatctcaatgaaaatgtgggtgtgtactttgccatttgagtctgtctgtccatcagcaatggtccactccaattggccactaataaaatgccaaaatgccatgccgtcgtcctcatcggctcggcttacaattccccaccgcccagcaggaataagaaatgggggaagggagtgacata

SEQ ID NO: 5082 - DNA, 4798 bp, Heterodera glycines
ctttccaaaattcaagcaaagcaaataaaatttaaaatttttacgattgaagccgatgggtcgactgaatttcatgggcttttatggctttcgttgctctcatcgcgtcacaaaatttatctcttcagcccaatcactttggccgacattcgtcattcatatttttattattatttcttcacaatcaacgcacaatttcttcacacattcgtacaggcatcgtcgaaaaacgtatctttgggcaaacatacaaaataaatacataataataataataataataataataataaaataataatataaatgcgtgaaaaagcgcaaattttaaccatacaaaaattttaattaaagattttagaatttaaagaaccaattaattttcgaccttttcaaatttttcaattaaattttaaagtttttcgaatttaaaaataacgacaattaattaattaattgatggcaacaattttgcaccttttcaggttttaaaattaaattaaaaattttcgtatttaaaaattgataattattaattgagagctgagagaagaacaaattttgcacttttcatattttttaattgaattttaaaatttttcaaattcaaattgccaagcaattaacttaggtatggtccttgggggttccttgggcttaatttcagctaattttcatagcttagttaacacaaaccacttaaattccaaattacatttaaaatttgaacattttttaaaaattttttttcgtattagaaacaattaaacgacatttaattaaaatattagtgggccccgctggattggtaaaattttaatgactcaagccttaatttccgctactttcaagaccgaacaaactaatcactgaaatattattaataataaaagtaaaaataattattttttatacaaaatttaaattttgatcatttaaattcattttgcatcaaagatcgcattttaactttaagccttttattttgttcattttgttgaaatgataaacaattttttgtttgttttcttttaatataaaatttcaacaaaattttggtgacaatgaatttcaattttttttatttattaaataatttcaaaataaattttgtcatatataatttttacacccacatacaatatgaaattaccatttataacttgtattgaataccaaattttcttatacaacaatcctttatttaatatttacttcaaactatgattggttaaaatttttgtatttatttattaaagcggacttttttcattaaacaatttgtaggactaaaagaacgtggaatttttgaaaagtcaaaaggccagcgctgggctctgagagcttagaatggttcgggattcctggattaaaaatctcattttacctggacttaaattcctggtattactgtatttcttcgaatagattttccccgggggttttatttttcaaccactctctgaagggagctttaaccgaaggggaagggggctctaatcgaggggctataatagatcaaactctgaggtggggctttaaccgaaggggcgggggcctctaatcgagggggctatgatagattaaacaaggtattagttttatacataaaaatcacagcgacatcccagtcccacccagacccttgaattaacaatcttattaaaaatatttatttatttttatttgtttctcccccccctcctttttcaatttttattatggccaatttaagcggcggataaaagggaggacacttttcgtttttttccatcaatatgtacacacatacaaatctcacaaccattttacacaatttgttgtcactgttgtcgtgctgttcctcctcctcctccaccactatttttatgacatatttttgcctttttctgttcatccctatcattcgctaaaaatcttacgactcaattttttgtgggagtattattggaatagaaacaatttgacattattaaaaacatttttatttttgttttggtttgttgatgatcacagtaaaagttctcccgcgattttttcattttaattttacatttaagagaattatttatttatttttttaccttttttattttttgttaaattcttacctatcaaactataattttattttgctaaagagattttggactttattttaattatttaaaaaaatttttgttattgcccattttttttattaagaattaatttttaatttttttgcatttgcttttaaattttctttatttatttagttaatttccatatttccccaaatttgctcattgttttcacaggaacaaacttttctttctatacgaattccatttccaatgttcgtacacagtattattttgtttgttgtctttctctgtcgggttcaaacttggctttcgaaaacaatagttacagtagctgcttacatcacgcctttgatcattattaaatccataccgtcaaaaatttttatcagtttttacctgctatgtttattagatttgcttcatcttgtcatcatctgatctcatctaatgattccatttgtctttatcactgttaggttttggtctgatcaggtaatttaggtagatctgattgccacttcaattttgtctatttctgatcgccttctcccttctctgatcataccaaagttagtttctgattcaaaatccttctctgaacaatctgaaattgtaaagaattcatcttgcacaccacaaaagaaagtagtataattttgatcagcgcgaaatgcaaaattcacggctaattgggcaatttgtaaatgatcatcgccaataaattattttccaaaaatattttcgggctatttacatgatccaatacaagcatttcgctaatattttgcataattttaatgtaatttaagtgttttcaatgtaacattttccatattttctcctaaaattggtgaaatttcaaaaatttcatagacaaacttttcttaccaccagacaaacaaacattcctcccaaaataattgccattaaaattagtaatgtaaaattttaaaaaaaataattgtggcgcgataaaatttttcggaaatttccccccaataaattttcctcccaaaaactatctgatcaaacaaaaaattgttgttcattcgccattttcctgaacgaaaaacgaaactctcactttctccatggtccgtcccggccttgacaaaaagtcacatcaaaaggcaaccacaaaaattttattgccgaaatttaattgttcgcccatttatttcactttttttttcttcggagttaatgtgttgctcaggccatgtgcatatttaagaccaaatgatgggagagagaactgtgcacagttcagcattttcggcctgtaattttactctttcctatcagaattattatgtttttgtttttttaggctttccgtcaattacatggaaatgtaggaaaaccggaaatttttgcgggagggggaacattaggcacctgattcttgaataccgaacagggaagaggaatgtttctgaggctaagcaatggaaaagaaaacaaaaaaaaaaaattcccgaacccaaattagaaaattcgagacagaattaatccaaaacccatgtccaattgtcttcacgcgaattaaagccctgggattgggattgagctgtgtgttaaatctctgatctcgaatcctactggagataagtcaaataatcactgtaaatcctggtttccgagctcaaaattttgaaaatccttattttccctatttttaaaaattgaacaaaaaaattttcttatttcaaccaaaatacattaaaatttttaatagctcttcctcaatctgccataatctgttgatttgtttaaaaaattttccacttaatataataaaaaattaatttattaggcaattaaatccatgttatctttgggacctacattaggcaattttttttcgaccaattaatctcatggttttccaaatcgtcgttttggttgttgcgccgcgccctatgtttccttttttgggccattttgcccggcggccccaccccaataaataaaataaaaaataaatttgtcgtctcatcagtctcagcggcggttgcgctgcaccaacacgccaaaattgctgcacaacataacacaaaaactgttgtttacaattacttacactcacatcacaaatgacacgcataaatgcactttagcgcccattcctgatttttttttttcaaaattccttcccgaaattgatctgaccacgcctgatcagtcgagtccgccggagggaaatgatcggagtttgggattgggttatttttcgggcggtttgcccttttccgttttcgaaggactgtccttaacactcgaaggtattcttacgatgcttgagcggtccgccggaggtaatgacggaatttggattggattcaaatgaatttcctggttatttttcggacggtttgcccttttctgttttcgaaggactgtccttaacactcgataaaatgttcttatacgccttatcggtcggtccgtcggagggaatgatcagaatttgggattgggttaaaatgaatttcttgtttttctcgggccgtaaaaaaatttctataattttgcgacgagactgtgagtttctatgaaattctcttcgaaatttcgaggtcgccttatcgatattgtaaattcgaatactgatcacttgtcgtgactcgtgagtatctcgatttagatatattatctctgtgaaccgatttattaattaaaatatttttaattactttttttaaaagacc

SEQ ID NO: 5083 - DNA, 8439 bp, Heterodera glycines
aaagttgcgcattttgccgctccctcagactctgatcgatgaaagtgcgcgactttttcggcaattcgatgctgccctttgtcgcctttcgttgtgccattgtctgtcggttctcctcaaaattggccacacagcggaagattttcatgcacagaccacctcctaattgagtgatgtttttgtccgtcacacccttcgcccccccccgcccccgcccatttccccaccaaaagtggcgatgaccaaaacgccctcctcgcgtcccatgcgtagtgctgttcgagaccaaaaatttcccgagactcgagaccgagactcgaccccgagaccgaaaaccccgagaccgagacccaaaaaacccgagactcgagacttttttcaaaaattttcctattcgcttaaaaatcgttaaaaacattttttgactctattcttaactaatttttggttttttttttaattttgattcaatttggtacaatatttatcatttcaaaaacgcacaaaacaaaaattcattaaaatttaagtgcaatttgttaactgatttagtccaaaaaatgaaaatattttacgaatttaattgttaaaattatgattgaattcccaccgaaaaatgaataattttatttattttcttgaccagatgcaattgtgcgggcgaaattgataaaaaattagtcactttaggaatttttgtgcataaagacactggattttttcaatttttaacacttatttgcgcacctattttggaatttttgacaaaagtgtgctgctaattgacacaaaatgaaccgacgactttaagcagaaaaaaaaatgtgaggcattttcaacttaaaagatttctaatgtaaaactcggttaatcacggaaatgaaaaagtcttttgaaaaccgacaccctagaaagtgatatttcttgatgcgattgaaaatttttcaaaatcagaacatcgggcttaaaaaaaaccagattttggggtctaaaaccagaacatttagcgaaattgcttcaaatcagttatttttaaaataattcgaatagatcaaaaatgtattaggtaaatattatattattcgcctccgattatcgaatttagcaatgataattcaatacgagatcttcccaacagaaaaatacattttgtcctccgttttgcttattttacagtgacatcaatggccaatgtcactttgtcctcttctttgttgtaaaatcctttgctcgggtccatcaattccttaattacccataattagactatttaatggattactcactcaccgcaaaagtaatgaaaagatggaaacccaaccaattctttgtgttgttaatgacacggtcacttagtgtccccgtggaattggccgctttactcttttgccagacaattcgaaaggttgccgaatattcgttgcgccaattaccctctcctattcattgcaaattaattattattttaatgattagggcttatatgcgcaaaaattgtcaaaaatatagttgccaaactgatggtaaaattttccaaaatttcttaaaattcgttaaatataatttaaagctaaattattaatttagaagaaaaccaagtaaaaaattatttttgataaatttacaaatgttttcaaagttaataatattctcgagaaaatccttcggcgttttaagcagtccccattcaaggaaaaaaatttgcaaatatttgagaagcccttttaatgaaaatttaattttaattttattaccttcctttgaagcatcataccaaaggtaaaagcccaaatattttgctttgccttcactgttctgtctgatttgtgcttcaatttgccatgaaactccatttatatgcactgcatcacttattcggcgactccccactttttccccggcaaattccgacaattttccaatttccaacgcaagtgtcccccttcggttgcccttggctgtgttccaatcaaaaattcgtccatggcttgggaatttcaaggcgtacaacagctcgtcgggtacacgaagatacaaatatggatgagaattgtattggtaaatgccgtacacttcttccattgttagcacaccaaatggaactgtaaaaatttcaaaatttgttaaattttccgtggcggtacccccgtagcatacattttaaagcattaaagataaaagctaataaaaaaaaccaattaatactgctaatttaatctcccgatccaaaaaattttaccgacgccttttgaaaactcctcctcatgaatatttggaaaacgaattttgaacagtgccggaccgagtacagaacgacgattttccgaggaacattcaatgccattctgaccacatttttcatcggcccaacggagtgccaaaaatgaaaaaaaaaaatttaaattcaattttaaaatcgaaattacagctttccaaatttgaaattcatcgctgaacaacaaaagatcactttcgataagcccactcaacattttttgatcaatctgcaaaaagtcatctgattcgaacaatttagccgcattttggcaaatgtaacgtaaacattggccggaaaaatcctttaaaaagtaataaattatccaaaatgatacaaaaaaagcctgaagtccctcaaaaactaagcacacatattacaaaataagaatttaaatctgtccttcccacctccaattcgaaaaggcaagcataggcataggcaaagaaaacattgtgtaattcggagatgggaatttgcaatgatgggccgacaaggccagaaatgttgtactttttggctaattagggaattcattaattaataaattaatttccaaaaaataaatttaccggcataaagcactgccattgcattctctccgttcacttcgctcaaatcatccgtgtaaatgaagctcaacatcactttaaaggctgctgcttcaacgtcgggcacctccacagcagaagggtaattagctaattgcaaattaatcgtgtaatgagcacaactaattgaaaattaacaaaaattattaatctttttttaccgttttcggcttgttctttgttagcgtcaaaacggaacattgcctcgaatacgtcggaagcatgcatcaaaacaagtttatgagctggcacaagcttaaaaagatttttaatttgaaaaatggaattattttattttttattttcaaaaatcgcctctttttcttctccatcccccaccaaaaagtgcacatccgcgtactctcccgtgctcagcatcaattttagcccagcaatccccgctttggacatgataaattgaaatatttgctaaattatgacagataagatgatgttaaatatgtcaagtgtctcctcatgagataatacaaaataatatagtaaaaaaaaaacttaaatccattttcagagaaaagaaaacatgaaaatagtatgtagataacagagaatttcttgggtttccaaaaaaaaaaccgaccaaaaaaggagacttaaactaaatattaataccaaaaaaaacaaaccaatctttttttttgttgtattttgttgaaattataaattttcaaataaaaaatgcttaaaaaagatacaaaaatgaactttcttattggggaggggacaaataaatactgcggcaaaataatgacctaaaaataggtatgataaatgaacttatttgaagtaatccatcttttttaacaaagatgaatttgattaaaatgtaccaaataggatttatgaattttacaagttttaaaatcgtttttaaatgaaaaatgcaacaacaaaattaggcgtaaattaatcaattagttaattatcaaggataattaaaaatttcacttttcggtaaatattgatcataggccccaaactcaaaaatgcttaaaaacggtcagaatcgatgtaaaaaggttcgaaatgggttggaaaaatagaattaggggtcaggatgaaaagtgccgaaaatggagtgccaaactcagctgggactcaagtgaccgcattataaaaagcagtcaaaagacatttaaataatttttctaaggtgatttttggcgctgataacgaatgtgacctttattttcaaaattccgaaccccgaacccaaattcgaacaaaaactcaaaatttataaataaaagaaaacatattattaaggggttttgaggttgctgaacacggttatgacatccattttgaccaaatttgaacaccgaaccctgactcgaacaaaaaaccgaaatttaattttgacaaaattcaaaattaagcctaggcttaggcttcagcttaggcttagggataagtgtttatctgagctcccaaactcaaaaacaccccaaatcgaagacaatctaactttcgcaaaagggagcatgcgaagacggagcaagtagtggggcgagacggagggcggaggaatacattgcgaggacgtatccaattgttaatttcatgattatctgataaaccagctctggatccagcgaagtcagctggattattgaaatatcctatttattcagttctgatatcgaaaaaaatcaactatgtatagcttctagaaatttatacgaatatttctaaaacatagctaagaattaaaaataaacaaaataaataggcaaaaaataaataaaaataaatatgatgtgatgtgaatttctaatcattttcataaaattcactcatcaatttcctcatcacaaacaattttctcgcagtaatttgcgataaactttcacataatttttcgacatttgctccagggaccagcgctgttcgacaatttggcgaattttggcacggtctagcttcgacacacgggcaaccagttgcttgacattgataaagtcgaaaatcatttggttgtcttcataatcgaacgtcacaccgttgacgtcatcgatgacaatctgccaaatttcagaacattttttaaatttgacacaaaaagcgccaaatttggtgaaaatatgttaaaaagtcagccaaaaatttcttagttttccctgcgggctaatgagcctcttattagtctacgaaggttgaaaaaaaattaaaaccctattttaaaacttttggtcacaatttcttttaaatcaaatgaaattttttgaaattttataggctcacagagaatcttagagatattaaattatactaagaatatttaatttggatgaatttttgacaaaataatgaaacgcttaatttgtcattttattttatttttttgtgaagaaattttttggcaaatttttgttaatctatataatgccaccctaatgaaattttttttaatacattaaaaattaatttgaaatcttctgatattttcaatcctttcctttttataatttatattaaagccattattaataattatgttttatacttcgccgaccgccccgcgttgaatggcaatcaccggcgtgcccgtggccattgcttcgatcattccgagcccaaacggttcgtcccattttggcgtgaacagaaatgcggtggcattgccaagaaaatcgcttaaataaaaattatttaaatttaaatatttaaaaatgcttttcgctccgcccactttcgctgttccggcccaatttcgcccacatattcgatcagatcagcatgcttttcactgatcagcggcagaatgcgcttcatccaccattttcgatggtcgtccacaatttgggcagcaattttcagcttcatgccagcctcgatggcaaatttgatcgccacatcgacgcctttgtccggaatcattcgtcccatccatgccaaataaggctgctgctgctttggcacttccacaaatttgaagtcgtcaagattgatgccgttgtgcaccgagccaacccagttcaaatcaagcacttaatttaatttttaaaagcaaaattttggtgccaaaattagggaacgctcacatggataagacccactaatgatgtaattaaacgccccactaattaaatgattaatagtgtctttaccaattggtgtcaaccgctgttgctcttcactgatcgaaatgtgcgggacgtcactgaacaggccaaagaagacggtgtcgtccacgggcatgtgccgtgtgtggaccgcgtggttcaaaaagtgccggaattcgatgaaacttgacgggtcatggaagtgcacaatgtcatattcatgtgcatgtcgtttgaccatttcctggagtcaattttttgggaaaaatttattgtttagtaactatttttgggttattttttatgattttctttttgtaaaaatataaattttaaaatcgataaattaatagaaatcatattaatttttcacaaaatttccagtattaaatggtttcttatacggttttttagtccagttattgtccccagaaaaatcggtaattaccaattttctcgaaaaaaactcggtaacaaatcggaaatttacaaaatccgattggatgaataatttgaccgtgccgtgccgaacataaatgtttattacacatttaattacctgattgtaaattactggcagttgacacttcacccaattgtctttgcatgcccatgggttactgaaaaaaagtttttttccaaaaaatattaataaaatttgtacgttttgaatggaatttcaaacagttttgcactcgtttctgaaccagacaatgcaagcaaagtgacctttaattgaagtcaatttttcttttaaattaaattaagccaattaaatggtgaataattaattaatttcgccttaaatttgagtcaattgatttttaaattaattagccaattaaatgggcgaatttttaattttatgccttaaatttgaagtcaattgtttttaaattaattacccaaataaatgggcgaaaaaataattatttttttttaaatctaattttgaatttttattaatgacttacgtcatggccaagcttgaccagcgactcggtcaaagcataaatcattatttcagttccgcccgcctttttaggcggaagtgtgtcaaaaatgggcgacgataccaccaaaattttcagtttttgtccgctcaccgattttttgcactaaatttttaatttgaaataaatttatttaattttaattttttaccaatttgtgtttgtccgcttttttcactttttgttgcatatttgcccattcagttttgttttgttgtgccaataatttcgcataaatttgttcatattgtgccgtcaaatcttcacttccgtcttcattcactgtgccaatcacatttttccaatgggctgacacttgttctttcagctcatctctgaccacaattggcacatttgggaacaacttaatttcattgataaattataataaaaagatttttcatttcgagtttttctcactcagttcgaaattcctcgaaaattgaattaattaattcattaattagatttataattcattagtggtggggcaatttctcctcacaaatcaatcttttacgagccaattatgtaggaactatcttctagcagtcatccatttaaaggcattaaaaatgctttacttccattcacctaatattttcgaattataattttttttattcattttgatcacccccaccccctctaccttaactcttccaaactgatcagtcgagtaataacaactgaggaataattaattaacttagaattaaattattatttttatccgccttccccactccaacactaataatggttgtattgatcatttttttgatcaggtgctgatcaactttttcattttgatcactcgccctactccctccccgctcacctccgccaatgggttcatttccgtcactttcccatccgccggctgatcgtacagcgtggtcactgttttggccacaaaatcgtcaatgtgcggcaagtgttcaaaagtgtggaagtgcaaaatgtcaaatttgtcggcacggcgccgcacctgttcaaacatccatcgataggcatggttgaaaatgccgggcaccacgcgcttgtgacggaaagcgccgctgaaaacaaattaacagcaattaattctaattaattatttttgatattaatgtgaacaaattaagggcaattaaattttcttttattcataatattgattgctttttctataaacttaagtaaataaaattattggtaatcataattaatatactgaaagcatcgctgtttgagagacaaccataggcaattaggtaattaataattaatcggtttaatatatttagctaatgttaatttaatgaaattttttagttaatatgcttttcaaaaattactatgacgcatcggtgatcagatgagcagaagtgtttgagtcaggagaggcaaacagagtaaccttaatcaagtaagaatcattatacgcgaaattacgttggccattaaaatagaat

SEQ ID NO: 5084 - DNA, 3225 bp, Heterodera glycines
  unsure (1)..(3225): unsure at all n locations
cgtccttcccgcatgcccatatgtatttgacacttcagacaataactatttatnaatgatttttgtccattggtcatntcattcnnattaatcacttacggggaaggaanagccaatcaataatccattatcatttattatgcnnttaattnnttccttctttggcatttgtttacccatttacccagtactttttaccatttatttattgtcagattggtattattatggcaccatttttgtgccaaaattcctcaattgttcattgtcaatttttggcattgtttttcccccttttttcacattttcatttgccaattgctttacattttgtgccaaaattcattgccatatttttagtattgttttgtcaatttttgcacatttttgtgccaaatttccctatttatttcttgccaaatttttgcacatttttgtgccaaatttccctatttatttttttgccaatttttggcattcttttgccacaatttttaaccctttcttttgccaatttttacacatttttgtgccaaatttcactatttatttcttgccaattttttgcacatttttgtgccaaatttccctatttatttcttgccaatttcttgcatttgttttccccattttctcatttaaaaaatatttaaattcttggcattctgtttttttcaaaattaaattatggcgttctgtttttcaaatttaaaaattattttcacatcttgggattctgttttttcaaattaaaaaaaaaaatatttcaacccttggcattctgtttttttcaaatttaaaatttatttaaattattggcgttctattttttaaatttaaaaattatttaaattcttggcgttctgttttttcaaatttaaaaattatttaaattcttggcattctgttttttttcaaatttaaaaattatttaaattcttgccgttctgtattttgaaatttaaaaattaattaaattcttggcgttcagtttttttcaaattaaaaattatttttcattaattttccgctttttccaaattttaattatttttggtttccctctttaaaatatttttattttccactcttttttttccttttttattcatttttccccttgttttttattcattttcattgatcataagtactttgtactgtcctttctcaccccattttttgttggtttactcggtactaaacccctttaggatatttgttaagccttttcaaatatcctgggggccatccttaaaccgaggagtcctgccccggtactgggttacttcccagagtggtgggcacgggcgttcactgtccacggggcttattccgctggtatccagggctgcggcagtgattgaccgaaaccatgtttccgtcatagcccgccgggtgtcacagcgatgtttaagcccagccagatagtcggtctggtgtggacgggggcccttcactcgctggccttgagggtgaaggtgtgcctgttcctagcagcgggggtggcggttcctagccctaatgtgccctgcctacgggctgcattggtacagcgagagaataaccgggactggctggcccggaggaccgtgagtcactgagcagtgtcgaacgcgcagctgctcaaactcaacaccccggattaaaatccgcgtagacggaacacatatgtgctgtgggcgttggcgcaaatgctctgtgaagggagtaattacccgacacagagatgcctacaccatacctccgcactttggtatggtagtgccacacactttgtgttccatgagcggttccataatcgcttgctatgatagtcatagttggtgggcatttttcttaaaataaaataataatactcaattcaattttagaataaatgagccaattttccgacgattccctcccccctacccttgatggaccgtattcccctgtcggggatgatggaaccgaactgatggatgatgcgccgccgctggaaaacgtcatcaaacacctgccaaacaccgtacgtttttgcgaaatgtttttaaattttcttttctaattttgtgagatcgtttcaggttgtgccgtctgaagagaatgagcgcaagacccgcagggagccatcaattacccgcgaattggacgcggaattgttcaaccgagatggatttgtgtgtttatccgccgcacaggcggaagcgggacggttcaaaggtgtggttgtacaacttttttttaattttaaaatttctaactttaattaattattcgctttatgctatgaaaagtatataaaaatttttttttatttgtactttgattaattgaggtattttaaatgatgtttagcgtttcgattcattggccaatttttgctgagcctaacgttcggcgctgtttttccggaggacattctgcgcaacctctttaccatgtgcctttcctacgcagtcgagggggccgaatcgatgaaaatatctgcggaccacttcattttccttctgacgtcaaaacaccttgactacgaagtggctgtacactttaaaaaaaatcgacaacacggcaacggagaggattctgactcgttttgaaatggtcgaccaaagcaacaaagcgaaagaaagaccgtcgctcctcgaagagccttttgtaatagacataacggcaatcgagagcaagtgcgccaaaccgaaaatggctggaaaagggcgtaacgacttcaacatcgactaccgtattgccgatggtgcaacgtatgagcttctgaacaacgacaatctctgtctcttccggtcatttgaaatgcttcggatgaaattcatacttgcgcaacaacgtttttcggaatacaaaagggatgagagaaagcagcttgaaggcgttcatgctttgtgccgggggtgcaacattgacatcaacctacccttctattcaattgaggaatacggagaatcaattcaggcaaataatttgtttattaattgactttatttttaagcattatctgttaaggcttattatgaggcgatcaatgccggcatgtttcggcttttttgctttgaaacctttggcaaaatgaaaccttcatggaaatcaactgtggacaactatacacatgaactttccgttatttttattgatggtgaagacggcggtgaagggcactacgacccggttaaaaatgttggaaaacttttcagtgcacgcaactattgttttggggtatttatagat

SEQ ID NO: 5085 - DNA, 4804 bp, Heterodera glycines
  unsure (1)..(4804): unsure at all n locations
gatgccatttcatcaacaaacgcaacacacagcaaaatgcaaatggaaatgccacaactgcctgcgtgttgggtctgcctttcgaggaaactgcgtccaaggcaatgacaacttttttgagacctgcttggggtgcaataaagtaaagttatttgagtttcgtttcaaagaattttnttgtttagacatttaaaagtcgtgaatgctatgaacaccatgccaaatgtacaaactacagggtcaagcgtgacaacgaacatgaaattgtgggaaaatcaatttgtaaaagctcgaagaaatgcgtcgactgtggcgtgatttaccaaattcgggttattataaaataaaatttttttattttattaattttctcttaagcatcaccaacaaaaagagcatgtttgcggtcaaaaattctgcaaaatttgtctcggcttccatgccccgcgagactgctacataccataccggcctaaagtcaagaaggagaagcgcttcgtcttctttgactttgagtgcactacggatttcaagcccgacccgcaactcatgcggttcaagcaccaggtaattattttttgaattcaaacacaatttaaaaaaaacaaaggtcaacttctgcttcgcccatgtgacatgcacccgttgtattgagaagggcatatgggtccaagagcttgaaagggcttgtgcgctctgcggccgtttccgaacttatgcctggtcaccctttgaattttggcacacggacgtggaatgccacaaggtcgtcgaggacccgcttgctgccttcaccaagtggttgttgaacttcgaaacggaagtcctcggcatggagcccggagcgaagaagcgcagaaagaggaagaatgccgaaaacaccgacggcgaagccatggaatgcgaagaagaagaggatgccgtagatgaggacgccgagaacaactggatgctggggtatgaagaagccggggagaaacccgagtcggtgacaacgtacgcatacgcccacgccggtatatttgaaaataaaatttttgtaaacatcgatatgatcacgtgctgatttatggtgaaatgttgcgcatgggagtccgccccgaactcatccgccaaggcaaccatctcctggaaatgaaggcgcgcaaaacaggagtctacacacccaccgtgtttcgggacaggtaaaaattcgaagatttaaattatttaaagttctattcattcagttataagctgataccgatcaaattggcaaattttgtcaaaacgtttggtctggaaattgagggcgtggaaaacaagaaatattttccacacaaattcaataaggtaaggataatttattgaaaaattgataaaaaattaataaaatttaggcggaaaactacggcacagtcttggaaaccttgccaccgatggaggactaaggggagttcaaattcggcaactacagcttggatgggatgatggagcgtccagatgaggacaaaaatttggccattgaggtcaatgggtaaggaaagaattccgaaaaggtgccaatttccccattgaaaaaggtgctattggcatggatgcccaagctgcttccccgacgatgcggcaattgtgcgcggaggagaaacagccggtgccctcagggcccgtgatgccaagcgaacccgggacattgcgcgggagttcgaggtggaaatcatctgggagtgccacctgaacgcaatgctggaggacaacccagccatgaaggcgtacttcgacaactgcccggactccggaccaattgacttccacgacgccttctttggcggtatttttgggtttaaatttgcaaaataattttgggcacaggtcgaacagggcccgaatatttgggcgcttcggtgatcaaccctgagacgggcgactggaagagccgtacgatcaaagtgaaggactttaacagtctttatccgtcgcggtaagaaatgtcggaaaaaaatgaatagttgaaaaatctttggcactttaaggaatatgttcaccaattatccggttggccacccgaccgtggtgcagtttgacaaggacgtggaatggaggcgtccagaggacgttgttggcgacgacggcatccgccttgagggcatcatcaagtgcttcgtagtgccgccccgccactgccactacgatatcccggtccttccgtaccggctcaacaaccgcacgctgttttccctctgccggacgtgttccgaaatgtacccgcgcggcttgatcgaccccgagtacaattgcgatcattttgaggactctgaaaggggtgagtttgaagcttgtaattaagcaaatattttttcttaataggcttttgacaacagtcacacacattgagctggaagccgctctccgctcgtggtacaaggtgacgcatgtgtaccgtgcctatatctggcctctggcgtgcgattggagcaatgggctgttccactcgtacctgctgaagtttctcaaaatgaaatttgaaggtaaaatttaaaaaaaattaataaaaatcattaacaaaaatttaagcaagcggatatccggcgtcttgtacggaggctggcatcagcgaggaggagtcggaacggcgcaagcaggaccacatcgacaaggccaaacaaaaggcccacgttcatctggaggctgaccggatcaagcacaatcccgggctccgctacctgtccaagttgtgcttaaactcgctgtggggccggttcgcacttcggtaaaattttggttaagaattatgaaaaaatacaaatcctacagaaaccggcttacccaaactcgaaatcgtcgagtgctatgccgaggtggccaaactgctcaccaactccaaaaattgggggcagcagcatttgttcaacttggcggaaaaagttttggatgggcttggttaaaaggggcaaaaaagagccttggggggggaggccccccccaaccaaggggaaaaaaaaaatttttaaaaaattttaaaaaaaacaaattgggaattttttcccaggggggggcattggccctttggggcccccccctctttgggggggaaaacccctttttttgggaaatacccaaaaaaaaaagggggggggggcccccccccccccccgggggaaagagccccccccccccccccccctcttccctccccctggggaaaaaatataaaaaaaaaaaaaaaaaaaaaaaaaaggggggagaaataattttttttataaatataaaagaccacgcgggccccaagatttttttttcttataacctaaccctccccgccccgcccggtggggggggggcacccacccccctccctcgggggggggggggaggggagatcgtgggggggggcgggcgccccccgcccgccccacaccccccccccacccccccccccccaataaaaaaaaataatattttttttttttgtggggaaagaataaacatacaatataaaaaaaaaaaaaaaaaaaaaaaaaaaaaaaaaaaaaaaaaaaaaaaaattgtttttttttttttttttttttttttttttctctccctcggaggaaaaaaaaaattaaatattataaaaaaaaatttaaatttttaaaaaaaaaaaaaaaaaaaaaatatttttttttttttttttttttttttccctaattttggaaaattttttttttttttcttcccacaaacaccaccctgccgggggggcttttttttttttcaaaaaaaaaaaaaaaaaatattttttttggggggggggggggggggggggggggggcgccccccccccccctcccctcattccgtcntaatagggtaaaatgaaatttttccaccgtaaaaactcagtaccaagttgcgtgacgaccaaaatgatggtgtaacagaaatgccgacgtcctcctcgtggatggcgaaatggttgtgcttttgttgtgtcgacgaattttgcgacaataatttttcccaactttcaagggtactgttttcaaccattttttttgatgatgcctccttttttgaacaaactttgattacaaaaatgggattttagtataagtgaaagaataatggaaaaatgaatacaaattgtgtacagtatattgagtaatgaatgaatagtactactgtaatatgccagagatgggacagaatttagagagcaaatattaacatttttttgtggcagttaaattcgggttttcataaatttttgaaacctcggaatttgttttaagaaattttaggcatttacgcctaccgtatttaaaaattttctctgctaagtgccgcctgagtttcatttttgaaggaatgaaaagtattcattcaaatttgcccaaacaatcacaggtgaaaaatgataccaaataatgttgctcgcaattttaaactgtttaatgttaaacggttctccgatgggttggacaaaattgggataaattaaggcatattaaatataaaaaatgaatacgacaaaatcgggtaaaaagaaagtatagaaaaaaaaattcaaattttttaaattgaaacaaaaaaaaaattttttttttagaaacagaccaaaaaatttgttttgtcgcctccctgccccaccccgtcccctcttcgaggaggagaaagtgctggcgttccgcactttttttttaacactttttgatcccccaacaaaagaagattttgatgagtggaaaatgggcagaggaggtgtgaatgacggacggacgacgacggttcagtgattagagaaggcgcgcaaaatttatttgtgttctgtgtgaatggtggtgat

SEQ ID NO: 5086 - DNA, 1759 bp, Heterodera glycines
atttaggtgttatgaagccttaaaaatgttaattttccgactttttcacaaatttttggcttggcgacattttgactcattttagcttgggcgacatttcgacgcggcgacattttgacagcgcgccgtttatacgttgtttggcaaaatgaacattgttaataattaaataacaacctaaatgttgatctccgaagaaacaatatttttcttaagaaaaagttgttttgtctttctctactcccgggtctagtacgagttgggtttgtccggtataaatacggccacttttttgaccttgcctatcattccaattctcatcatttttttttgttgaattcttcgctttctctggaaaaatgtttacggctacctaaagcaaaaattttctaccaaaaaaattttcaaaaaggttctcttttaaactagcgccttatttcgagccctagcaataattaaagcctaaacggaaatcaggtcgaaagaaaccaaataaaaactattaattatgagtgggcctcagatacctaaatgaatacccatttatatttacgtatacccattttctttgtgtggttaaaattctttgctgattttgttattgtttagagcaatcataggcaatggagccggtccatttatcgagcccttcgcgttacactttgtgagcattctcccattatttctgtttttatttctgatttttcagataccacttctctgatcgcttttatattgagccaattgcatcgaaaggttatgtcgattcccccgccgttggcacaaatttggagattgatcgattttccagcgaactaaagctcagtaaacagtttaaagtgcttgtcttcatctgtactttttcgttttttagaacaaagtactgcgccaatttcagttgacagttcaaagattcagccgattgatggcctcgttggcatcattcagttggtgtccggcccctatttgatcgttatttccaagtcgacgagtgttggcacgttaaacggcgcggacatttaccgagtcactcgtactgaactgatccctttccgtaccagcgaagcccatctgagcgaaaacgaagtacgaacagtggcggaagggagataaaccgaatgggttaaaccatgaagagaaacccattcttccgtttttaatttaaatttatttgatgtatttttagcgcaatgccaaccaattttttgtggaaatgctcgaaacggtgctcaaatgcgatgcattttactattctcatcggatggacatttcacacagctgtatgtgtgcccttgtttttgatttccctactaatatttttttaaattcctttgcagttcaatggctttccgaaaatgcgacgcccaatttccatcagcagccgctgtttcagcgaattgaccgcaattttgtgtggaatacgcgcctttgtgttctttttaaaactgctgaggtgtgaggaatgaatcattacggggcattgagtccctcaaaaccgaatttcttttttaaaatttgccttagggtttaaattaatctcctccggtggtttttgttattcaatggtttatttttcattcctttacagctttcctccttcgccattccgctaattcatggcttcgttggcatccgccaatgcgttgtctgtgtcaaacccttcaaattggcactgatttctcgccgttctgtccaacggttttttcgttcactttggaaatttaattgctctttttcagtgccggcgttcgtttccaca

SEQ ID NO: 5087 - DNA, 4930 bp, Heterodera glycines
gggatccgttaacacaacggaatgtattcaggaccgtagccaatgaatttttttctaatttaaagagaaaatacataaaataacattcaaaatgagttcccccccccccccccccgaaactttttctggctacgggcttggatctattagtacaaatcgccgcgttattcgtcttataatctgtcccatttggtcatcgtccgtcttcattttcccctttttcagattcgcgcttccatccctttgttttgggcccagcggaccaatctccggtggcagcccgacccttctcttttgtcgcaacccgacgaacaaattgccgcttaccgagcccatcttaacgcactgacaaaccgttacggaaaggacgcaaagaatggaaaaccgcgggaaattgtgagtgaaaatattgtaatttaaacataaaaggagaaggaaattgaccaaaaataaggattgtttacccaaaggaatgtaattcattacatttaatttacttttcctgtcgtttcatctttttcaattaagttcattgtcaatctgatcaaccaatacggccgtgaacacattttgggcaaattattccaatcagttgccaaaacggttacatttgacaatgtccgttttgaacacttcgacttccatcgccattgctcctcgctgaattgggacagattgtcgttgctgcatgagagattggcacccgaagttaacaactttgggtaacatcattcatctttttacattacgttttcattattttcagctttttcttgaccaaattggagcgtaaaagtggtggtaaaaagtccgacggtctttgggaggattcgagcgcagttggggagagaaaatatcagaacggattattccgaacgaattgcatggagtgagttaaattaatcattttcctaagtaggcgttaattacttccccaatttcagttgtttggacaggacaaacgttgttcaggcacttttggccatggaatcattgcggtagttttttgggattttactataatacgccattttcatcagtcttcaactccaaagcattggcattttgcctcaaaatgtgaaaaactttgatgcctggcccggctttgtttatactttcaagaattgtaaatcgttcatatcagtggtgaattcgttttgataacgtttgttcagtgtgggccgataacggcgatgactgcagcaaacagtacgcgggcacagcggcgctgaaggcattttttggggggtgggggaatgatttgttcaaatttctttcgtcttttacagacggattacacacggatcggacgacggacattcggcggggcattgcaagacgcacacaattcacttatgcgctatttcaaaaacaattggagcgacgggtacagacaggtcaatggcattggcaaattggagataattcaccaatcaatgggtggtgtttaggacgcgatcaatctgttcctcggcaattacgtggtgaaccgatacaatttgcccgctgggttggaccattcgccagtcgctttcgatttgaatggcttcgccattgtgttctccgtgataacttttgccatgacaatcctttgtcttttggtgtccggtccgttttgcccatttttcctaatttttccccaaaattcagaaaaccctttcatcgctttgttttggctggctctttctgtgatgatgctctctttcatttggctccatggcgaagacttttccgaccgtcctcgtcttgttgtgtctggcaactgatgctaactcatcaatgtgccaattttggatgtgccgtttgaactccaaacaaagaaaagaaagttgtgaattttcccccaaactcgttttctacaatatgccgataagtacagtattcaacataatgtccggtcagttcggctttgccatataactcattaatgtatgtgtgtaaatgtgcttattattaggttgttttgaataaaaaaggactgcccggtgaaaagttttgttgtttggattttttcaatattttatatttcttgttaattaatagtctttctaaaatatatagaatctctccaccgttgtccatcccaaatgtttggcattgggccaatttttccattcattaattggcacaataaattgttctgctgcccattattttgcccatcattctctttccctcccttttcctcttcccattgaccactccacccgaatctctctcttccctcaccccctccgaacaatcgccgttccctccttcacttcctttccatccctcgcggggatggaacgcgtccatccgtcgcttaccttttcctccgcgacccccggggagagtgtcccctcgcccctctttctttgttgttcagtccatcaaccaaaaagtgtgtgtccctccgcccttcgctgtctgttaccgcccttttcttttcctaattatatttccttcccttttcactctcttccccactctttcccttggggcgacaaaagcgaagccaagccaaagaaagaaagccatgtgcgacgaatcttttggcgtccctttcgcctctctctcttcattcattttgtgtctcgcctcatttcaaaatgccattgatgaagttgggcttttgttcgaattgtgtcgaattatttttctccaatttggactttgttagtgctaattacccaattagtaaattctatttaaataattttactgtcccttttcctcccctaaatttttgttaaattttaataatcctcaaacgaatcagcagaagtaagcatccaaataaattgatgatggatgcgttgggtcggcgatccgtcgtcaaatcgtcgatattccccgccccaccaattaattccctctcgttttatttcaaaatttcctaactgtaattgaatcaattcacttttgctttattaataatacatacctaattaactaactctttttatcataataagaaatcctaatttattgcatattaaaaagtgaaacgaaagggacaaaaaaaggcggcgattttaattcgaaatggtcagtttttaaatgatcaaagaaattagaaattggttggaagtattgcttcagcatccgtttgttttaagccaatgaaaaagcggacgccttcgcgcggtcgtcccccggggcgtcgcagcgaatcgcaaggccgacgggcgcaaagcgcagcacgacgagtcgcagcggagcagccacgacaactgcggccccgcgaagcgaagtcgccgactaaaaagaaaacgacgacacccacgggcaaagtgccaacgcggaaagtgcgtccacgaaaggcgccagcgcttaaatggaaatttaattagaatgcctttcccggcaggtggcgactgagccggcaacgcatcgaagccgaagcccggcgagaagtgcaacaaggctaacaaaaacaagcacctcattcatcggcaaaagcttgccaaattcacacggtacagacaacgccacggcgtgccgtactcattcccgtaaagtcgacagtggtcgttactgtcgattcccttaggcttagctacccattctcttgaaaattctatcgtcgtatctgttcaggaatgggccgagtgagtgccgcgtccttcaccgtttcctcctcttccgcgtccttctcgcgctccccggcggtgccctccccgtcgccttctctcgccggtcgtccctcgccgccacagctccgttcgcgcgcaatcgccaaacacattgaacagttacaacaacagcagcagcagaaactatcgctcaaggcaaaggcagcggcgaaaggggcgccggaggggtggcgagtggcggagacagtcaaagcgacgccggcggcgatcggtcgccaaattggcaaactgagcaaatcgctgcggggggtcagctaaataatcagtcaattaacatcccctcgcgtatgctttgcataatttgtttctccccagggcccgcgtccactgctgaagcgcacgggcgcccatttgcgacggcattggcacttttggctttcgctgctcctccttttgctgctcggcttccttctgctcaaattccagcgcgaagtgctcgccaatgtgcagcaaatgcgcaaacagctggtggagtttgtcaacgaacagtacgaacagaagcgacagatcttcgggtgagcgacggcacaacagagagagaggcgagcacggcgggtgggtgggcggtgatcgatcggccaccaaattgccatcaattaacgaaaacaataaatgggaccttaattagggtaattagtggggactgacgaacgaaaaggccccaattaaatctaaaaattgaaaatattaatttttattcatttgacattcttgcagcatttttgagattgtgaaattttaaatgttgcaacatttctcactttttcaagcgcttttcagtgatcaatggcaacgggcgatgcaaacgatggaatgggcccgtcaaaaatacctcgtccagcagcagcaaattccccccaccactccgccgaactcggcaattccaagtgacaaaaaatgaacggagaaagcatccactccactgcgatatttcttcattcaaaatttgtcattcaatgacctcatttgttatttggggggggggggcgcctcactaattgaccactttttcgctgtcacaaattggccctttcccttatattctatcaaccataattattttttgtttccattgaataagaaaataatcatttccacgactagaatctgaagcaaaacacaaatattattattatcattattcattgatcaaatccttggtggggaacaggaagaagcatctgatcgagctttccgcgcgcattggtttttaacattgggaggtcctttaaacgcgcccaaaaatcgcacactaatttttcattgataaggctaattgggggggggggggg

SEQ ID NO: 5088 - DNA, 1219 bp, Heterodera glycines
ccccccccccctttctctctcttttttttaaccattggcaattcatttcatgacaccaaaagtccttttcctctattctttcattcgcaatttcgaattctcttcgttttcctttttgctgtttaaaaatgttaccattttggtgtttttgcccaatttatgattttacattatttattttccctttttggccatttcaattaaaatcctttcacacttttgccatttcaatttgaggacacgacaatgccaataaatgtgtacaaattgacccgacttattatacgattaaatattgtttattctgataattattaatttttaccatttgatatttcccttttcattttctaaatttggcaccgattgaattcctttattttaatttattgaatttaatgttttttattataaaaatcggtatcatttcacttttttaatattgaatctgctaccaattgtgccccccccccccggggatgcacggaatttcgttttcgttttgtcctacattttcggcactttttgagtttcgttttcgttcgtcaaaaaattttcgttttcgagtttaaaattttatttttcgttttcgtatcgaaatgccctttttcgttttcgtatacgaaattttttttaaagttttcgtgcagtcctgccccccacccctctcttccctttttggccctaaatgcttttcccgttttattccattttaaaaataaaattaattttcttccttgattgtccaataaaattatttgaaagtgttcaaagaatgcatttccttcccctaaacttaccttaatttccgattccttttttggggtgccaattctccgccgtctttgagttgttttttggttttgtttgttttttgttcctccccaaatcaggccgaaacgagtgcaatattacaaattgtgccgcttttcaaatatggcaaacgtcacagcctgactgagaggaggaagcactttggaggagtgaataaagagaataaaataataataacaataaatatgattaaaaggaaataatgttggcggctttgaatttttctgatcgaattttgggcggaattcgtcatccatcgcccgcattcattcgttgccacaatttggccgtggcctctccaccccttttttcgcgtcttttgtccgtccgtccgcccacttttctccgattgggaacttttgagggtccatccaaacgcaaaaac

SEQ ID NO: 5089 - DNA, 574 bp, Heterodera glycines
aaattggggagaggaaagccggttggaggatcaaagcggggggggggaggggttgcacaacaacggcaggatgagcagcagcaggagggaattgggagggtggaaaaagttagggcggggaacgcatccgtcggccgattgactctccccccaatgatcagctgctgactgagtgaggaaggtgttgagacggaccaaaggcgacgacaacgactttttcttgtccttaatattattgtgaaaagatttatgaggaggggcaaaggcggccgcgcattgttaactttgtcatcccccaaaaaggggacctgtttacagaacacttttggatttggccccaattaatagttccctaatcaaagattacgctatcaaatcgcttaatattcagttgacagccaaattaatgggcagtagaccgaattagcaaatgcaattcatttcaattgtaaaaataaaaatggaatgaacttctgaccaattaattttgttcgttacttattccgttcttttgtttaaattatttttctttcgctattcatctctttggctgtgttttgtgctgactgttgcg

SEQ ID NO: 5090 - DNA, 857 bp, Heterodera glycines
ttgccaccgccgcatttcattccttttgcctttgccacttttcccccccccccccccctctcccacattctttcaatctttgacctgtcccctccgttttttatatttttattcattcataagcgtagtcaattcataatttaagaattaggataattctctcctccatttcatctttgatcactttctgtactttaaaattggcattttgatcacttcttctcctcactcattcgtccctttttcatccattccgtcccttcacttttttatgccacttccatcggcattatctcgcttttactcatcggtccccaacttggttaaggtgcctcccaactctttgcaagcttcctcctcctcagtttcttctggcaaaaagaggggcggaagagtgcaccaccaccaccacaaacagcagcaccaaaaccataatcattaccaacaacaacaacagtccgagaacagtgacgcggtcgactacgacaacacggcatatgacaattacatggacgaagaggaagtgaggccaaaagagacaaaagtagtcgaattggcaaagggagaggggaggaatggcagccaatagggggacaaatggaggaatgaatttgccaaggggtggccaaattggggggaaaatggtcaaaaacgggggggggggggggagtgatcaattgaaaatgcaaatcaacctagccccatatttaaatttcagatgaagcccacaaatgaggacttcccaacgcacgagacgggcacaagtgaccatcaccacgacgtgtggcgagttccaaactccgccggagggtccggctttgttccgatgggaagagcgggcgaatcggacggacgat

SEQ ID NO: 5091 - DNA, 7194 bp, Heterodera glycines
  unsure (1)..(7194): unsure at all n locations
ccccccccttanaaggtggtgaatccgtcccgtcctcagtctctgcgctctcttccgtcgacactctttcgctgtgccgcgaggactgcgatcagttgaaggtgccaacaacaaataaactgatcaacttattggtcgttccttctgcgtttagaacaacgtgtgccccaacgaatttgcgatggcggcacagcacgatttggtgggggacacgccgaaggcactgctgcccaattgcgacgcattggtcgccggagtgccgaactgcttgcacgtgttggacaaaagggtgagatgccgttgttgaccactccgtctatctctgctcccaaatacatgttcagtctgcccaatttccatccgcagtcgttaacttcggcccatcgtccccctcctcctccccctccccgtcgtccaccacttccgaccattggtgctttgttggtgctggcaccaaataccaaggcaccgcttcgaccacgcgcagcaaaaggccatgcatttattggcccagcacgccgaacaggtggcatttaccggtttcaataatatctatgacttggcaattcagcgagtttaacacggacagtcatccgcagttgcggaatgccaaaaaccactgccgaaacccctctcgccgttcccaattccacgaaccgtggtgctacaccgtttcgcctggaaattcgttggttgccgagccttgcaatgtgatgccattcccctaaatatagctgatatggcttacatttcttctccaggtccgccgatgccccccaaatgcttttccccatttgaacgactcaccctcgccggccttcgactcggccaatgcgctcgcctcattcgccgccttttgggactcgctgtcctcccagtctcagctgctcattctctccactgggctcggtgccgttgtttttgtggtgcttttgatcctctgtttgttctgctgccggagggaaaagggccatcggtcggggcgaaggcggaaaagcgacgcccgggggatgacggcacagcagcagcaggaaagcgcgtcgtcgatgctttcgggcagtgttgcggcttcgcagcacaaagtgcccgtgggtgctgctggctccatgcaaaatgggcacttgccgcaaataccacagcaccatcaccacatgttggtacagagttgcaacggcgggtccaccatcacaaacaggcaaagtttgcatttggcattgtagcactatgccaatgagtaaagccgatcatttttattgcttaaggctttctcttttgcggtaaacaatcggaagattaatccaatgaaaaatcccatcaaattaatttccctttcagcgatttgaacagcgctttctaccgcaaagtacaggacgaacggatgcgtgccgcgggtgtcatgccaaatgatgagctgctgaatccgttgttgccctacgggggcggtggcggcgacactttggaccgacacattccgacggcgccctttggcccaccgcagacgatgttcgagttgaagcactcccagcagcaactgcaccatgcacagcagcagccgtaccgattctgggaaaatggggcgacctctgccgacacaatgcattcggctggcgtgggatggcatccgccgtattacgttcaacaacaaccccaaaagcaatcctacggcagtgcgagtgccaacaccgaaccaacccaagcggagccgtaccaaatcgcgagcatccaacaagaacaggtcggtgacgacgagttggagggcagcaattttacataattgggcgattaactctcgagtcatttcgttatttttttttcttgcatttagttgcgtttctcggatcagatgatcggcgaggacagcaccacttttttgacactgggagaatgggaaggggcaatgatcagtggcgccactctcaaggcatcaatcgataaatcaatcgatcaaataaataaaacctatcaactaatccaatcaattttacctaattattaaccgttttttcctccaattttgggttgccattaaatcgctgaaaccgaatgttccgcacatcgccgttgagcagttccaagaagagattaaagccatcggcatgttcgagcatcacaacgttgtccgcctgttaggcgttagctttttgcaggcccgggaaatgtgtgccgtgttcgatcacatggtccacggggatttggtggaatttttgaaagtgcgggagccccgaggagggacagagtgagtcactgcaatggtacttctgaggaaaagcttcattttagcaatgatgagcaggaaagggcgcgaaacgcggaggactttctgagaatagccactcaaatcaccgcgggaatgcaatatttggccaacaaatgtttcgtccaccgcgatttggcggcacggaattgcttggttgccgatcagcaagtgatcaaagtgtccgacttcgcgcggatgaaaccgaaatatgcgagagactattacagagtgatcccataatcaattaacaatttttagcaaaaaaatgtgcccgttggctcacctcttttaattgcaattcaacactcagttaaatgccaatgcccacggcgttccgttgcgatggctttcccgcgaggcgctcaacgagggcaaatacagcgaagcgtccgatgtgtacgcctttggcgtgtgcctttgggagatttacacttatgcgagtgagtagacccaaaattgagacacatcactcctcaattttgttgaaggacaaccgtaccgaatgttacacggacgaggacgttatcggactgatccgagatgaaactctgctggaaatgccggagtattgtccgccggcagtgtacgcgcaaatggtcgagtgtttcaacgccaacccgcagcggaggcccgccttttccgagctgtactccaaattccaggccgccactcgccccccccccccgtttttttttaccatggagttttcctttagaaatggcttgcttccggccagccttctgcccttcaaatgcagcagcatcgagcgagttcggttcattccggcggttcgagcagtgcagtaaatggccatctgatgaacggacagaacgggcgaatgctgcgccaaacgcatgcccatgggacctccgtcccttcgccggcgccgaacggatgctcaacgattttggccggcaccgggggaaagacggcacaaatggccaaattggcattgctgagcaacggaggtgcctcaatagtgcacagcactccgatcggtttgtagaaaggccatattgcatgttgccaccatggaaatcattctttgatttcggcacatttcagtccaaaaatcatcggacgacgggtcgcagtcgaaacggccgattccccggaggcgacaaccctcggcacacaacagagtggcatacacggaggaggaggacgacgaagacgaggcgatcagttacagcagtgacgagagtcgggacagctgacagacaaagtgaacaacgaccgaacgaaggacggacggacggagaaaaaaggaaaggcggacaaacggatgagatgccccgggggaattgtgcctcgcttttaaaagccaactaaaaacacctcttaagacttgagcttaattacctaatcaccagcagcccacccccaatttcctttttctcttttctttctcccaattctttcatgaatctctccgccatcccccaccaatcgagcattatcgtgacttgtgattttccacactttttcacaaatatttttccacaatttttgcttttgaatggaaaagaattggaagaccgtagaataaaaataaattagtttaaaattgcttaattatttccctaaaaataataataaatatttttcttatgaaattcgcataattatttatttattttctcattaaaatttcatttgatgcacaatttaacacaccgtaacccttgtgaatgtttttattaataaaaacaacttgatttatttattgttgatgaatttttctgttttaatagctcatgctaattatattaccccttgagggctctaaaaataaacaattgtaaaggggaaggggggttggtagagtgccaaaatttacaaatcgattcatgaattaattgaattataaatgcttaaatagcttttattttttgtttaactcttttttatttatttattgttaatcaatattcttattaattttcaattttttcgttaaattaattatcattatgttcactaccgtacttcttcgattatagccccccgggggctctattgttcaacccccctcaaaaggtgggctttattcgagaggggaatctaatcgagggggagttttatagttcagccctttttttacaaaaatctcacaaaaaattattattttttgtaaaatttcgaaatttttcagtggtattaattaaaaatgttattttttcattttcggcaaagaaattttgtgcaatttttttagaaatacctatctaccaaattttcatttaaaattctaccaatacctaattgtttattttcaaatttttaggcactaaaaacaacaatcattttatcagtacttaattatggacgcagtaaaaaccgtgcctgaatcatcgactcaaaaagtacctctacctattaaaaattcttatcaacattatcagtagtataaagccccgaaacctcgcgggtatctcgcgggtgtttaccgcacaaacccttacctacgggaggggtgttttttttgaaggtgccgcccgctcacaaacccgtgcctattggactacatctgaagctgccgccaagaaccaaaccctatgggaggggcgcagccctttgaagttgccgccccggacattttcccgcacaatcccaaacctatggaagggtgcacccctttgatgttgccgcccgggacatttaccgcacaaacccgcgcctattgaaggggtgtttttcctttgaagttgccgcccgcgcaaaatcccgcgcctattgaaggcgtgttttcctttgaagttgccgcccgcgcaaaatcccgagcctattgaaggggtgttttcctttgaagatgccgccttaggattattacctcaaaatcccgcgcctattgaatcctgagcctatgggatgttctttgaactctgccgccttgtggattttaatttccccaaatcctcgcgggtgtttttttcatttcccctccccgcgccgcgcagtgccgcggaaggtcatcaatcatccgtctgtcacgaaagtgacaggtggaggaaattcaattcttgcaaattaattccaaggaaattcaattcttgcaaattaattccaaatctttttgctcgcgcgcaaaccttttgggcggttttattttatgaaatcctgagattttttatcatgattttttatcctgaaattaaactatttttgaaaatttgctaaaaccgtgcggttttttgcatatcttcccttcgccgcgcagcgccgtcatcaatcatgcacctgtcactaaagtgacaagtaattttcaaaaattcaatttttattttgcaaatttaattccaatttttatttatttattttggattttaatcaattatttgatcccccgttttccaattctcaattatttttgccagctcccccgagcccctaaacctcgcgggttcctcgcgggtgttttccgcacaatcccaagcctatgggaggggcacacaaacttttgaagatgccgccctaaaattccatttccccagaatccgagcgggcgtttaccgcacaaaccggtgcctatgggaggcgtcaaacttttgaagatgccaccaagatgcaaaacctattatggcaaaccgaaaacatttggattcgttaaaaaggtgctatttttaaagtaagtacccaaaaccgtgcgggtttttgcatttcctccccgccccgacgatgaggcacaatgcaggcgccgagtaaattaattgataatgaaattgtagaagtgcaaatttaattggtaatgcagcaaataatgccgataaataaattaatgaattggacaataaaattaattatttaaaaataaataaattaggatgggaaaaaaacttttccaaaagtaggtcatgttctttaactgaacataaagataaagaaataatggtccgacgaaaaattttaaaataaaaataataaaataagacgaaaaaattaaacgtaaagataaattaaaaaattgaaattttcaagtgatggtgttgtgtaccatatttctttccaaaatcgaaaactatttcgcaaatttgaccaacaatttctgcaaaactgccaagcaaaattgattgatggatttattatttcgaatttctcatttatcacgcaatatgcacgcgatttacattaaaaatgagttcaaaatataggctgcccaatattttgaaaatttaagcaaaattaattaattatcatcagtcagctcaatgacccaaagataattcaaatcccatttaaaaaaagaataaaattgaaaattctgaatgtatgttgtttaaagtcattcgtagcaatttataaaataatttttcttagtaattttttttgcttccttcaccccttccccataaattgtttttttttgttattcatcattatttttagattctggatttagggaagttaaaaataattactcttatgtctttgccacgtaattctcgttgttcttctttctatttcaaatttaattgaattcccaaactaaatggtaggggattttcatctaaagttttcccgctgagctaatttatatacaaataatgctctggtaaaagattcccttttaactctttaacgtaatttattattgtttttgcatttaaaaatttgaaatatttcaataaataatttaatatgaaaaggcaatccttttgagttcccgaaccttttcttttgaatatatattttaaccgttctacatttttggatgtttaaattataatattaattttcttcccttgaaaatgttttttttgtgacataatacagcttttgaaaatgtctagataaatgaaaacacttcccaacttagaccttttaaaatctccaagcttaaggcattgaaaaagatcgggacgatattaagatattgattactcatgtaaaaaccccaattaatatattagtaaaaacaaaaagctttaaaagcgcaa

SEQ ID NO: 5092 - DNA, 2424 bp, Heterodera glycines
aaaagcaatagcagcagcaacccaaagtcggcgggtgcttctatgatgaaaatttggtccacccccttcgtttttcatggttcaaatcggctaaatttttagataatctactaaagtggttaagaaatttaacaaatttcaaaaaaaaaatgggcaatccatctacattattttttaattgatttatcaatttttttttttttttttgcacaggttttcaacagaggcgaacattcgctgccgcggtgcccaacgaaatccctgtggagccgaacaacgggcaacagcctgacctggccaacagcaaggttaaatcgtagtccctcgtctatcaaaatttcaattttctcaaaaaatccgactctgagcccactgttgtcttttggcagaggctcaaagtgcccaaaagtttttttcaaaagaattttttttcagtgccaacgttctcattcatggctaataatgtgtatttttgtaaaaaaaaaattcaaaaattagcgtttgtagggtccagacaagatttgccaattttaggggcccaaactctcaaaaattttcaaaaaatttatttttctttgagtgccagccaacaagcccattgcttataatgcgtttttgtaaacaatattaaatttttttttgcctttttacagtcgaaacacactcaatttgcatgggaattgcaaattttgtaaatattgtcatttttaggatgcaaaacccaccgagtcgttttgcatgaatttgttcctgggccgtgcccagcttggccaagtgtttccctaccctttgcggttggacgacgagcagcgcgaaacgctgcaaatggtggtgacgccgagcgccaaattcttggacgaggtcaacaacccggataagtcagtaccgagtaggatcaaaaaaaaaaattatggaaatttaaaatgaggagcatccaaaatcacggagtttcgcatattttagtggttggaattctttggcgtggccagaaatatttcaatttccatatccccccccctcgcccgaattcctcaaaaaaattttaagaaattctcaaaaaaattcttagcaaaattaataaaaataaaaattctgatactttcgagcgattttaaaaaaaatttagtaaagcattataaaattgaaaaattcgccagaaaaattttcaaaaaaaaaattttttttttcctaaatttttcggttggattgggtgttttaccgtaatttaattttttgatttgcttttaatttaaaatttccattttcctaccccccccccccccttccccaaggaatgatgaacatgccacaattccgcgcgaagtgttggcccaatttggcgagttgggcgcgttcggtgccttggtgccggagcgatggcacggcgccgggttgaacaacacgcaaatggcacggcttgccgaattggtgggcgccagcgatttgggccttggcgtcaccatgggagcgcatcaggtggaaaaagagggcataaattaataaatttgaagcataatttgcggaagcctttggaattgtacactttccatcgaaaaattttaaaaaaagcaaaaacttttttgaaacaattttcggtttctttttttgttcggaaagctattcaaaaaagcttattgatcttgcatgactttttttttaataaataaagaatttttcaacattttttttggattgaaaataaatacaacccgcgcaagcggactcgaacccaaaccccgctctctcggcaaacctgcccacaccccacttagcaaaaattttcagtcaattggctacaagggcattttgctgtacggcaccgacgcgcagaaggacaaatatttgccggacttggccaccggcaaaaaatttgccagtttttgcctcaccgagcccagctcggggtcggatgccaatgtaaattttttttaaaaccggactgcaaaaaaaaaaaaaatttccagtcaattcgaacccgagcggagaaatcggcgtgcggcaaattctacacactgagcgggggcaaaatttggatcagcaacggaggctttgcggacgtgttcactgtttttgcgaaggtcggtgtttttttttttttggttggggatgggcttgaattactttatttttttggtttacatgccattgtgaatcccccatccaataccgaaatagaaaaatgatttttttgttaaaaaatcgagaaattggaaaattttagctttataaattgagccaaattaaaaaaaaaaattttttttttcaatatttgagacaaatccgccaaaatggtcacctttggatcaaaaatgtttaaactgctaaaaagggaaaattgctcttaaaaattaatattatttacgatcaggttttggtactttaaaatggctaatcccccccccccatcccccaaaattttttttc

SEQ ID NO: 5093 - DNA, 3207 bp, Heterodera glycines
taaaaagggaaaattgctcttaaaatttaatatgtacagtcgatcaggtgagagttctttatagtcgttaatccccatccccccatccccataattttttttcccattagacacccatctagcaagcggatggctcctccaagggcagagagtcggcattcattgtggagcgcggctttggcggtaatctttttgggactagagaatcccaatttccctcccccaatccctaaatttcaaaaaaaaaaaattcgaaatttgttttaggtgtaaccagcggcccagcggagaaaaaaatgggcatcaaaggcagcaacacgacggaggtgcactttgacaatgtgaaagtgccggccgagaatttattgggcggtaagaaaatgaacgggaagatttatttaaaaaatcggaatttttttagggaggggtgggaatggaaaattcgtgaaaaacaaaattttcatttcattcttcagaagaaggcgacggattcaaggtggcgatgaacattttgaacaacggacggtatgcacatttttttgtttccaataatcgcaagaaaaattttttaaatttttttttaattacattttttataaataaattttctagggtagtgaaaatttgaaggtttaaaaaatgttgcaaacttttaatgtcatactaaaaatacatttttcagctttggcattccggccgccaccaccggctcaatgaaattttgcatccaaaaaacggtgaggcagtgaatttttgtgcaaaatttaaaaaaaattcaatgcttttggttaattatttataactcaaaaaagtgcagattgagcatgtgcaccagcgggtccaattcgggcgcaaattgtgcgaatttgtccgtgtccaggagattctgtccgacatggtcgtccgccactatgtcgctgagagcatcacgtaaatttttttttttgaatttattactgttaaaaaattgttccattgttaagttacatgttggccgctaacatggaccgtggcatcacggaatatcagctggaggtgtgtggtgttgtgcttttagcatgcattaattttcaaaaacccgaaccaaaaacgcgaatttttcgtcttttcgtaaccccctccatttttgggggtcttagacctaaaaatcggcattttcagtcaccctgcacccattgcctaggcctaaaaacacaaaatgagcctaaaagcataaatttcgtcatttttttttaaatttttccctccctaggccgccattggcaaggtggtggcgtcggagaacgcgtggcaggtgtgcgacgacgccatccaactgcacggcggcatggggttcatgcgcgagtgcggcttggagcgcgtgatgcgcgatttgtaagcaaatccgggagggcgaggggggggggggtaaaaatttttttttaatttccgccatttttcgaaaaaacccgctagaattcttcccctccctatccacagacgcacccttccgtattttcgagggtgccaacgacgtgatgcggctgttcgttgcgctgaccggcatgcaccacgcgggcaaacggctacaacagttggccaaggatttgaaggcgtactccgtgtccagccttttcggggagctgaagcggcggactgtcgggtaaaaggaaattcaaaatttgaaaaaatccttaagtttttaataaaattttgttaattttagaaaattcagtaaaaaatgagattttattttttctttaaaaaattccaaaattttctgagaagtcatcgaataatcctataaaatttggaaaacactgaattcctagctcagtggtttgtgccttttgaacttaagtggaattgcttgggttcgactcccaccacgggttggcgtacatttttagcaactccgacattcggaacatcttttttttttgaaaaaaaaattaaagttttgtgagaaaaatttttatggttgatgttcagcgaagcccaggcccaagcagcggaccatgtgcacccgtcgctgaaggccagcgcggcgctgctcaaccaatgcatcggcgactttggcaaaaccgtggacgcactgatcatggcctacaaaaaggatgtgatcggtgagtgggggggggggggggaaaccgggcatttttatgaggaaaattcatttttgaaattattaaattttcaaaaaattgtgtaaaataccgaaccccgcttgaaatgcctatcgttggcacagtaccgtacctcgtttatgtttgccttcacaaacagatcgccaatacgaactgatcataatagcaaacgcggcgatcgacatctacagtatggcaggtcagtcagtacagcgcagtacaagtaccgtagtgttttttttggtccctggggcagaaacaatgcaattttcaaaatgaaacaattttttcttcgacaacaatcattggccataatatgtttttcagcggttctgtcacggtgcaacttcgccattgaacggagcggcgcggacaatacgcaacatgaccaggtcggagagagagagggggagggggggggggaagcagctaatttctacccccgaaaattttttataagaaaattatgaaaaaaatttaagaaatttttctaaaattttatttttaatttttcacagggaaggaaacgatagggtggaagggtttaaatgcaattttaaaattgcgaattaaacaatctttttttcccgctactttcagcacatcaccaatttgttctgcagacaggcgttcaagcggaccaaacacaatttgtacgtaataaaaggaaaaaattttgaaaaaatgccatttaaatgtcaattttattagattttcaatttattgcagaaaggaggccaagacgcccagcgagacggaactgtcactgatcggacgcatttcggaccaactccgtgagcagcaagcgatggcgcagaagcatccaattgaacatttatgatgagaaaacagagttttcgatgtatttaacctcctcctcctccccctggcatggaattatttttacacaaattttgcaccatttagtttttttttccttttttgagtatgatacggccggcatacactgtagttgggcatcacggaaagagaattgtattattttccagggagctatatgatactactgtatttgttcattgactataaatattttaagaataaagggccgcgaacgaag

SEQ ID NO: 5094 - DNA, 1963 bp, Heterodera glycines
tggggggggggggggaaaacccccgcgcattttttatgaggaaattcattttttgaaattataaattttaaaaaaaattgtgtaaaataccgtaccccgcttgaaatgcctatcgttggcacagtaccgtacctcgcttatgtttgccttcacaaacagatcgccaatacgaactgatcagaatagcaaacgcggcgatcgacatctacagtatggcaggtcagtcagtacagcgcagtacaagtaccgtagtgtttttttttggtccctggggcagaaacaatgcaattttcaaaattgaaacaattttttcttcgacaacaatcattggccataatatgtttttcagcggttctgtcacggtgcaacttcgccattgaacggagcggcgcggacaatacgcaacatgaccaggtcggagagagagagagagaagggcacagctaatttcctcccccgaaaatttttcagaaaattctaaaaaaaaaatttttttttttaattttcttctaaagaactcaatttttttaaatatttttcacagggaaggaaacgatatggtggaagggtttaaatgcaattttaaaattgcgaattaaacaatctttttttcccgctactttcagcacatcaccaatttgttctgcagacaggcgttcaagcggaccaaacacaatttgtacgtaataaaaggaaaaatttttgaaaaaatgccatttaaatgatgaaaaaatgtcgtttaaatgtcaattttattagatttttaatttattgcagaaaggaggccaaaacgcccagcgagacggaactgtcactgatcggacgcatttcggaccaactccgtgagcagcaagcgatggcgcagaagcatccaattgaacatttatgatgagaaaacagagttttcgatgtatttaacctcctcctcccccctggcatggaattatttttacacaaattttgcaccatttagtttttttttccttttttgggtatgatacggccggcatacactgtagttgggcattacggtaagagaatttgtattattttcgagggtgctatatgatgatactgtatttgttcattgtactataaatattttaagaataaagggccgcgaacgaagcatgtagcacacatagcaaattgttcaacatttaccaaataaataaaacagagaaaaatttactcgttttttaaatgggtatacacgcgcgcacacagtaagtagtacagtttacggtagcgtggcagcaaacactaaatgtgtgcgcgctgtgtacggtatgtcatgtgtatcgtatcgtgttaacatattgtgtgactgggttgttgtgggtattttcgacacggtaaaaagtgtgtctaaatgaaacaaacaaataactaattgtaaggtaataaaataaataatgtatgtatgtgtatttcgataaatgaaaatgtgagaatggagaacaaacaaaacaaaaagcatagcacgcatttttaaggagagtttctcaattcgcacacacaaaatttaaaatttgggcgcaaattttcggctgtaaaatttttaaatttcaaaattcatacagattttaagtttgtcataaatagttgaattaaaattttcataaatttgatttgacataaattatttttgaaattttttgaattataaaaattaacccaaacgtgacaaaaatcgttttaaattttaaaattttacaaattaaatttgccataaaataaattttgtgtgcgcggaaaaagacagagagagaggcttaacaacaaaacaatgggggcgggacatggtcgagagagagagtgttgagcttcggaaaaagaaatggcggcacttctcgaacattcccggaggggaaaatgcataaaaaattaacaacaaaaaaaaccaattaattgttaaagtgagtttggccattgcgctttaaaattattaaaaattaatttt

SEQ ID NO: 5095 - DNA, 899 bp, Heterodera glycines
gcgcatttttctaacccagaaaaaatacaaagaaaatttttaaatttatttttcgacgaaaccacaaaaatgtacctttgccgaaactactggaatgggtaggatgaaaattgatcatttgattttagcggacagtcaattgatggacacttgtcggaggtcaattcgggttcgcgtaggcaaggagcgagtcgatcgtattggagaactgaaccttccgcctaatctcatcaaataccttcattacaaataaccatgaacgacgacactttccttaccaccaatgtttcctgttcctttttttcctgtttttcttattcattttcacttaatttttctgttgctttagcctccattttctcctcttcctgaaccatttgatctcgttattccactgctttcttgtcaaatgctacttgtgataagtcagaaaataaaacattcattttatttttttcgtttatttacggtgacatatcaacgaattagggacggtcaacacattttgtttaatgctcattgatacacaaatggaataagttttgcttaaaatccgtggattttgcagttgtcctccttgacgatcccgaccttgcacagaaagtccttgatgtgctgcctttggtcccctgtcagttgaatcacttcgccatactcggggtgctcgacgattgtgccgttgcaattgtattcctaaaaagtcacagaattccgatgcaactattttctgactcaactatgtccgtggtacctttttgaggtaacgaacaatctttttcaagtcgtattccggcgctattccctgcaccgttgtgatcgtttttcgacccgtcctctgctgaattcggatgtgacagaatccctggcgagtgccctcctcttcctccaattgttcaaag

SEQ ID NO: 5096 - DNA, 2961 bp, Heterodera glycines
acaattaaagctaattaaggaataaacaattagtaagatccttagtttcttgtcagtatcacaatccacgggctcattgatgaggaaatgggaaaatgtgaatggaaaattcttgaatctcgcgaaaagcctttctccgtaaggaatctctcaattctatggtacacacgttcataagcgacaatgatatcggcatcgaaaaggctgtttttgtaccatttgctgtttaaccatccttccgggtccttgtaaaatttatctgtttcatcctcaacatccgcatcttccttaaaattcataatattttggtcattgagaaatttttttcagtttatgctgtttaagcagtaaattttaaaaagtttttaagtgctgtaagaaatgtcaatttttgagttttattatgtgtcaaatcattctaagccatttgtattgaatttggaaaaaagaacacatttagattttttgcttgtcaaatattctcacgtgagcaatccggataaatgcaggagaacagtccaacatttgaatgctcgttttattcgaaaatggatgcaaatgagcgtattgcggcagcgaaaagcagggcctaaaaatcaagacaaattggggcgggaatcagcgctaacatcagctgcaaaattttgatctgttctctgttgagtccccaagtgtcaatgagttcgatgagacggccattaacagccgacggcccccgctgatggacaaggcctaaaaggtaaacaattgccagaaaagacaaaagatggcaccaaaataagtggcaagtagaaggtttaacccaatgtagcaatatttgagacaattcgtccattttgccttgtaattgttgagttcgactgccaaataggggaaaatcagtgggagaatgggcaacactgacaacggactgatcagaatttattcaaaacgatgaaaaaaacgactcacaaaatctgtgctctttgtgcgaaatgaacgaatgtcccaccaaataaataaatgccgccactgcgtatctgtgaacaaataataattacgattaaactttaaaaaataaataaaatacgcccggattaagcccacctctttttcatgttcaagtgaccaaagtgagggagagaagtgagcaaagggagcagcaaaagggtgaggaggggcggcacggcgtgcgtcaaataccacgaccaatggtggacaccgaaattggcactaccgccccggaggacattgaagtggagaaagttccacagacaaagcacgggtttgccgtagaaaattgaatcgaaaaacagagagaggccgaaagggagaaggaaaaatggcgccaatctgaagaaaaatgaacatgagaaaaaaccattcccatcgaaaggagtcaatgcgtctaattataagctaattaaaaattatattcagactcataaggggactatatcagttaaagcaaacagaatagccttttgctatacatatttaaaacatgcaaaatttggccaattcggacacatttagtccctaccaaattccactcactttgacacagtgaccatcgctcctgaaaggccttcggcagtgaacaaatgccaaatgcgcaaaagaattaattgggcccacagaaaaagagttgtcggccgtaaaacggtagcaacggcgacgagaaaaacgcacagaaagaaactcttttgggaattcgatgtcacagttttgccattcttcgcccctttcgtttcgccgctttcgtaaaaatacaacgcaataagcgaaagagaacattcgatggaattggaaagagtgcgagtggagcaatacaaaaggaaccaattgcacgcataaagagtagtagtcaagcgaaagactgaaaagggagaaaatcgaaggcaaaagttggaaattgaccaaccattatagctcagtccgattttgcggatccatttgaggtaaaacgcatccgttaacataaacaaaaaagcgtggaaaagatgcggtgcccatcgaatcgccgggccaaaatcgaggcgaaaagcgcgtagggtccaaaagataacagcgtaaatgaaagggtgcaacgaggaacgcaaagcccacgaagggtccccttaagggagggagacaatcgaacacagggaaaatgacgaataatagagcaatttgaattgcacaccgaaaacatacattcccaagccaaatgaccatgtccataaaccatgtgataagcgacttcgacgctctaaaaaacagtgtgaagtattgcgcatttatggcaatacgcagagacctggaaaacttcatcgggtacaaaccaggaaatggaaaatgccaaacagacaaatcgaagtgcgatgaaatcaagggggttcgaaattgaaaacatcaaaaaaggcaaagaccgagtcggaaaaaaatcagaaatatttcgaatattttaaataatttattgaatgacgaaagaataagcatttacaaaggtttttaaaacccgtaaattacgaagaaatatcaaaatctatgcaaaccgtcaattaaaatcgcttgataaaactaaagcggaaatgctaaaacaaataaaaaaggtgatatcttcacctatttaaaacagaaaaaaacattttgaaagccattttgacttgtttaatgcaaaattataggcctttttgaccagatgaatttcttccttttagttgacttcgtatttgagaaaacgctgcatgtgaacattcagtggaagtgtgtccaaaagtcgcgcaaattcggcgtgaaactcgcgcagattgtccgcttgtttctcggcactaagacacgaagagttctcctgaattagaacaaaagatagactaatcatccgtttctcttgtttttattgtacgtttttttgcccaatggaaaaggtcgatgagtcatcgtcgtcttccgtcgcacattcgcaattgtccgctgcgacttgctcatcactcacactgc

SEQ ID NO: 5097 - DNA, 2458 bp, Heterodera glycines
cagagtttttgtttgtcgacggtttgtcctcggcagtaaaatttttgcgtgaaaagactcgcttttgctgtggcgaactgtccactgaatgtgaacgccgttgtcgtttcattgaaatgcgcgtgccgttctctccattgctttccttacattcctccgaattgttggcattggccttttgacttatcacagcttaatgacagaataaatgccttttccggtattggccttgaaatgctcactttcagaagcggactgatgcactttattctgttctgtttcaaccgttggacttggcttggattcgtcttcatttttacaagtcccttttccgttgttggctttcattttgtcttggccatcactttcagtggaactcatgccgacattgtcgtcggtttcgttgtcttcttcttcctcttctccggtggtgttttgcgtttgttcgatctctcttccctcttcgctattgttctcgttttggtcatcgtctgcctcaccattttctcgtccaaaggcaataatgttagggatttgttggttgtcgtcggcgttaagattgttttccgagataaaacggaatccctagagttaagaaaatcaacaaatcatttttcaatcggaaactggcaatttttagtattttaaaaccatttggtgtgcctattagtttacattagaaaatggcaataagaatttgttggtggtgtttcctcccctcgaaatatctactggatatgggcatggacattgtctgtttgtattacgtaattaacgtcttcatttgttgtcggcgatggattgacagccaattccaaatctctgtcaccaatgaccagtcgaatccgaccccttatttgatgggcctcctgacgagcacgcgcagcgtgatgctggttcaaccggtcccgagcaacaagagcaagaaaatgtcttaattggaagtgacacaaatgattaagacagttctagcgttacaatccgtataaaattcaacttataaaaatcagttttgcataaaaaattcaccgcattgggttttggtggaaatttggaataatgcgcggttcatcgccctcctctgcaggctcttcgtcttcattgtcctcttctaaaactttaaaaatgcaatgttttctgttggaagtaaccatagaaatgaattgtctgtaagcgacgacgtcgaccaaaagtgcgtctgttgttgttgtgttcctgaattcggcgagaaacccaattcagctcaaggccttctctttcactcccattccgagttctctcttccttcgctgattcgacacacaaaactcgcatttccactttgtgggtttgctgaacatttgccctgacacagcgtctgacactgaaagaaatgatttaaatttaaccatctttttggtctcccttttaacgtacacatcacggcaaatcgaacgcaatgagtggggttcgagaaaagggagttttatgggtcgattggagagcggattatccggattgacggggatcaaatgtgagaatgtcactgtgcttatgtcccgtgtaagaaattcaatttccgattttctgacaattctttgaagcttaataaaaccattagaaaagcaggaaaatgcaacatttaccacgtgtccaaacggcaaaatgagaacgccgccaacttttagaagggaacaaaaataggagcgatgggagtcggggacgagagcaccacagtaaatcctaaatggacgggaaatgccatttttaaatttccaataattgaaaaaaattgtcgctaataaatccacaaaaaaatttgaaaacctgtcatatttcatttgagcttcaatttgaaaggcgttcccagtttcgtaaattggcgtgcacctatttttaatttattagcccaaataaaccgaagccaacaataagacgcacagaccaatcaaaggcacttgcttcaccggactgttggatcacagcgacattatcgtttgcaaattcggtaacattttgatagagttccaccccgtgactaatgcccttttctcctaaaattgtaatatttttttgctttaacatattaaaataccaataacaaatccaaccatcgaactaagatacccagttccagaaccaatgtttaaaaatgacattccagcatccaggtcaagattttccaaaaccttaaacaaatacaattttggaataaatatttatgaattccatacgctagcataaatacacggcgcagacatatggaaaaagccgggatcgcctgtcggtgacttccaggctgtgtctttgtaagcatgttcacgttcagttcctggtaaaaattttccacgatccaccaatcttgaaataaacatcatcatttattttaaaaaatcatggtacttatgttatctgtgggcagattttcaaaaaattttatgtttttcgctaataacttttttctttggcatccaaatcc

SEQ ID NO: 5098 - DNA, 1500 bp, Heterodera glycines
tatcgttcgacagctactcagatgctctattacccttccaataatcgaaatgattttctatcctgcaaaaaattttagtaagaaaaaacttcaaaatttcgactaatttcgaccttttcgcaattttcatgtataacttttttggtaattgtctaatcgcgaagtgatacatagaattagattcgaaacatgttaagctttcgaatgataccaacaatcttggatttgaatgccaaagaaaaaagttatagcgaaaaacataaaattttttgaaaatctgagtacagataacatataagtaccaaaatcattaacctcatgatcttttcgacgcgttctgttttcaaagagtcgtttgacacgagattgtcaattagctcgtcattgtcttgtccaacacttgctgtcaatcccattctcgaatgaggaatagtcaacggataaaaataaagttctgctaaaataatgcaaattctaagttagactttactatttttcattttgggctcgtaccctattttaaggggttttcgaatgatgctgattacgaatcttaactcggatttacccaattccgaacaccgggaccgaattcgaacaaaaaaatactctatttcgaatctgatagtacattgattaagctattcaacactataaaaatacaaaatctgtcgcgggcctttctttaaaagaaccatgttaatacaattgctagcaatggtgcagaattgtggtgcctaatttaacttttatattttggtccaaaattactattcggtgggttttcgagggggttgatcataatctgaccatagatttgactaattacgaaccccggactcaaattagaatatgtatactggatttggactcgaaaattcgtaacacaacccaatattcgatggtacaaaacacttcaaataaaaattttattttttaagcaaaattacatcgataatgtagcgcacagcaggaaaaaattgattctgacaggcttagttctaaattttgaaaatttttaaaaaattcttttacggcgccaaaaaagtcattttatatagggcgccaaaacggccgcgccaaaatggcccgcgccaaaacctcgcgccaaaatacccgcgccaaagtgaccccgaccccttcggcgccctatataaatggctttttcggcgccgagaaaattttcaaaattctaaagcaagccctatcaaaagcaaaaaatttagtgtgttgtgtggtttttgttagacaatagtgtggtgtgtggtttatgtcagtcaatcacattagtgtggtttgtgtaagacaactacattagtgtgcatgttatgtgtaattattagaaatgttttgagatacactactgtttctataattcgagaccacacaaatgttgattttgtaaaaaagaattctttgttgttgtattgttttgagatgcatactaatctgtctttaatgttttagaggttcacaaaagtgttgaattctgtcataaag

SEQ ID NO: 5099 - DNA, 7105 bp, Heterodera glycines
cgttaggtaaagcaatttcagtaaccattcatccgtcgaagaccgtaacattacaacaaatgaacgggccaccagtgtcacactgtaccgtcttattccaaatgccagctacgcaataagagtcgcggcccgtacaaatgccggagtgggtgccttttacattggcgaaccggttgtgatgagtaaggggccaatttcccaacaaatcacttacaattagcacaatgttttgcagcggaagaaaccctcaaccgacacattcgcctttttgaacgttctgagaatgtttggtatcgacagccgtggagtgttttggtgtgcggaattgtgctgtggtgtttgctccttcttatgatggtccttttttggtttcgctgttgtcatcaaaagggacggagcgcagcggaggccaaggaaagggaatttatcaaaatcagagatgggagtgtagcgaacagcacgaccatggtcggtggcgatgcgcgaaatgctttttgggtggcacacgagcaattcaatggtggcacggtggaaacgtccagcggaacattggccagagttggtggacagcagaaccaccagcaacatctcagctattttcaaccgactaattactctgctgatcgtgttcctggtccacataacgacgctgttaacagccagcatcacattgcactttcaaatgaaatgttcagcaacggaattcccatggttggccgaatttgtcccacggcgactcttcaaaggcataatggtggcgactgctcttctcctaactcgcctcattatcattatgcccatttgccgttttatgctgaacaaaataattcgctctcaactttccttcagcagcgacctaatcccgaactttatgatggtatgaagatggcattttcattttttacattgattatttcattacgatagatccaagtccgtacgcaacgacgactttggtttctcccactggggtaattacacaaacacttcgacccgccgtacgtcaaagcaaaggaccggcacttccgttaaaaccggcaccaaaagaaccaccaaagaattttttatgctcagcggcggtgatgcatttgacaaccaacagtaagcagcgtgtcaatggcaatttggaagttgtggaacaacagccgaacagcagcagttgtggagctttgttggaactcaacagagaatggaagagacagcagcgcatcaccgccgaggaacaaaaaaagcgagaaacaccgcagaaaaagggtggaacaacggcacagcggagagaaaatgaacacgacagagacatgggagagaatcagacatatggaacaacgggaagagggacgagaggaggagggggcagacggagtcaacgaagtagcagtgcgaacacggcacagaaacaatcttcggcattttgttcgctcaggagagtatcacacaaggagaacggcagcgaatgtcggcagaatcaacaggacagtccacagacggacatttcatatttgcaatcgtctgacggaaccaacggctctaataacaataacaataagcgaagccagcaaatgaatcgccaagtgaaatacgacgacactgcacccgaatatgatccggttatgacggactcattgagtcaaattgtgcacagagaagacattcgaaagaaaataggtccttactttacactaaaacttgcgtatttaattacaaatccgctgtcaaacgctgcaggtcgtgagaaggctaatcgaattgtacacagcaacagagtcagtttgattgaggatgaaggacaggaggagagggacccgctgatggaagatgcctttggtggtgacgaggacgaattggacgcggatggggaaatgagcgaaaacgaacacagcggaaaagagagtgaccgaagggcgaaaaggacgactgacccaatgaaaaggtgtgaagaagagtgcaatgtcgctaacgagcactattacgggttctcccccgccccgaaaaggcctaatcgacagccaatgatgggtatcaatatcagcactctgtcgggtgagagaaaataaaaatgacactttccatagggatttcaaattcagttggtgtggatcggaggacaaccgcctctccggcccatcgatgagtcagcgcccttccttctccgccagtcatcctcgtccatcatcaaaatgatctcattgtcagtcatgttttattttataaatgtattctcacattgctctccaataaactcccattttacttcactcacatttcaaatcgatttctctttttatgcgtttgtttgtttgtttattcgttgagcattcccccatttttcctttactgccgcaacatcgaattcgcttttgatgaaatcatttttcagttcgcctttgttcccatttctttcatccgttcaaattcgcttcaaatcaaccaaaattacaatttaaaattaaccattcttaatggttgagctgtccgctgtatgttttgtgtataaatccttcatctgtcatcttttgtatgtcattattcattatatatcattgcgccttttgtctaattgaacaaaattaaattaacgatcttaacaaaaaggtatttattgaattaaactttgatcattttcttaaataaagcaaatattttttgcattttttaacgcaaaaataatacaacacgccacataaattcaaacatggacacacacatacatacaggggaccagagcgtttgggccccggggtcgttttggcccccgtttttgggccccggggtcgtttgggcccaacccaaaaatagaaaaatgtgcttttttaaaaattaagattctaaaaactaagcctgagggatccctcgccacttggcataagttaggtttaattaacattcgctcattttttacaattttacttattccaaatcctattattttttaatagttagccaatttgatgtacattctgatttggacatttttcagaaatggctatttggagatgcgagttcaaaaaatcaatttcacattattttggagtttctccggggaatttctcgcaactatcgaatgaacccgtgaatttctgttaatttttacattttttattgttaaaattattgttgaatttatttttaaaatgtttattttacatttttatgctgaaatttaaaaagttgtttttactgtgatttttcatttttctgtacttggggcccaaacgaccctggggcccaaaaactgtggcccaaaaactgtggcccaaacgcccccgactccaaaaacttatttttaaaattttaaataagaaacaatcgcttcattaatcattttcttttacctatattttttgttttcactagagttgggcgggaacgggaatcccgcgggaaaagacgggaatctcgttcccgtttcccgtcttttttgcctgacgggatttttacgggaacgggaaaaaggcgggaatcccgttcgggaatcccgccccgttctttttcgttttcccgttcccggaaaatttttttacccaactctagttttcaacatgaaaacaactttctgggcttttctgggttgctgtgcacgaatatgacatccatttcgactgatttcgaactcttgaacctaattcaaacaaaaaattcaaagctgacaattcggttaaaaactgaaaaaaaacgaaaaactcaaaaaattctcggtcgaacggtttcggttaaaaaaccgaagaaaatttttcggtttatttcgatttatcggttttatttgaatctgtttattttttttcaaaaaagcaataaactattctattaatagaaaaagcaaaaattcctctgagtaaaattgtagagctattgaagctctatcaatggtgtactaaaggtttggaaaatgatagaaaaggcagccaaaaaacatgtgtttgctccttgattctaaaaaaaccacaaagattagttttagcgatttggtgccttttttggcgttttttcccgaaaaattccattaaaaattcaaaaaaaatggaaaaataaacccctaagaaatgatctaaaaaaattcagagaatatacctttatgaattgaaaaattttcagaaaaattgttcgccaaaattcatttttttcttgataaaaaattttaggtttaaaaatttccttattgaaaaacattataaaatattgaattatcaataaatcagcaaaatttagtttttggttagtttttacgtattttgccccctaaaaatcattaataaacaaatttaaatgccttttttcatgcctttttcgggatttttgtgccttttttcagtgccagtttgcgctttttggcagggatgcgatcgaaaatttttcaaaatcaggacatcgggcccaaaaaatcagattttggggtcaaaatcagaacattttgcaaaattgcttcaaatcttttatttttacaattaatttaatcaaaaatcattaaaaattatatttttcgcctccaattatcatctttaaaaattttggtgaggaaattaacaaatcgtaaatttcagtgcactcgggatcaaaaaatcagatttttaagaattttttgcggcgtatttttccaaaaaacttttgggaaatgggcgagggggagggtccggcggtgccgataggtgccgccgggaaaaatttgtgattttagtacgatttgttaacagatttttgtccaaaaaatgaccaaattttgccataaattttatatttttttgtaaaatagtgacattaggccataaaattttaaaattatgagtttgtttaagaaatcagaacaaattttggtcgttaccccaaaatcagagcatttctgacaaatcagaacagatcgcatccctgctttttggtgccttaattgtgagctcaagccataactttatggccggcggtgttgataagcgccgccgggaatttttttttgtaattttaatgctatttgttagcagattttgtctaaaaataccaaattttgagattttgggctaattttttaagaaaagatagctttttggggggtcggttgtgccgataggcgccgccggaggaaaattttaagaatttttaatgaattttgttaaaaaaatggccaactgaattcaataaattttgaatttgaacagtcgcagcggtgagaatcgttttttgatgaaaagggatggccacccgaactttattattttatgtgttattattatttgttcagtaaggccaatttaatttctgtcaaaattcattgaaaagttatgaggagaaaatattattaaaatttaatcaaatttattcagctttaatttttcaatggaaaacggacggaatggcctttataagccgaacaaattaacagaagaatatcataaatttaaatttaaattaaacaaaatcaaatgcatttgattaacttaatcgccctctttttcatgcttttcggtaagtcaattgtttaaattcattagcgggataattgggtaattattttgctaatcgtttccaggcccatccgtccagcaatacacaaaaacgccgacgaatgaggacaaagaagcggctgtcaattgtcacaacaaattccgatcgcaattggctctgggcaatgccgacaataaatcggggggcaaaaaaatgccaaaggcgggcaacatgcgcaagtttgaatgggacgaaaacttggccaaacttgcggatgaatgggccaacaaatgcacattatcgcactcgtggaacggctgggcaggcgaaaatttggcaatgaatggcggaacattttcgaacagttcgatacaaattgataattgtggctactaattgcctgcttaagaggatggcttcgagtacgcttgcggtcgctggtgggacgaactgaaccgttacgggttcaacccggatctgattatgaccggggaaaacttcagtggcatcggccattggactcaggtgaccaactcattattttggcctttctcgtcccattattgctaattagatactaattagttttctcttcgttttgttcagatggcgtgggccgacaccgaccgaattggctgtgccatggcacaaaactgcccaaataccaattggaaaacatatgtggtctgctggtattacacggggtaataatcaaccactgataaaacataattagtttactaataccccttttagtggtaattactttggtgcgcctgtctatttggccggggagccgtgcagcaaatgcaaagcaaatgacaaatgtgacaaagccacgggactttgctctcaatgaaggatgaaataatatgaaaattgaattggtataattattaatcattagtatgttcaatatggtttagtgtttcggaaaattttcacatttttttgtctttaattgacaatgaataaataaatagattaaataatttttaaattttaattcccgcggttttctgagttgtgccaaattttgtcattttttaacgaaatttgttagcatctgaatttatttattataatttaagaattaaaaaatatattttttattttacattcaagaacacttgtgaagaggaaattgccttcgaaagaattaaaattaaattgtatatgaaataattgtttgccacgttcaattatttttttattttccttttcacataaatattttccaattatgatatcacctatttttgacaattcttctgtccataaggtaaggaaaggggcggaaatgtttttgtgccgttttggcactttgtccacgttaatttggcattcatgtgactcttatgtttttattgccaaatttaatgatgccatcttacctaaattgggttatttaagtcggcatttttcaaacattccaatcccaatttcccattcatctcactcactcataaaatgctccaaaacggccttaccattctgcttctgatcagtgttgtgatcggccattccttggccaaccttggcccaaccatcaaacataatcctcattttaaaaccgtacaaactgcgcatcattagcatgatgccattgcgaagaagcacgaggcgagcaattagaggaggggggaattttgagtgaaaattcatttcgaaataa

SEQ ID NO: 5100 - DNA, 1303 bp, Heterodera glycines
atataatttttttgaatgacattatttattaagttgttataatgtttggaactattctgctgaagccataccttcttctggccggcttatgcctgttcatatacggcaccgaggcatggaaatgcaagcctggtaaaaagggaccgaccggtccaccaggaccgcttggaaaacctggagcacctgggaaatgcccgacgaagccaaagtacggcaaaacaacaacacccaaatacgacaccacgacttccaagtacggcactacgagaccaaaatatgacatcacgacttctaaatacggcacaacaacgccagaatatgagacaacgacatcgaaatatgggaccacaacatccaagtacgacaccacaacttccaaatatggcaccacaacatccaactacggcacaacgacaccacaatatgacactacgacttccaagtacggcaccacgacgccagaatatgacaccacgacttccaaatatggcaccataacatccaagtatggcacaacgacgcagaaatatgacaccacaacttccaagtacggcactacgacttccagatacgacaccacgacttctaactacggcacaacaacgccagaacatgacactacgacttccaattacggaactacgacttcggaatacgacaccacaacttcgaaatacgacactacaacttccaagtacggcacgaggaccccgaaatatgacaccactacatccaaatatggaacaagaccgcccaagtatacgcctagcaaaagatcggccatgtcggagtttgcggtagaatattagatgggaaaattttgaaacaaaataaggaaaaattaaaaattgtacaggatgcggtagtgatcagagctgctcgggctgagtttgccgacaaaaaatgcccagtggggcgccccggcgatgccggccccgcggggccaccgggccctccgggcaaaccgggcaaatgtccgtcaccggtggaacgctatgtcaagaaaagcgaagagaaagaagggtacaagagaaaggaggaaacggaagaaaagaaagaagcggaacgggagaagcgttatgatcatagcgttgaaagcgacgggttcgattttatctcaattctcagtttcgagtcttaggttctaatctcggtctcgatttttggggttgctcctagacgcttggactcaattctcaggggttaatcaatcgtaggggattaaatataggtttgaatctcgtgtccatttcgttatcaactcaaaagctttgtcattttcgacccttatgttctaatctcg

SEQ ID NO: 5101 - DNA, 6627 bp, Heterodera glycines
ttaggtatcaattcttttggtcttttctcagttccaccctttgggccattttggtctcaaattccttggagtgattctcggtctaaattctcgaactcattataaggcttaagccctaattatgaattattatttcccatttttcttccagcaattacaaggataatgttggaactgcgggtccgcctggacctccgggccccgacggaccgcccggagagtgcgaatgctattcggaggaagcggcacatgaagaagtgatgccgaaaaaggaggacaagtgagcaacaaccttttgatgttgaataatttaaaattttgaaacaaaaaatgcctcagggaacaacagcagagccaatcagtgcgcttcaaagttatgccccgaattggatggatcaattctgctggcagttcgagcacctaatttatgcgatggtgtggaaatcgaatgcatatgaaaggagagagataaaaggagatataaaaacagatttatccagaaaaactttgttgttcattaaaaatatggatttaaatgcgaaaaattgaaatgcaaaaatatataatacagcaatttttattttccaataaataaaaaaatcatttctataactaaatcaaaaaaaaaaattctgaaaaaaaaagaattttttataaatttctaaaacaacattttatgaaagcctaaaaataagcaattttataaaaaaataaatgaatttcctatttttaatgcaaaaaacaaaatgaatttataacaaaaattaatttatgtttcgatttgtttcattacgaatcttttcgaaaataaaaaataccctttattaaataaatctaattaactataagcatgcattaaaagttttgatcaaatttgctgatttgtctttcagttctttttgctcatgtctttctgagtgggccaattgacgatggcatttctcggtccagcatcactttctgtgccgatcggaccacaattgcggcacgacggcgctgctctgcgcgactttgatcattgatccaaaacacgggcattgtacactctgttttttgtaattgttatcgaaaaattttgccattttttttgtttttgattgaaattaaattttaaaaattttaaaattgacataaaaatgaaaaattgatatttttcatttaaatttttacccttttttcacagagacaaaaataatttcttaaaattcattaaaatcactaaaaacttttagacgggaaaaattggtttaaaatagaaattcataattcaattttttaaatagattaattctcaagggaacatttttcgtttttttggcaattttttgaaatattgaaaataaaaaataggacaaaaaattttgttgcaactcaaaaaccaaaatataaaagtgctacaaacaaaatttggaatgccaatttcggcaaaattccacccaaaaaagcactcaccaaatatgaacacaatggcaatcacaccgattgcgtacagtaacacaaacagtacaagctcacgcccgcgcaaggtgtgcaccaattccggccgattgaacgggtcgcgatggaacgccaagctttctaattggcgaacaaaaaacatttttttaaataaattaggggatttaatgggatgggatgactttggcaggaacaaataaatgaatggtcctaatgccgacaacaacctgtcctctgtaataatgaaaatggcttttcattacatggccattggcataaagtggcggcggcaaacaaagcaattagcaaataaattggcacacatctctttgcactcagactctctctttctttctctctttatatatattaatctctctctccctctgtttctctctccttgttctttctctcgtctatctctctctctctcgctaccttattctatgaattagctatttattttcacaattctttatgcctattgtatctccaatttctgccacttttgtctctatgctttctctattttcaatttctatcgctctctctctctctctctccctctcttctctctctctccccgttctctttcccacttccgctctgcatctataattttcattttctctctcccgctcttttcacattcatttcatttaattcttgagggatagagtgcaaaggtacagcaaatatgggaaaaactggggaaaaccaacttttattaaattttactgagaaaaaattggcccaaaaatttacaaaaaatttgataatttatcgaaaatttaaaatttttactattcatttcgagaggcaggaatatgccatgcccatcaagctcatgggccaattaagttgtacttacttacctttggaccgtcttggcattttcagtctgctgcttggcactgacaaagtcaccgagtcccggggcaatgacaacaatccctcctccatatttgccctcggacttccgccctcatccgttgaagtggccattggtgctgttgcttccattaaataatgaagggcacggcacgacttgttccaaaatgtttataactcaaaatttattttcttatttttaaattttaattttgattaaaaccggtttatgggaccagtgaatgctcataatccagatttgcatcccgcattacgccaattttcggggaccgaaatttcggcattatttattccgttggggaccgaaattgcggcattatttattccagaaatttttgcgccagaataatgtattactcgctcagataacttattatcgggactttattaatattcttgagaatagtgatggagtatcataaattaaaaagaactttccatgaaaatcaaatgccgaaatttggagcaaatcccaaaaaatggtttcgaattttccaaaaatttgccgcagtccgcaatcgcacaaattttaatcaagactggtaaaagcggcaaattttggaacccccttttaattcgaaacacaatgacggcacttaacagtgccgctatccaatgaaagttcaaaatttcaaatttaaacaaattggaagtcggcgacctgcgctaatgtaaagattgaagcaagcaaaaagcattatgttgaagcagaaggaaaagccaattttacatgctgctgatgggtgagggagggcaatgtacgacaattttaagtggcgggaattaacaaaaaacaaacaaacaaacagaaaataatgtagtaaaactcttgagaaacttctcgggacgctgaatgaagaatgaaagaacagcacagtcgccaaaaattttgttgccggaaaatgaacaaaatgagggggaaatttttgtaatgccaacaatcagtcagtcgtcaatcattgggcaatgtttgatcagtccatccttccctccagcatttttgtaaattgatcaaaaaaaaattttgttctaatcattgaatgatggatgattagtaagaagggctatctatatgcatagaaaatcgtaaaaaaatgcgcataaaaatgagtaacaaaaaagagtgaaaaaaccttggtcttccaaatttttcacatatccatcggctatcattgccatcactttccaatgctcataactttttttttgagtagcatcacacatgtgatagccataataattactcagtttttcaatgactcatcgctgcaattccatccctcaatcatttggcgccaaaagtacgtttcgcccagtgcctttgccttgatcatgtccttctcctccgcctccggtgtgtcatcatcatcttcaacctctcaaatgctgcaattgtgccacaaatgatcagagcgaacaacggcagaatgacacatgaatgcaaaagaaattgactcatttttctgaatgaaatatggaaaatttagcgggcaaaatttagatcagtcggtgcccttaggcgccgccaggaaaattgtttggaaattttaaagcattttaaaaaattgcttaaaattttaaaaaagttgtcttttttcttgaattttttttaatttttcatttcggggagcgggggggggggggattgtccaccctttccccttgttgatgcctgatttatgttgtaaaatttacagagcatgaatgtgaaatttgtgggtctgaggaaaattgtgatattttgtagagatgcgccgtgaatcacggtcacggttaccgtgaatttcacgggttttttcactcacggtcacgattcacggtaccaattcacggttattccgtgaaaaatgtacactggataaaattgaatatttacaaattacatattgttttcatagagaaatttagtcattttttgggaaatttttgctaagaaacagagcaaaattttcaaaaatttccccggcggcgtctatcggcaccgccggcccaatttaaataaaaactcattaaatttctttaaaactcgctcaaaattaggttatggcaaaagcagttaacaaatcccaaaaaatttcaaatattgtccacattaacccttattttcttaataattgggcaaatatatcttatagatcaaaaacaaaaaaccatttaaaaaaggtcggaatcgattttgaacgcaaaatgatgataaatatgcaaatttgggcgctccgcgcgtgccaatggtagtgctgttcaagaccgaaaattttcctaggctcgagaccgagacttgaccccgaaactcgagaccgattttttatggttctcattttttggctcattttacgaacaaaatctgttaacaaattgcaatcaaattttagatttttccacccggcggcgcctaccggcaccgccggactacaaaaatttattattttataaaaattggcaaattcacaaaatttggccatttttgtacaaaatattgtatttttatttaaaataaaataaaatagtttaattttttttttttccctaatggacgggcaacattcatttttagcaagcgcaatttgcttttagcgaattatttagtgatacgatttttagtttagttttctgttattaacaacgattttctagttttttattttgagagccttaaaagcttaaaaaatttcgaaaaaacctatttgacctatttggccttttgcccaaaatttgttaataaaaatgcaataaaaacgaaaaaaaaaatacaaccctaagaatcgacctaaatttttttaaaaatacacccctaataaaagaaaaatttctcaaaaatttatctccaaaatttatttattttcttgacaagaatttttgatttaaaaagtttttatctcaatattgatttgtcctaatttttaaaaaattcttgtttatgccccactctgctttggctggccatacctcgccagagagtggagatagaccctttgttgatacatttggaaatgtagagcccgcctagcgcattcgaataacacaaaatttgtttgcatttgccaccaaacaatccgcttatgacgcgccgaaagaaaattcacgaaaatttggcatcggaaaaactgcattttttcatgggccagcatagtaaagtaaacccaaaatgtaagggaatttaaattggtcatgagagatgtttagttttttatttgtcccatcgtttttctgggaaaaaacttttcgagaaaagctgaaaaattttccaattgcaacagaagcagactcaaattcttcaacacataatataaaaatattacgcaagaacttatttttacatcctttttagaaatgctgcatgaatttttattgtaaatagttacaaacaaactttttttcactgccaatttctaccagttgcgacacaaaaaggcgatagttaagcattgagatataaaaaaatcgtctagaataattatctcaacaatttgtcgggaaagctttatttttcggtaatttttatttataaaatcctttacattttttagtttatagaataatgttccatttgataaattctgttacaaaaatttgattcgacctattctaatttgggaaattaattcatgaaaattacatagacaatatcgaaagaaatctaagtaattataattaaccaatgtcaattcgtgcgtacctatcaattatgagcgggaccgggaccgggaccggggcgggaaatcccgggtttttcaggtcccgatcctggtttttggaaaaacagaaatcccggtcccggttttgccagtcccggtcccggcgggattaaataagcactggtaagaatggtggtctgggtgagaaaagagaagggaattggtgagggtgtccagacatttgcgtcccggacatttgcggcccggacatttgcggctcggacatttgcggccccagccaaatcggacatttgcgtcccggacatttgcggcccgacatttgcggcccaattttttgctgaattttgcggcccaagccaaaatcggacatttgcggctttgccctactttcttcagcataatatttaactttttcaatacatcaattaacacacaaaattcttttattttctaatgatttgctcaatgtttaacggtcttacattttcatacaattttaaaatcgaaattcaaaaaaaacaataaaccaactgtgcataattattttcctattattcaattaacccaaataagtatcgcctcgcaggggggcttcatgaat

SEQ ID NO: 5102 - DNA, 1336 bp, Heterodera glycines
  unsure (1)..(1336): unsure at all n locations
ccccccctctcactgtccaaaaaagtttttgaaaaaccatgccacaaaaacagcgattaaaagcaaaaatttaaaagattgtaaatttatttaaaaaaatacagaattttgggactcagaaaattccaaaaaccccccctgaaaacaaaatttttaaaaattttcctcgaactcgtccaccaaaacgtaaatacaaaattttattggtacatttttgaatattggcaattttcgtaacaaagtgcacttaaattttcaatttttttcaaaaaaaattttcacttgggaaaagtcccggttggtcccgggttttttcgctgtcccggtcccggtcccgacttttctggtcccggtaagtcccggtcccggtttttgtcaaatttcccggtcccgctcaactctagtttttagagcctaaaaatatcacccctaattattacacacattggcacaacaaaaagagtgttgtgaaagcagaaagggaacgaaattgcccctttgaagaagcaccgctttagaaggaagaaatttattgattttcaattccttggccagtgccaaaaagatgcttcttccttccattgcgaataatataatctttgattttttaaaaattaaatgcaaaaaataaaaaaaattgcttatattttattaggttaattaaaaaataaaatattttaatgtaagagaaacgttttttaaatttattaataaaatactcttaaaaataatacccaataatttattaaaaaaattaaatatttattttgcataatcattggtgaattattttattgaaaaaatatataattttatttatttttaaaaattaaatgggaaaaataaaaattatttatttgtttataatttgataaaatgaattatttggtgtgagcgaaaatgttactttatttattcataaaatattctccacaaagaagtcttcagataacttataaaaaaattttttattttgcctaataattggtatattattttttgcaaaaaaatataatttttaatttattttttgaaaaaaatgcgaaaaataaaaaattcactatttttttacaaaaattgataaaatgaattattaggtgtgacagaaaatgtttctttattaattcaaaaatactcagataaatttaaaaatttttaaattttaaaaaattttatttttcctaataattggaaattattttttgcaaaaaatataacaaattagtgctttanattgttttaatttttcatatntgcccctcatttttttctgtccaatgctttcgtgtttgaaggcataaatacaatggtaatttgtgtcaaataatctcatttt

SEQ ID NO: 5103 - DNA, 2908 bp, Heterodera glycines
tatcccagaaaaatggctatctctttttttgataaattttatacacatacaaatgctctcgagcatgatagggagggcggtgcgcaatagaccttttatttttgagggaatttttaaatttatactctatcccagaaaaatggctatctctttttttgataaattttatacacatacaaatgctctcgagcatgatagggagggcggtgcgcaatttaccttttatttttgagggaatttttaaatttatactctatcccagaaaaatggctatctctttttttgagaaattttatacctcacaaaagcgcttgcgtatgagacggagggctgtgcacaatcgccattttatttcacagaggatttttatatttagaggttatcccagaaaaatggctatctctttttttgataaattttatacacacacaaaagcgctcgagcatgagagggagggcggtgcacaatagccattttatttcacagaggattttttatttagaggttatcccagaaaaatggctatctctttttttgagaaattttatacacatacaaaagcgctcgagcatgagacggagggcggtgcacaatagacattttattacacagagaatttttaaatttagactctatcccagaaaaatggctatctctttttttgagaaattttatacctcacaaaagcgcttgcgtatgagacggagggctgtgcacaatcgccattttatttcacagaggatttttatatttagaggttatcccagaaaaatggctatctctttttttgagaaattttatttccaacaaatttcattttcgcctaaattattttaaatatttaaaatttttattaattttttgctccaccaattaggccgatcttttctaattgtttttgatcgttttcatcaatttcgccagaatcagacccaatttcaacgcctttttcttctattttctcgacacttttcttgttttttcctttttctcaaaaagtgcttttcctttttcagttttatttttcctttttggcttcttttctctctttgaaattgttttttcttgcatttccttcgcctttaaaatgcctttttcatttttctcttttggcacaatgccaatttcgctcctttgcttttgatcattttcatcaatttcgcctgattcagaagcaatttcattgtctttttcttctattattttttccccgtcgccaattggcggcatttccttttcactttttgtatttaaaatgcccttttcttatttttcttttggcactgtgccaatttcatgccatttctcatttaaattttgcgctaaatcatgcgaatttagactcgtatgcgcttcttcattgagatttatgccacctaaaaacacatttagttttaataaaaaattggccaattatactgatgttttcggctttttttatcattttcatcaatttcgcccgattcagtaccaatttcattaggttcacttctttttgcgctattttcactttttccaacttgctcttttcctttttcactttaatttttcctttttgtgttatttttacgctttgaaattgttttttcttcgtttccatttggtggcttttccttttcactctttgaatttaaaatgcccttctcatcttcatttccttttggcataaaatcctttaaatatgatgatgtacgatttgatcaacgacgtgagcggaactctgcgggccacggaggagaagcggaacatcagctgcatttcctatgcggggtccatgtgtctgaatgcgacgtgccgtgtcggtcagtccaacaaaatcggccggcgatttctgcggcgcttggcaatgcttttcgtccacagacagtcgccatgcctatttggcctatcaccactgcgtgttcaacggcgagtacgacttttgcgagcgctttaatgcgcagtgccagtcgctgaacggacacggcgggtgcaacctttgcgacagccaccactgcaacacggcaccggaagaagcggaggaggaggaaaagcacaacggcgggggaggggaggaggagaagcggggcaccgctgcgcatccgcacgacgaaatgccaaccgaaaaggcggtaagcgaagggaaagtgccagaaactgttggaattgcagcaaaaaatggccaatgaaagtgcgccgccgcttctgccgccggtcaatccttctggtaactgacaatgagttgaacagcagattttgatcagttccgcttttaattcttcgaccttttcactttccaaaagatgtgaggcaaattgtggttggtccgtcgaattccgccggcgaaaaaacggacgctctttcgcaacagcagcagggcaatttcggcgggggcgccaacgctttttgggactttgtgttcttttttggaggtaaaataagaaaaaagaaaagaaaaagcataatcagttcagaagggaggggaatttaagacaagccaagggcaattgaaacggaaagtgtcaccaattgaaaggggcgaatgagtcatattgtactaattagcttacagacatttgcggacaatcccatatgaaatatttgaaaaatgaacggaaagtgggcctcttccaaattttaaataaaactgatttatcattagtattaataattcaaaactaatatttttaaaaattgtaaaaaatattttctttggattttatttatattttaattgttggattgtttcttccttttttgttttgttttgtgtgtatgagagagggaggaatagacgaagaactcttttcattgtttataatttattttgaatttggaagagccgtacttttgaagcccacaatctttgcgttcattcattttttctaaatttattttcccaaattgtcccatttcggttgtaattagt

SEQ ID NO: 5104 - DNA, 4282 bp, Heterodera glycines
aatcccgcaatcccgcacgccttacatcggaattttaaatgcgggatttgcgggattaatccctcgtgatcccgtcccgcaaaaaattttgagttccagtcccgcagcgggatccgcaaatttgaaatttcccgtctctagtgattagtattactaattagatgctgcctttacactttgttttattaattattatgcgtcgtttctgttcagtgtttgtcgcctgcgttatgttggccgttttcggctacaaagaacttcggaagagaggcttttttgtagcggacggagaaagacagaacgaaaatttgatttagaagagagccgaaataatatttattcatttattttttaatttatggggcatactttttttaatgacaataaatacataagcaatttggctgtactttagaattggacctgctgttttacctatttttaaaccaaccaaaaacataaaattagatggagtttcaccatttactcctttacgaaattgtacaattccaatacaaattcaaacattacacattaattaatagcgacaaatggggacatttctctcgacaaaagccctaacgaatatcaaaaataaataaacgcgcactgacagaagaatgaccaatgaaaaccgaacaaaaattaattgcgtataattgggggtacaaagctcatgatgatggcaattacggcacaatgaaactgcttgatttgatggtcgagatcaaattgaagcgaaatagcctccgggaattaacaacccaatcatttcccctcataaagctgtcggatttcctccgcgaattttctctcgatgttcttgcgcttcaacttcagtgcttcggtcagcattcccgagtcggcagtccacggctccgcacagataatgactttcctcgggatttcctccctgcgcaatttccctgaaaaagagttgtttaataaggcaaaggttggccggaagaaaagacccgaaacaaagttttggagttccttttccagaagcttggccatttctttgttggcacaaattgcctcccaactcgactcattgacggcattctgaagaggggagaagcgatggcttattaattatatcattgccatgacgcgaaacggttgttttccgtttttgactcccaccttttcagcaagtgcttgcaagtttttgcgatttgggaccacaagtgcgatcagatagtccttttgcgggttgccataaacgcaaatgttgtccacgttcggattggtcagcagcgccgtctccacgcgccccaaagcgatgtattcgccgtgggacaatttgatcaaatccttcttccggtctgaaaatgagagagaaattgccaacaacactcactaattaaaaccaataatgcagagactgccatcctcgcctaaacatgaacaaatttgtcattatgccaatgcttttggtggcagtcaattgcttacggaattggccaatgtctccggtggcgaaccaacgcttcccgtccaactcgacgaagtcctccttggtcttctcctcatctttgaagtaacccaacgcgacattggccccgtggatcagaacttcgccctgaggaggcgaatttgtgggcaaataaccagctgaaaaagaaagatatgcatttgggaataaattttcaattacgtccgccattggacctaattatgccgacacaaacccccccccccgaaaaaataaataaattaatcttttgggaccgtttcaaaattgaattttaccttcctcccattctctaagccgaatttcacaactccgaagcggcggtccgaccgaaccggtgctgaggtcgtgttctgaaagtgaaaaaatgcttttgcttagactatgtttttttgaatgaacgaccatccgccaaagtggcgccaccgcaagtttccgtcagcccatagccctgaacgacggggcaacagaagcaaatgttcatgaaccgctgcgtctccggattgagcggagcaccgccagaaatcacaaagcgaaggttgccaccgagcattttgctgattttggcaaaagccaaactgaaatttgaaaatggcattacaaaaacgcactttttaaataattaaatttgccgttgaatcccttcggatccaggacgggtgggagacgcaggagaagaagaagcattgcccttttgatgttcagaaaccaaaacctgatggactacgtgttcggcatgctcgagcagtacgccagttcactggagcaggaggtggaggagcgcaccaaagagttggtggaggagaagcgcaagagcgacattctgctctatcggatgctgccgcggcaggtggcggacaaactgaagctgggcgaggcggtggagcccgagtccttccaaatggccaccattttcttctcggacgtcgtctccttcaccactttggccggcaaatgcacgccattacaggtgacaaaatcagtgatcacatcagactggggaagctgagtgatttgttcaaaacttacaggataatcactctgatcagtctggggaatctagtgatttgggcagaagaaatgtagttggtgataacgaatgggacttagtctgactattgtgatcaacatccattctgatgataatatgattcttacgtcctccccctctccgccgtttaggtggtgaatttgctgaacggactgtacaccgcctttgacggcctcatcgacacccacgactgctacaaagttggtcagtcagcggccgatcacttccatttgatcattttacaacgcatttccccgcacagaaacaatcggcgacggttatttggtgtgttccggcattccgaagcgcaacggcgaccaacacgcgaaggaaattgcggaactttcgttcgctttcctccgcacggtgtccaacttccgcgtcgaccacctcccctccgaacgcgtcaatctgcgcatcggcttccattccggtccctcccctcccctcccatttcaaatttggcattttcaggcccagcagtcgctggcgttgtcggtctgacgatgccgcgctattgcctttttggggattcggtgaacaccgccagccgaatggaatccaacggaaagggtaaaattggggggggggggggggggagaaaacaaattcatttcccatttcagccggcaaaattcacatttcatcgagttcaaatcgcttcttgaccagcgtaatcggaggatatgtgacggagccaaggggcgaagtgattataaaggtaattaggggggggggggaaaggcttttgttaattaattgcctaattaattcattagggaaaaggtgtgatggagacattttggctgttggggcgaattggcgaagtccatttgccggaggggccatccgtgccggaacggaagagcccagcggaaatgcgctgattgacgggaaaattaccgtttaatttgcaatgcttttcctttttcttatttgcccattattctccaattattgcttttgtgcttgtctccctcccttcaaaattaattgagtgggtaaattgtgaatgccaattaaaattaattaattgttccagacggaaatattcttcatttacttataaatgatctcctcattttttttgttgttcgcataatcagttaaaataacgattgttggcagaggactcttaaagataaaaacatcggaagcttaatcttaattaaaggataatgccatcaaatttgacagtgacaaattgtgtctcccgtgagactcgtacaataattcttcatttttgactatttttgcccccggggaattcaatttgatgcgattgacttttctctccattctttgaaatgattcaccgatggtttctccgtttcgttatctgatttgttttttgccaatttgtgcatattaatatgattggatggattccatcggatgatttggtgaatcatttgcctttgctttgctttcactttatttcatttgcttcattttcccccatttttaatcattccaaaattccaataatttagtaaaatgctttttccaatgcttttcgtcctttccttctcgcttttcccaccacttttgggtactttccccgttttttgctcaatttcccccattttccaagggttcaaccatttcctcaagtgctcctcctcgttcatccacgcgggcccatgggaaattgagctgtacgatttgatcaacgacgtgagcggaactctgcgggccacggaggagaagcggaacatcagctgcatttcctatgcggggtccatgtgtctgaa

SEQ ID NO: 5105 - DNA, 815 bp, Heterodera glycines
  unsure (1)..(815): unsure at all n locations
gatttatttacatatantttgagaggtttttcttcattaaatacatttgatcactgatttgaattatgatcgtccggtcattttcaattaatattcatttcttctgcgtctgctcattgtttttgttcgtttgtccgtcactcatttgtcagcagaagacggcccatttgtgatgctttgtccggcttcatcttcttctgctggtggtggcggagacaatggccttaattaagcgcaaatctcaaatttggatatgtataaaaacaaatcccctttttattgctcacccaatgcaattagtgtcagcaaaaagccaaaaaaacacattgttacaattgttgtcccaatttccgtctccccaattttgcatcgtttcattatccaactgttgtcccatccctttgctttggccaatgtcagcttttcctttgtccattcatttaccaattcaaacggcaccattggcatcgacggcacacgaacagaaaaatgaatttggtaattccatttggacaatgcttggccagcagaaattgttgcatcaaaatcagcaccaaacgcagcgggcgacaaatcacaggaatagattgaagtcaattggttaagatcagtgagaattgtcggtgaaatttgacgacgcaaattgtccaaatgatcatcattgttaaagcgcaagtggcgaatgttttcagaaaaaatgggccaaatttcacgaacaaaaacatcacaaatcggctgctcatccgtgatacgtacacaaaaaatccacaaatctaaattgatgcctcttttgtcaaaaatttggtgatttgaac

SEQ ID NO: 5106 - DNA, 1014 bp, Heterodera glycines
aaaaaaaaaaatgttttttttaatctggttaaacccctttttctggggttttaaggtcgcgattcaaagcttgaaaaatagggaatccggaattgaacaaacatagcactttcaatttttgaaacccccgggaagatgttttacatgacttttttcgaaaaattgggagaaccacaatattatttattaccaatttttccattgcagatcggtggaaaagataagcagtttccgtgccacgagatgcccaacaaaattcgcttctgtttcctccaaattgagtaattcaataataaattttctgtggccaatggcggagaaaattcattggtcccgaattttttgttaattttaagaaaacggcaatcatcaagaatgggggtcccatattttcattttttgttttgggataagaacatgaactttgtttgagttagttagctaaattttccaaaaaaaaaagttttttttgagtgtagggttaggccatcggaaaaagtttggaatttttggccgatttttgaacagattttgagataaattatccccccccccccaaaaaaaagaagaagaggtctcagtgcatcagattacatacttctagaaatgacttagaaaattaaaaaaaaatttcttggtcgatgttctccacctttgccttttctgtgcgtgcgcgcttgcaagggctcatttttcgtctaaatctgttcaaaaattgacaaaaaaaattccaaacttggcctaatctaccctcaaaaaaaaaaatttttttttttttgaaaatttcgctacttaaataagaggccgaagagcaaacacatcgctcgtgggaggggggggggttgcgatttttttaaattttatgatcagttacaagtttttccaaaaaaatttttcccaaaaactacagcatgttgccccccccccttttgtgcagatacgtcgaccaaactgtcatcgaatttctgcgttccaacaagcaaatctttgaccgaaggggcaccaatttagact

SEQ ID NO: 5107 - DNA, 4244 bp, Heterodera glycines
aatgttgcaacaaaaaaaccagtctccttccgacaatttctggttttgcatctccaatttccatattttcgagcaataatagctggaatggaagttgctcctccgcagcgtgggcatgtacgacgagcatggagaagtcctagctgttcaagccattcgtcaaatgcacgtctctgagttttatccatgcgaacattgattattttctttttcgtgcatttgaatcgatttttagcaataaatgtgaattttgttaaaaaataaatttttttattttattcgaatccgggtcaggggttcggaatcggtcgaaatggatgtcggattcgtgatcagcgaccccgaaaacccctagaaattaatttcgggggaggaaggggaaggagttcgactgcgattttcgacatttttttccgcgtttcacgaccgcggcaatttgaatccgcaaacgcgggattcatcgatattttaatttcaaatttttatatgtattagttgacattgcaaaaagaagttcacaaaatgtccgaattgaattgcgtggtccaatttgcattgggtgggtgagcagcagacgacctttttttggtgtcatagcaactcgtacaaaatgcaacagctcatacaatttcttaggctatgcctaggcttaggcctaagctataggctagtccttaactttggcctgctctggcctaggctaggctttattttcctaatacatatttcttgattttcgtacgagttgccattgactccttttttattaattaaatttattggtaattgtttagcggtggggtgaatcaaaatcttctcccaaaaatgcgagattcgaaaattttaattttgagtttttgctcaaatccgggttcgggattcgacgtggctcaaaattaatatcagattcgggttctccgctctttaatttttattcaaaaatttatttaactaattattcttcgaattcaaattttaggccattgtctccgcccgccgaccaaaacaacgaaaaaggcgccaatttgtgaacctatggcaattgatgagaaaagaagaaaggaacgaccatttgattacctctgctggacttgatttgatgctatttactctttgaatgtgcttactttttcttttgtttaatggattttcattcaaaaattgcaataaatttcaaaaatttgatttttttttattgcggcgtcatctgaagaaaattcgcgttccgcgactctgaaaaccatcatatttttctcactaatttgtttcaattgcttttattttaagacgagattaatttttaatgacaccgcctgccgagaaaaagcaaaaacttttgtccgccgttgaaaatcagcagcaatcgtcgtcgtcggcttcttttgtgaaaccatttggaggacggaagaaaatgcgagtgctcagatttcgcggctaaatgttgatatttaataaaatcaacaaacattatgccatcaaaacaaataccaacgcaaatttttaaaatttatttaagtggcttataattttatgtagagcgataacgcaaaaatgagttctgctatctctctccccattttatttttgcgccaaaagtcatttgaaaaaaattgctttaaaatttcaaaaattatcgaaattttaaaaatgatgttgagcctttctctaccctcgagcccattggcaacaatttaaggcgaacagatttgaaaattgttttgatagaaaatgcgattctcgtgtttttctcatcaagtattatcgtaaaaaataggaaaatcctaaaaatccaggctttatccaacgcattaattcttctgctatatattgtgtgacatcattcagaatttggccaaattgtgcttatttctgccaaaaaatgaacaggcggtaaggcatttttttaaaagccacaaattcctcacttatttagcctaattgtttcccatttcagttggatttgcaacgacgtttggatggacattttcccatcctttgaccgtgctcaacttggcctcaaattggcacttctttcgccacgtttcgatgcgttggtggacaaacatttcaatggcaaaagcgaattggcaatttggagaccaatcgaaattcgtcgcaaggacaaaggaccagaaccgaacctatctgtgcggatggatgacaaatctttgcccgaccgtccgttgcccagcaaaatccgttttaagagccttcagattaagtaattaaaaatcagagctatgacaataaaagcattcattcctttttcaggtacatcgatcactccgtcatcgcttttcttcgttcaaatcaccaaattttcgacaaaagaggcaccaatttagatttgtcgattccttcactgctatatatttgtgtgacatcattcggaactcggccaaattgtgcaatttcaaggaggtgtggccataatctcgacaaatcactgatatttgttcctatcgaattgtttagcattttcttcgtgccaatgccatttcttccgtcagttacgaaattcatttttctgtttatgtgccgtcaatacaaatggtgccatttgaattggtgaacgaatggacaaaggaaaagctgacattggccaaagcaatggaaaatgaattggacaacatttggataatgaaacgatgcaaaattattggggagaccgcgacggttcattggaacgacggaaagtgggacaacagttgtaacaatgtgtccatttggctttataatagcgccaataattgcattgggtgagcaattaaaaaaaagtgtttagataattcaaattgcgcttaattaaggccattgtctccgccaccagcagaagaagcggcacaaaacatcacaaaggggccgtcttatgacaatgaatgaatgagtggtgggcccagcaaaaacagtggtcaacagaagaagaaatgatttatttaagaatgaccgaccgatcataattcaaattagtgatcaaatgcaattttatgatgaaaaacctctcaatttcggtaaataaatcggacgtataaaaatggcaaaaaattggactctattgcggttcacacgcccataagctttttttttgcaactttaatgcaccatagctttttcttattaaaaattcttggtatcactcgatagccctaagagaaaaaacggtaatagtaaagctggtgctggggttttcgaggtcgctgatcacgaatccattatccgtttcgctcaatttcgaaccccggactcgaattcgaaccaaaagtcgaaaattcaaatttttcgaattgcactcttttgctcaaattttgtttaagaacacggaaatgaactaaaagtcatcactgcttcagtaaaatggtaatttgaaccatttttagactaacaagtgattccaaaaaattgaattttcgactttttgttcgaattcgggtccggggttcggaatagggcgaaatggatactggattcctgaacagcgacatagaaaaccacaggaaacctgttttcatgccttttgaaaacaaaaaatatttttttcaaaaaaggggggggcaccagctttactattaccgaaaaaacattttccttcgctaattttagagacaggcacgatacatttttgattcagtctttttcgattaactgatcaaaaatagaaaaatttttgtatttcgaatttttaatataaatttcagaaattctttaacaaaagcaacaatttttttattgacgcgtgacatttttgggacaccttcaaaatttcaaaaagtttccattaaataaattctgttgaaaaataatttctccgtctccattttttcgagttttgaaccggttcaaaaaccgtttttttggcatttccgcaactcgagacatatttttccacggtaggggggggggggggtcagttgcgtctggccatttgcgtcttagtacttaaggggccagttgcgtctcaaacattttttatagagtaaaatggattaattaagttttctgtatgctatattttcattttcacagatacattgacaagaaatattcaaaaatttatagaaaaaataaaaagttttaacaaaattaacaaagtttcatttacccatttggtaattgcttgaaattcccctgagcgtttcaataatcgaatttcggttattttggttttggccgtattggtgatcgtcgtcgatttgcgccgggggggggtctctcattgtagcgctccggaatcctcagaaattcgt

SEQ ID NO: 5108 - DNA, 4058 bp, Heterodera glycines
  unsure (1)..(4058): unsure at all n locations
ttccgctgttaatccattcgcttgaatcatatatcccttataacaatccttacaaccatgaaaagcacatccctaaatgataaatatttttaaattttaattatttcccaccttgaatttcaatgatcttttttggactccaattatgcaatcaatttctaattttttgtcgccaataagcgatatttctcccccatttcctgcgtgcctcgctttaaccccgtcccgatgcataatccattcaaaatattttatcgctatattactctgactgtcctttgtcaaaaatccactctcaggaataatcggcaatgtttcactattttttaaaaatttggcacgaaaaatgctgaaatttatttatttagttatttttattttggtccctaattcatgcatgaagatgcaattgttgtggataatctcataacatcaatcccttttggtgtctctttatcttttgttatatctataaaaatttttctcaattttataagcgctttcattaaaatgtccgtgtcatttgaacaatattcatccaatttttcctctaaaatcaattttgtcacaattaaaatatttttatcttacctaaaataaatccattattgtaatttgcatagtaccattttttaaatttttcatattcttcttcacttaattcatcagggaaataatcatcaaagggtgggagagtagccaagattttgcctaaaattggaattttaattttttttttaatggaaatctttttaccgtaattttcttctttgttaaattggtgtgggaaatataatttcgattcacaatccaatccaaatgtttttggtaaatgagctaatttattctgcattaaaagccaactgtcccggaagaaaaatttcggggatttttcgccctttttaaatttaatttcataaatttttaaatccgcaattgtcaattctggctgcttatatcctaaattcgcaagttccctcaaaataaagtgtgagtcatatcgtcctaaagaaaaatttaacaccttgtaaatttattttattccttaccaccaaaatgtgcatatgcatatgtatcatatttttgaaaatttataatccatttaacaaaacaatttaacgggtcaattctatccatactacaccattttaaatgccgggggccgtcaccgcaaatttcgcactccttaatttctcccaaacataatgaacaggtaaatcgtgcactaataaaattgggtttatgaatagtctcctttttcaatgaattttcatccagaatcgtattcgtctaaatcataaggtattatttttacaactaaaaaacaattaccgtgcattccaaatcataagcgactatcctatatggagccatttttttgattttcaatttttgcataaaacataatttctttgggtcatgaattaaatgacattttctacaatgtttctgatctaaaaatacgaaaaagttttttatttattataaatattcatttttaaaacttaccgcaattatgttctgtgtccgtcctaaattctcctttgcattttttacatttttgatataaagaacatattttatttttgtgatgctcaaagcaattctcattaaaaaaagccctgttacacttctcacagttaaatgtttttctttccggggggcaagggaaaccaaagccttaaattttccattaaaagatttcttttttattgttacctattcgacagcattttttacacctctcttcacactccaaactatgtttttcctcaatttgataagtagtttcacaactaatacaatatttatgtttaatgttaaaaaattgtcctatactttttattccttaaaacattttttattacgaaaaaactatacaaacccaccatcccaatgatttttgtcatgaaaaatacacacattatattttcgggggccattccccttaaaaattggacgaagcccaacatccctagaaaaagcaacaatacgaaaatttcccggaaatttcgagtcctaaataaattaatttctcattaatcctgaatttttatttttacccaaaaatcctgaataatttgtaagtgttctaatccgtatgatttttctttcatatttatttttgcatccgtcattaattgtttaactgcctcccattgtctctgttcattcgctattatttttttgaattggtcccttgaaatggcctcctcatcatttttattaattaattgataaaatctgcttaaagttaaggcgtaaaataaacctaaaagatacattaatatatttattttccatttcacttacaataattgtccgaatttttgacgctaattctccctaattctttaatttcacaaaaatccaatgggttaaatcctaaaatattatgtcaaatttaattaattattttttttacctgcccctcggggtgtactatatgtagttattatacaggaaatgggctcatgctgtaggtcgaactcactatacgattggttaatcctaaatatttcgtgcaaaacagtgtcggcattgttcatttttgggtcccgggccggcaaaatgattgggtcatttagcaactcacaaaacaaatcaatagaaatcctcttaacatcccacccaattctttttttcatcattgcttttttaattaaattttcgattatttttttaaagttttcggagctctcttttcgattttctttttttggatttttaaatataaatcttgtaatattttcttgaatcccgtaatcgggcatacttttttcggttgttgatatttcgatataattattttcatttaattttatttcatcaatagtttttttgaaaaaattttttatatttctttcttttattttttcaccggggacggccaagaattttttttggacctgggacattttttaagtgaaatatgttttttttttaatataaaataaatattttattggtaaatttgaaataaaattcaatttgtaaaatatttttataagcaattttattttttctcgattaaagtgaaatatttttgcgaaattgcgctttttatagcgaccgcagaacgctcaggtgacaggcggaccgcctggcacgtggttgtttttcatgagtcaattaggcgggaccgcgagtattgattggccttttccacacagtgcgtcgcactgactggccgatgagtcacgtgtttattgcgaaataaggtccggtccccaatttgaatgcaaattttgagccatcaatcacttaagttgacagctgtgccagcaacagctggattttccaaaataattaggtcaaaagaggcgccaaatttgaattttgaatgcaaaagaaagttatttttcgctgtgaactcaaaccgtaaaaattccttccgttatttttcatgttttgtaaatcatttatttattttcattttttttaatataaaataaatattttattggtaaatttgaaataaaattcaatttgtaaaatatttttataagcaattttattttttctcgattaaagtgaaatatttttgcgaaattgcgctttttatagcgaccgcagaacgctcaggtgacaggcggaccgcctggcacgtggttgtttttcatgagtcaattaggcgggaccgcgagtattgattggccttttccacacagtgcgtcgcactgactggccgatgagtcacgtgtttattgcgaaataaggtccggtccccaatttgaatgcaaattttgagccatcaatcacttaagttgacagctgtgccagcaacagctggattttccaaaataattaggtcaaaagaggcgccaaatttgaattttgaatgcaaaagaaagttatttttcgctgtgaactcaaaccgtaaaaattccttccgttatttttcatgttttgtaaatcatttatttattttcattaccgcagaacaatttttattatccgatttaatcgtagataacaacttatgaccttccttttnggtttcattntcttttgacaaatatgtcgtttaatcattttgtatttttcgaaagtgacaa

SEQ ID NO: 5109 - DNA, 3860 bp, Heterodera glycines
ttacttatttattttcattttttaaaacttacttcatgcacgaagatgcaatcgttgtcgataatctcattacatctatcccatttggtgtttcctcatcttttgttatttcaataaatatttttctcagttttaatagagcgttcattaaaatatccgtatcgtttgagcaatattcatccagtttttcttctaaattttattttaaacacattaatttttattaattacctaataagaatccattgttataattcgaataataccattttttaaatttttcatactcttcttcactcatttcatcggggaaatagtcctcaaaaggcgggagtgtagtcaaaattttgcctaaaaaataacatttttttgttttttgtatcttattttaccgtaattttcttctttgttaaattgatggggaaaatataatttagaatcgcagtccaacccaaatgtttttggtaaatgtgccagtttgttttgcataagtagccaactgtcccgaaaatgaattttcggaaatttctctccctttctaaattttaattcataaatttttaaatctgctaatgtcaattctggttgtttatatcccaaatttgcaagttccctcaaaacaaagtgcgagtcgtaccgccctaaaaaattcttagatttttttcattgttttttcaaatcttaccgctaaagtgtgcatatgcatatgtttcgtgtttttccaaagttgtaatccattttacaaaacagtttaaaggatccactccatccctactacaccattttaaatgccgtggtcccgtcccacaaatttcacaatccttaatttctcccaaacatattgaacaagtaaatcgggcactaataaaatttggtttatgaatagtctcttttcttaatgatttttcatccaaaatcgtattcgtctaaaccaaatatattatttttagacctaaaaacaaattaccgtgcattccaagtcgtaagccactatcctataggcggtcatttttttgattttcaatttttgcataaaacacaatttttttgggtcatgaaataagtgacattttttgcaatgtttttggtctaaatagttttaaatattaaacactactctttttatgtttaaatttaccgcattcatgttgattttttgtatctgttgtgtattctgtttgacattttttacattttttataaattctgcatattttgtttttatggtgctcaaaacaattctcgttaaaaaaggttctgttacaattttcgcaatttaaagtttttctctcgggggggcaggggaaaccaaagccttaaattttccagtaaaagattatttttttattgttacctattctgcagcattttttgcacctctcttcacaatccaaactatgtttttcctcaatatgataggtagtttcacagctaatacaatatttatgtttaatggggaaaaattgccctatactttttattccttaaaacattttttattacgaaaaaactatacaaacccaccatcccaatgatttttgtcatgaaaaatacacacattatattttcgggggccattccccttaaaaatcggacgaagcccaacatccctagaaaaagcaacaatacgaaaattccccggaaatttcgagtcctaaataaattaatttctcatcaatcctgaatttttatttttacccaaaaatcctgaataatttgtaagtgttctaatccataattttttgcgcgcatattgattttggtttcattaattaattgtttaactgcctcccattgtctctgttcattcgctattatttttttgaattggtcccttgaaatggcctcctcatcatttttattaattaattgataaaatctgcttaaagttaaggcgtaaaataaacctaaaagatatattaatatatttattttccatttcacttacaataattgtccgaatttttgacgctaattctccctaattctttaatttcacaaaaatccaatgggttaaatcctaaaatattatgtcaaatttaattaattattttttttacctgcccctcggggtgtactatatgtagttattatacaggaaatgggctcatgctgtaggtcgaactcactatacgattggttaatcctaaatatttcgtgcaaaacagtgtcggcattgttcattttagggtcccgggccggcaaaatgattgggtcatttagcaactcacaaaacaaatcaatagaaatcctcttaacatcccacccaattctttttttcatcattgcttttttaattaaattttcgattatttttttaaagttttcggagctctcttttcgattttctttttttggatttttaaatataaatcttgtaatattttcttgaatcccgtaatcgggcatacttttttcggttgttgatatttcgatataattattttcatttaattttatttcatcaatagtttttttgaaaaaattttttatatttctttcttttcttttttcaccggggacggccaagaattttttttggacctgggacattttttaagtgaaatatgttttttttaaatataaaataaatattttattggtaaatttgaaataaaattcaatttgtaaaatatttttataagcaattttattttttctcgattaaagtgaaatatttttgcgaaattgcgctttttatagcgaccgcagaacgctcaggtgacaggcggaccgcctggcacgtggttgtttttcatgagtcaattaggcgggaccgcgagtattgttggccttttccacacagtgcgtcgcactgactggccgatgagtcacgtgtttattgcgaaataaggtccggtccccaatttgaatgcaaattttgagccatcaatcacttaagttgacagctgtgccagcaacagctggattttccaaaataattaggtcaaaagaggcgccaaatttgaattttgaatgcaaaagaaagttatttttcgctgtgaactcaaaccgtaaaaattccttccgttatttttcatgttttgtaaatcatttatttattttcattaccgcagaacaatttttattatccgatttaatcgtagataacaacttatgacttccttttggtttcaattttcttttgacaaatatgtcgtttaatcattttgtatttttcgaaagtgacaaataccgaatacctattaatttggaatggttgacaaaattcttttgctttctttgtaaatttatttaacaaatgacaaataaaaagaatcgaaatttaacaaaataaaaaccgattatttttcttgttttctaaaattgttttaagcttaaactctacgttttttttcatttaccttcccaaatgcatttttttcagtttagttattcccccttttcgcgcactttttaattgacttttccactaacgcacgtgatattttgcaactcactcccgcgacccacgtgtccctctcattcaactaaggggatcaatattttatgggtgtaattctgttcatgaaattttctcattccatttggggtgggggggggggcaaaaaataatggaatggaaaacgggggactaaagaattgattagaaaatgtttaatttttcacaataacgaaaagattagtaaatttttatttataatcaattacatgaaaaaagggtggaccaagatatgggtttaggtgggggtatgaagcggggcgtctttatacccttgcatgtatgactggctgtcaataacaccctccccccataggttttcaccattaaatttcacctttgttcttgcatttttcacctcttttcaccacgttttttcacctattttagcaatttt

SEQ ID NO: 5110 - DNA, 1030 bp, Heterodera glycines
  unsure (1)..(1030): unsure at all n locations
ttttcaagctattgctcattatttgcacattttaaatgattcatcatccaagcaaagatggactcatttcaaaatataaatggcattcaaacgaagttttaacccattaaaccaattgaaagcgcacattagcaaagtgccgccatttctttcgcctttattaggccaaattcactgggctttgaaaaaaaaagcattttttaattctgttaataaacttatgacttatgatgaaaacaaaaatcaaataaaaacgcatttattggaagcattttcaaaagttcgaatgcatttcgttggaatttgatagaaattaataaatgaattggcctttggtgggaaataataaataatttaattattgacaaagtaattaagacttatttttcgtgcttttttctatcaaaaaaaagctacagaaaaaattaattttaaataaaaatattaaattgtcccacgcttaatttcgttggtatgctaaagaaattttgtccgctgtcattaattcactttattattaaagtgaaaataacacctgctgttccctcaaatgggaatgaatttttatcttttttcgattttttatataaatttttaaaattttcccgacttgggctttctttaacaaagccaaattcgatcgagatcataatatttatcgactaaagactgaggagattctcgagcacattaataggttattgttaatgttttcaatttcattttttcagtgatttaattaattgcttttctctcacgacactttcaattcattttccaaatggcttataacgcatcgactgacgtggtagacagacattaaattttatttcaaaatctcccttttatttggccattgaatatttttgattaattgtttttcagtggttccaatatttcaattcaaatgggccccaatgggtgattcttctggcagcgtatggctttcgagctttgtgggcaacccttggcattatggatcattntggcattgtgtacatcaccccntaaatcaagtgcccctataatt

SEQ ID NO: 5111 - DNA, 2060 bp, Heterodera glycines
  unsure (1)..(2060): unsure at all n locations
atcaccctaaaatcaaagtgcccctataattaaaatatttacctaaataaaatcttaaatttttagaagtttgcgcggaagttgcaacattttgatagccatggaaagtgcctttgcactgattttggacctcggctattatgtcagctttttggtggtcatttctggcatcaaatttatccgttacgagtactgtttttggtttcttattgttccatgtctgcttggagacatggcacagatgacgatggtattcaccggggtggaccgactgacatgcgtaatgttccccatttggtatgataatgagcatgcgaaaatcattttaatttaaatatttttaaggcgattaaattgaaatcttattttaaaggtacaaaaagcggaatgccaagtgccatttggcgttcgtttggttcgttttgctttgctatgccacttatgacttcgtcattaattacattgactacctcaacagcaaaaaattgtaatttaatttttcatttttaaattatcgattttcccattttcgcttattctcctgcaccacaaatgaaatgggctacggcggaatgggcactctgatgaaaatcaatgggctgtcattgagcggcacactgatggtactgtattccctgtgctggtttacggtgttcaaattcaacgcgacatcgaaaagtgtttttcaaaaatttgaattaaaaataattatttttaaaattaaaaatcaataatttccgatatgaatgccaacaatcgcaaattgaccaagtctctgatctttatcattgcgctcaatctgttcggcgtgttcctcaaaagcagcgtcaacatgctcttccaaagctttgtcgttgtaaatgtttttgtcaaaacgtccgtttccatcgctttttctttcttcacaattaccgtatacagcgcaaatgcaccagtactgtacattatcaggtgatacggaagcatttttattttttactatattccaaattttatgtaattgttttatgcccttctgattgatttttattttccttcctcacagtaatgagtaccgtaatcgcttccaacaaaatttcccatggcttatcaaagtgaaagggctgggttctgcggtcacatcagtctcagcagtgcaacctcaatgtaccgtagtgagccgaccgtggcaaaacaacaacaataaatacggtactgcgtcctacggtggcactcaaatgtttggcaaattcactaacgctaatattgcgagagttatgtgatgtcatcaggaggagggaatttgacgacagaacgaaggaaaggcactttctttagtcagtgatgcattttaattttaccaccgaattttagctcaaaaattttacaaacgttggtttaattaaaataaaaaacaaaattttgaacaaacgcgtgtcgcgtccgcgtcattttctgtccgcgtcccaactgtgatgtcagaaggaagcggagtgtgaaagaaagtgagataaaggacatgagagaaccaaaacaggcacccgtagctcagtcagttagagcattccacggtgaggaaaggccgtgggttcgagtcccaccgggcgatttatcttttatgttctatacattaaattttgattttaaacctgggttcgtttattgatcatcctcttttccaattagcaaaatatttttgcattttcacatttgtcttctcttttttttgcttggctttgttccacatgtttttgtttttttccatattatttgttcatatttgatatttttattaatgaaaatcggttacttattacttaaattgatgatttgttaaacataaagccaaatctttcaagaatgatagccaataaccagggatgccagatctgaggatttatcctcattttgtggctttttgataggtcaatgaggatttttttttggaaaatgaggatttttgtggcttttggggacggtaggggtcaactccgtcttagtgcataaggggccaactccgtctcagacaaaaaaaaaatatttaaaaatttttttcgacgaaatttttcaaaaaanntata

SEQ ID NO: 5112 - DNA, 2535 bp, Heterodera glycines
  unsure (1)..(2535): unsure at all n locations
ttgctcaatcaaaatacanaaattgatcatttttaaacgtgtttgaataantctgcaaaaatgaggctttttgacacaaaatgaggttttttgcatgccaaatgaggcttntgaaaattntaatctggcagccctgccaataaccaattagaattcggtggaaggggaaaagtgaataattcaataaataaattagtggtaattaaatttgtcttctttttctgcctgtgtatattcttccccgtggtcgccttctgtttgcgcatcggttgcaacttcgcgggcattgccaattcatcaaatcattgtacagctaacgcaaaaaaaattataaagccaacaaaaacagtaacaaatgtttcagacatttattttaaagaaattaaatattttgttaattagtcttaatttgattttcttttttttctcaccgctctcccacaataacccgccctttgtcggtctggacattcggtgcccaaatcttcacaaactcccgggcaaacattgcacgttttcggacagtcgcgaaccatttggtcataggcgaacttaaggggtgaggcgtaagacagttttcaaatataaattgtttaattaagagggcatttatctaaaattgaaaaatattcattaacacaaaataaccttaaaaaatattcattattattttttaaattttcccaaaatcaaataaattccaaaaatgctcacaaaaatattttaggctattacttagggtgtaacataagtttccgcacaatttttttttgacaaattcaaaaattcataactccgtaatttctgcagttattttaataattctttttttattttgttcgtcagaaagtcttctttcatttcatgccattgtttcattttttatttgcttattcaattttttagtattttttcccgaccatgcaaaaattgaaaattggcccactaatttttctcgattttttatggtcaaaaaagtaacctgatataacaaaaaagaaggttttctgtacaaattagaccagtagaatccgaatatggccttaaatctgacctatcttttaaccctgaacttgtactgctccaactccattcggactcagcgtggtcaatttatttagtttaattaaattcggaatttccaaaaccacttaaaacattttgttatttgatggtcttgaaaaatgccgtttttggagaccatttttagactcggccctccaataattcatttttgaagtaataaaattttttttcttataattttttatagtcctaactttgctctatttactaacgttttctctgcctctgtatctcttttcattttctttaaatcagccatcaaaaatacatacctcgaaaatgaccatttttacattatcaactctaactccttaaatacttttctaatgggatttatcccttgcccgataaatagcaaactcattctcaataataatgttagatattgtggttttttaaatttatattcataaaaaaattctttaaaaaaagttgtgcggaaacttatgttacaccctaagtaatagcgcaaaatgagtacagacggtaaattattagaagaaatgatttatttaattatgcaaactgtcaattacacctcaattatgcataagtcagcacgttgtgcacagtctctggccacgtccgcgcaacctcaaatttttagagaaaattatatggccctttctttgtctttgttttcaaaatgcatttaaacaatactcgaatcattggcacttcctcctcctcctccccctgctggtgatggtcccgccggtagtgggcctaaatttttaaattttaattctcttttatcaaacaaaactaactgacaacaatattcgtttccgtcactcattgttcggcaaatttgcgatggatcggacggacaaattccatttcggcatctgtcgacaaaaaaaacactgtttaaattaaaatatgtgataattatttaaaatatccctttattgattttttattttttcaattcactttttctaattgaccaattaatatgtaattcgtctaattatcttaaattattgcgtctcagtttgttttatattcaccttttactacatcgttatttatttccccgttacccgacattttcggcttttcccgaccccaatccaccatttgtcacccttctctccgatcccgactttcttgcccgaaggctcggtagcagcactgtgcttagacagatttttcaccttccattttgggtgccaagtgccacccgcgttggcaccgcgtcgtcacaatacgccgcgcaacagtacgaccgtccgtctcgcgtgtccaactcgcagcccaatgccctcgtgtccgtgcaaattggcggatttccctggcacctttcaaaattaaaattccaattttatttatatttttttctttaccgggaaagccccggctgaccatcacggcaaatgtgttgaggcaaacaaaggaagaagcacaaaaacagaactcccaagaaaagcagtgaaatttgcattt

SEQ ID NO: 5113 - DNA, 4699 bp, Heterodera glycines
  unsure (1)..(4699): unsure at all n locations
tttaattttatggtttttttaatagtaaataatataaatgctaataatttccatatggttggcttttgaagtatagttttatacatttatcttgctgcaaaggtttcactttaagcgatgtgtcaaaaaataccattggaattcaacagttataatcaaatcaaagttgatcaaattggatgtgattgtttctatattcgtaaaacaataattggcacggatgatataaaatcttgcactacttatctgaaatgattgaaaattggaaaaataaagttttggcaattgtgtctcaaactggtttaagaatttaaaaggtatcaatgatagtaatgttcaatttcataattaaagttattaagataaacaatgttgacatttagtgtgagatctaggtgtactcctttttatgtattagaatttagcaaatctcaaaaaaagattcgacacaaaccaataaaattaggaaagcttgataccattcgatagctctaggtgttttcgagtatcccgcaaaattacaaaaaatttagccaagtttcaaaaaaagttatggccaaaaatgtttgaaaacccggttccttgtgtaattttggccataactttgctcaaacttgacaattttttgaaattaaggataccttatagtgaactcatagggttatcgaataattccaagaatgtttaatttggttgaccttaaaaaagttataggcagttttatgttgaaaattttaatttaagggttttaaatatatgcccttattgatagtttttatataacgacttcacaccagggatgggccaaattgaaaaataaaaagcgaaatgcgaaatcgtcaaattttgtggtttttgtatcatttttctaatgagaaatagagttttggcgcgccgctgaaaacagtttttcatcaaattaccaaattttgcgattttgtaccattttctaagaaaaaataggagttttgggggcgcggcggtgccgataggcgccgccggggaaaaaaattggaaattttgatcatttataaacaggttttcactgaaaattagccaatttataggtaaaattttgaaaaattttatgggaatttaatccaattcttaggggtgtaaaagtcgcatttcgcgccaaaaagcgaaatgcgaaatgcgaaacgccaaaaaatgcgaataatgcgaaaggcgaaatgcgaaaagcgaaacctaggcacatccctgcttcacacccttttcaaacctctctttgaagtctgactgggttaattgcacattccaatttatgaagggttgaaaatttaataactttagttaatttgaaatattttaatgccttcacatatagaaatttttaagaaaaactattattttttaaagttcatcaaaaattcaaacttttttcattaatcaaattgaaatcctttatttttctctgcttttacatctanaatttatttactagctctttcaattaaatcatttatgactcaaaagcccaataaaaatgctacaaaaaatgccaaaacattagttcgttttagaatcatccaagctaatcatcagctcattgataaattcatatcgaaatatttaaaaaggaaagtaattttaacatgaatataaatgttgagtataaatattaactcaaaaaatctcgccataaaaagttataattttcaaattaaaatcacaaaaataattttaaaaaatattccacgaatatataaaataatttaaaaactaaatatccaaagtaattttaatttattcactatttaaataagagaaactataaatatattattgtctaatgtcagcagaaaattactaataaaggcaacaaataaaaacttcaatttataaatgaaaaataagaaagtaactaaatggtaaatatttatcgaaattaattgagataaaattaatatttaggtaccataagaattgtctaattatgtatttgtaagagtttggtccaattttatatttatttactcaaattaaatatacaaaattaaataatttaaaaacatatatgaaaggttttaataaaaaagatttcaaaaaattataacaatgaattgattgaagaacttatgaataatttaatgaaggaaaattgcgctcaaaaactttactttaatagaaatttaatttaaaaaagaattaaagaatatatagatagtttcgctggttcgacaaatattttcaaataataaataataaatacaaaatcaagaattatctatataatcatatttaatgcattatataaggctaaatattcaggacaagataacgaatataaaatataactctaattttcgagaattgatatgttcaatgaaggccaaagaatgattatcaacaaaattcatgaaaaaggtaaatgttgtaattattgattatatcgatattgcgtaatgttagctcaattctgatgacaagtcaataacaagatcattaatgaaaataatgtaggtaaatgtgacaatattaaattgtgtgaataaaataaaatatatttaataatatttaaatttaaataatatcaaaaaaattaatcaaaaagagggctttttgaattatgtaaaaaaacaatataaaaataaaaacaaaatggatgataaaaaacaaactctaacaaataaattatgtttaacgcaattatatattttaatttgtcatatttaattaaaaataaacaaaaatacaatggataaaaaatataaattagagaaaacaaagaaaagaaaaattaacaaaagagcagcaaattaaactaggtaagggcaatttgattaatataaaatttaattaatatttaactctcatttataaaactaaattcacctaaatttttaataatatcaaggaatacaataatgtaaaaagcatggaataataaaaaaaaggtgaaaacaatgttgttgtttttttgataaaacttaagctgaaatcttataaataattaatgctgcggcaggaaaatgactaaaatcttttaatttgaagaattgtttgaaaaattatttttattaatattataaaaatttactaaacaatataatacaaattattttttaagtaaacataactaaaggattcgatgtagaaaaaaaagaaggaaataaatagataataagaaataattaatattttattttatgaacttttcttacaattaaattaaaagaatgtatcaaaaacttttaaaatcataataaaaattaattaattaaaaacatttcgatcatttaattaaaataaaacaattatttttcttttataaattaatgtaatgagcgcattttaaccattataaagcaaagcgttgaatattggcgatgttgcttgggtaaagaaagcacaaggaaggacgtgaataaaatagatgcaaaaaaggaacctcgcaggtttttaaataaagtaaagataatatgaataagaaaattcatatttgtttaattaatactattattaaattataaaaatttatatgtgaatccgtgatgagacatttgcgccgcgccatttgcgccgctcagcaaagtcaacacttgctccgcgccatttgcgccgcccagcaaaaatggacttttgcgccgcgctgtcaaaactgaaaaaaagaattttctgtagaaaccccaattatttttttgcttcgaaaaaataatgaaattcaattcctttgtaattaattttctcactaagttattttcatcgattttaatttaatttcattgaaaaaacgcactgattttcaaattttcgctcctattttaccatttttcgcattatttcgcaatttttatgcccttatttatttagatatttttttcgcttaaaatccgccgcttaatgatcaggcaatacgaaggcttttatcgcatatggtcccaatgaaaaccaaaatgatcaagatttgataatcattacgtgcacttcaatatggaattgacatgaaaggcttcgaaaaaggaattaataatgaatatctatcaattcttattctataaagcacataaatttattttaatcagagcgcaaatgtcttttttgctgagcggcgcaagtgactatttctgggttagttaaacagtctaaaaacaaaaaataataattttttttaaattgagtaaccaaattatttgtataaaattttatgtaagtctaaaaaggaaaatgaaaaatatggaataatatattttctcggttcacagcaaaaatacttctcacacagccaagcccgtagccagaaaaaattttcgggggggggggggggagagaatctgaaagtggtgccgacatttggggatttgcaacttggggaccatacattttgggatcctgacttttggggattccaacatttgttaataaaataaaaaattacaaaaaatcgcgaaataggcatcaaataagcactaaaataggcaaaaaaaaatttttattaaagctttttaggtagaaaaacacgtaaaaattaatcaaaaaacttattttgcccatatttcaattgttttaagttgttttcgataaaaataattttttaaaccaaaaatttttaacaaagaaaaaatagttgaattttgaggatcaatttttgtgaaatttttttttcaattcttaagggtgtatttttcatttttattacatttttgttatggatttttccagaaaattctgaaaaaag

SEQ ID NO: 5114 - DNA, 4136 bp, Heterodera glycines
  unsure (1)..(4136): unsure at all n locations
aaaatttttttaagttggcatgaaagtgtagagggaaaacccaactgcgggcaaaattgtttatgtttagtacaataaaatggattttaacccttttgatagctcaaggaggagcttttttggcaatcggccattttttgactgttgtactgcttgaatttgttgttgttttaatttttcgattacgtaaatccattgctaaaaataattaaaaaataaatcaattgtattgatgcctgaaataaaagcccagacccaaaacgacgccacgcaaatgatcactggtcagagtgtggcttacaaaggaaggtctggaggtgtccgtggagtttcggaattgtttaaatcaagatttatctattaataaaaattttattttctttatttataaatatttgacacatttaaatgtaattgtcgaataattgactgatttaattaaaagataaaacaaaagaaaattcgtgattgcaaaaaaaaagtcaacttaaattaaacatgcatattcaaagaaaaacaataaaattattttaattttagttttttccgtgatgagacatttgcgccgcgccatttgcgccgcacagcaaaagtagacacttgcgacgctcagcaaagtcgacacttgcgccgcgccatttgcgccgcagacagttgcgccgcggatatttgcgccgctccatttgcgccgcgacatttgcgccgccctgcaaaaatggacttttgcgccgcgctgtcaaaaatattgtattcataaaaattccactattatcaataagttttactaaaactataagccattgacaaaaataactaattgaaaattcgaaaaaattcaattcctttgtaattaattttatcaataagttattttcatcgattttaatttaatttcattgaaaaaacgcactgattttcaaattttcgctcctattttaccatttttcgcattatttcgcaatttttatgcccttatttatttactatttttcgcttaaaatccgccgcttaatgatcatgcaatacgaaggcttgttatcgcatatggtcccaatgaaaaccaaaatgatcaagatatgatcaatcattatgtgcacttcaatatggaattgacatgaaaggcttcgaaaaaggaattaataatgaatatctatcaattcttattctataaagcacataaatttattttaatcagagcgcaaatgtcttttttcgctgtacggcgcaaatgtcgcggcgcaaatgtcgtttttgttaggcggcgcaaatggcgcggcgcaaatgtctgcggcgcaaaagtcggctaaccatgtgaatcaaacacaaaagatcattagtattttgctactgtaaatagaaaattgaacatgggtaaaaacaggtatcaagaaagaaaaaatattatttctgaatttctttaaaggttaagttcatcaatattatagttttaaaaattaaacgaatttttatataacacatagaatttaagaatattatttaatgtaaaaataaagattggcataaagtaatccttaatgctagatttgaacactcgttttactcctggaccaataacgaaaaccccgtgatttccgtgatccgtgattataaaaaattatctaaataatttttttatttaaatttattaccaaaaaaacgaaattaatcgctgggaaaatacccaaaagatattttaaagaaaccaaaacatataaaccgcttttttttggcgtgcctttttcaaaaaatttttcgaacacttggggcaggtgatgccaatgggcgccgaatttaattttaaattttaatttttaaactaagaatatcatttaatactttttctaattttttgtgtgaatgcactttgttgatttattgctgaaattaaaattggttctttccaattctgtagtacaaatgatagcaaatgtttttaataggcatattatttaaaatggcagattttattttgatatattaaaataatttattgtatttttataattttttatatatattttggtgaaataaagtatttgaaatttttacaataatgactaaataatttataaaatctgcatgacaatcgttatatatagatcataagatattattgatatttaataaaactttaattaaatcaatttattaaaatatatgtaataatttaatttaattttatattattgtttgtcggaatgtttatttttcttgttaactttcattacttttacaatcgattcccatatcactcatttaaaaacgaaaaagatagatggaatctcaggattattaataattataatagataattttgtgttttcttatcgttattaaaattttaaattatattttttcactaatataataattaatatatatataattcaattttaaattctaactgtaagttaagtgatgcttttgcattaagttgccagtattagtaattaattgtatcttcattattaaatttgcctgaattccttaaaggtttttaatattttaaagcagattattttccctattaacaagtaataatgcgtaagatattgaatgatatttaatagaaaatacttaaatttaaaattttcaactttatttttttaatgtttatttatattttctttggtttcataacatttttccacgaaactccaatcgtaataaagcattagctaatttcgttatcgatttaatagttgttttattatattatgattattaaacaatttttacatcaaatttttgaaatttaataagatttttaacgtttatggtcactattaactctaattttcaaacttttgaaatactgaataaatatttttattatatttcttttaaatgttttaaaaacggttgcgttcacagttaacggcacattgaaagaatgcatcaccattcttcaaaatttattaattctaaaaacagttttcagctgcttacacgttttgttattttttaaaataattattttgatattttcaatactccaatgggtctttctaatatcaaattgcattatactgggattaaatcttccataaaaattatgtacattttaaatttgtatcatttatcaatatttatatttttaatgttctaagttatattcttttaattttcaaaaattgtttaaagtttttaattattcaatttgtgcgagtataaacatatttcgacttataaacttatctgctgaataattattttttgctggttacatcaacacaaaaagtgtcatccatccatttagaaagattgtaaactccgtttacgtgccacacccaggcgaacatagctttgtttttaaaatcattaatttttattatttcttaattaatattctattgtcatttttcaaaaactgtttttaattaatcattgacaccataaaatttgatattgtttaaaaaaccaaattcgttatgttatattcattagtaaattgaatgaacaatgtttcaatatcctacttcaaaaattattaacaaaaaataattgcataaaatatgatatgttttacaaattttttaaaagcgaataaataaattaaaatttcaaaataataagattattgtttaatttttattgcttttattatttttaatgctttttaattgtaatcaaaataaacgcacgtttcttttgtcattcttttctaattttttttttatttgttataattgttttcctgttcgtattctatgcgttttatttttttgacttacatattttattaattattaagtgatttattctttcatataattattagaagcacatatattttggttcgtttttaaatttaaaaatcattttaagaaatatttccatttttagttctttattatcttatgctattcaatagaattcgttttaatttttaattggttagttttactctaattaaattgttatgcaaaatagctcttgcataaaatttttccactttgatatttcctgacaacagttattacactgtgatataaccatatattggttaaataatttatgtatcataataagactttatcctttttcattaatagagatcattaaattttttgatgtattaggttcgtgttatcgaaagcctagtcaantgttatcaataaaanntattttgcgaa

SEQ ID NO: 5115 - DNA, 5784 bp, Heterodera glycines
aaagaaatttcccaaggaaatttatttaaattttaaaatattatttgtttttcgcaaattttttttttttaaattaaccggatttgttaatacaataatcaatcaataaactaccgtttcttctccgccagcgctgtgcgcattgcggcaattgcggtgtgcagacgctccgccgtcgcactctctgccccaatgcgttctgtccaattggcgttgcgcattgaattcagcactgtttgaagattctgtaaaaaacgggaaaaatggataggacatacatatattgtatattgtacggtatgaaaaaaaaagagaaacggcttgaaaatttatgactttcctgctgttttttaattcgctaaatgaaaaaagagggaggagggagattggattgtctccagcattgccaattgaaaaaaaaatcatgcgattttccaaaaatatttatggtgaattactgtttttccaaaaaaaaaaaaaaaaaaatttccagggttttttttaatataaatttaggaatacaaaataaaaaaacaatttgccgaacattgtgctgcttccgcagttgaaccaattcgcgttcatccgagtccaacatggtcagctcaacgcgtaccaattcgcccttctgcgctgtcagcgcttttctataaaaacggtgtgaaaaatggcaaataaagaaaaaaattttttttttatagaaaatagaatttttaatttttttaaatattttttttttgatggaattgaaaaaaaaactcaacgctcgaagaaaacgatttttatcaaaaaacaacaacttattttttgaataaaaatcatgattttgccatgaactaatacgcccaattttacggttctatcaattttttgtcctccccaattgctaaattgccctcattcatttactcactcttgaatttcgaccaacgcctccaagtcgggacgggaaaaggtgcgcgcgtacagctcgtccagtgagaagttgggaatgttgaggaaagtgagtggtgggcacggcagccgttttttgccattgtttgaggacggaggtgcgcaaattgtggcaccaccggtgccggtgccacggcgaagggaattgcaccgttcggccatcacttcgttgtaatctgagcaacacaacgaacaaatattatttgaaaagccattagttacgggtgcacacacgtttcgccatcccccgtatctttctccgttcgacaaaattttcgaaaatgtttaagaaaaatgaaaaaaaatccagattttttttttgaaaaaaattctgagtttaaaccattacatagagcagatagatttatttacctatttactaataatgaaagcgagtctcccctccccttccgaaattaaaaaaaaaaatcaacgtaaagaaagaagaattttttaatttttttttgggaccctggccaaccgaattaggtacatatgactcgaatttaagtcccgcattatgatgcgtttgttcgttggtcacctggcggtggtggacggtgctgaacattgtggtggtgaaactgttgcggattgtgaggctgttgtttttggtggcaattgaagaattcgttcagcgcttaattggaaggacacaattataggggtgcactacgtttccctgcaacccccgcccctgccgaaaatttaaaaaaaaatatttttttcaacttcgaaattaaaaaaatatatatttcaattacgaaatatttcaagaaaaaattgaaacgttgaaatttttttaatgttttttatccttgaaaaaaatttccaaagtgcgagcctctgcccaattacagaattatgattttgaattaatttggtatgccgatgaaaattttaggaattctcaaaaaaaaaagtggttgttttagaaataaccaaagatccatgtccttagcgaaactctaacggttttgaaaaaaaaatttttttgtttgtttgaaatttttccaccgggccacccttccaaaaaatttttttgtccaattacttgttgtggatgaattgacggacgggtttgatgtggccagctccacgtcaccctcatattcgagtgacggagccctctcttcccggactccatcaagtcggagcagttcaaacgctacattagcggtcccatgctataaaaatcagagaattttgctggaaaattccaaaatattaagagaaaaaggagttataaatcggatattttagacaaatttctaattttatgtcaaaaaattttcaattccggtgtttttcgaaattttcgcccgcaaaaaaggaaaatttttcgagtgattacccaccattttttgcacaaattcatagggccgctcgtcgggcatgaagcgatgctcacgatcctggacagaaaaaagtggcaattattttattttaaaatgtttttagcacttaaatttacccatagaaataaaaacacagcccttccccgtaaattagagccacccccctccaaataatgcctaccttctgaaggggggggggagggggttgaaaaataattcccactttggggctctattttagggaaaacggtatgtaaaatcatattccggcctgattctcaaaattcctggctatacaaaataccccctgtaggctatgtcaaaaagagggatgagtcatcaatccaatcaatgaattgccaaaaaaaaacaattttttttttacaagcgaagtgccatcgctgtccgttgtcctggccaccaacgcgaagctgcctttttgtcgaatggcatgggcaagagcaaaaacaatttggcaacagctgaaaagcgagtttacacaaacaaagatgagggtacacagaatgggggggggagcaaatatttgccaattaaaaattgattacgtcgtgttttcggtgacaccggaaacgcattggacactgccgcccggcgtatgcacaattaaatccattaattttggccctttttttggaaaagaagggcaaggaaaagaaaattgccgcaagaaagacgcttatatttttgaatttagttcaaaacaaaacgccaaatcgtaaggtaaaatgtcaaaatggcaccaatttgaaataaaatgcaatgagaaaacttttttctgtggtttttgtcttgaaaatccagtgttaaggttggatatgtaggtatacataaaagaaaatcatatctagctggaagcgaggtccaggcttttcccaaaatattgaactctaagatttaaacgcatatttttctgtccaaattggatgccaaaaacacggagagcaatttaatgattttaattttaccatgatttaagattttgtagttcttgttgtttattttcttggtaatatggctgttggaaagcaggtaaaattgttgtaaattgattctgtttacacatttaaaatggacatattttgcagaaaaaatccgcggagaatatcaatgccaggttgggcatggtaaccaagtcgggcaaatactgcctgggctacaaacaatcgctgaaaacgcttcgttcgggcaaggcaaagctggtgatcatctccagcaacacgccatctctcaggttttgattgccaatgccatgtggttggaattcgtaaactggtttccatttttgttaattttgcatcgcgaggaacatggcaccaaataaaaaatggcactctttgaatttaattaaaaactaacagggagaatgaccatgttggtttttaaatttctttttttgtggtaaaagtgaaaactcggaaaagtagtcaaaaactcaattttttctaattccgacctttttttttactttttttttacctttaagcacttaagatcaccaatatttttccaaattcgggccgggctaagagtttcgaattggccgaatcaaagcaatatcccaataatgagcgatgactttctcttaaacgcttgcaattcttcacagacaccacttttagaaatgaaaaattagcgtaattcttaccatgccccaactatacgggttttttacggacccgtaacccgatacgagttttacgtaatacggattttttaacccgaaacccttacccgttatccgaatacattcaaaaagatactacaaaattggaaaagtgccgaaattctccaaatttatttagtccatcccccgaaaaaattgctattttgatgagtttcgccccttcccatttagacgcagtgaaattgagtactacgcgatgttgtcaaagacgggcgtgcacgagtaccatggcaacaacatcgagctgggcaccgcgtgtggcaaactgttccgcgtttccatgctgtccatcactgacccgggcgactctgacatcattcgcagtatgccgacggaggcatgagcaatcaaatgaaatgaacggatggacgtgatcagtgatcattcattcattgatcggatcatttgtcatcctttttttcaaatattttgttgttgtttcacccggaagtgtttcatgttttcggtgaaacgaaagacattctcgttgttaagaggcggttggtttttcaacacatgtgttttgtttcttttcaattctctgatttcattgactctgtttagagcatggaattttttaaaagttaggggatcagtggattcgggattgaaatcccggtgttgctgggatttgaattcagccccgtgttgaaatcatgattttttcgggatcccggcactttttaaaaaaaaaaaaaaactggtctggttatattgacctcgtcctggctcgctctaactgtttttatgcgagactaatgggtgacgaatttaacgcttgaatgtaaatagataattgcattaatattttttcattcgataggtcggccgaacgcattttaaattacctaattagagaaaaccaattaatttcattccgagatttacaggatttggtacataaataaattttaaaaaataaaatttgcttgcccatacattttttatttcactatttttacaataaagcacttttatgggtgggttatacatatatcagggatacgtgcggatgccctcaaaaaatttcggaaatcggaattccgacacatccctggtataatgtaataatcatcggtgatcagatcaggaaactccgttcattgatgatcagcgtttcgccctgtgaacaggctcggccccggctcctcgacctttcatccatcagttcagcattggcattgttgtccttcaaacaacaatttttcatttatcccaatgaacagaaaattttaaaaagagaaaaaataaaatgttttaataattttcgtgtttttccaattttttgaaaatttgggtgggatcccttggaggtgtaccaataaggaaaattgaaaatttttagcacaaatccatgggtttttggggtcactgatcacgaatccggtatccatttcgataaattccgaaccccggccccgaattcgaacaaagagtcgaaaattcaaaatttccgaatttcagatttttggcacgaatccggtatccatttcgataaattccgaaccccggccccgaattcgaacaaagagtcgaaaattcaaaatttccgaatttcagattacattcaaaaagatactacaaaattggaaaagtgccgaaattctccaaatttatttagtccatcccccgaaaaaattgctattttgatgagtttcgccccttcccatttagacgcagtgaaattgagtactatgcgatgttgtcaaagacgggcgtgcacgagtaccatggcaacaacatcgagctgggcaccgcgtgggcaaa

SEQ ID NO: 5116 - DNA, 1806 bp, Heterodera glycines
tttgaaaacaaataaaaattttgaaaaaggggggggggggataaactttactattaccgggttaccccccattcacggcaccaatctcttaccgattgatgacggccattgttgtccgccaccattgtgccataatttggcgattttcgtccaccacccttttcaaacagttcagcaaaaacaaatttgccaatcacttttggccttttctcctccccctcctcctcaattgtgccattttgatgaacacttttgctgctgcttcggcttctgcttttcccctccaaaataggccaaaatgttgcgcatctttcgcaacctccgccggcataaaaattggcgccgatttttccgtcatccgattgagtgcatttgtccaatttgcacatattattgttggccttgatattgttgctgatcatcattggcccaattttggctctctgatcagtttcattattttcgtcataaaataattcatcctctttgtcagtgatttgatcaattggaccgtaaatgatgcgatcaaaattgaaggcagcaccatctgctgaatggaggaggggtgataaatgattgagtgatcagagtcacgaatggcacaatagaaagtgctctatcaatgcttaattcaaaaattggtcaatgaaaattacaagattgatcagtgtgttggtggtaagagtgattgatcactgctaaaggaatttgattaatgctaattgtcagttcttctcaaaaaatgatcaattctaatggaaaacttgcttgatcattgcttattccaaaattgatcaatataaataagaagattgatcaatgtgctaatgtcaagaatgatcatctaatataaaaaaaagatcattgctaatgtctagagttgagaatactaataaaattttcttgggaaaacaatgccggcacttttttggctgctgctggtcgacgacttggagcaggatgaggaagagccgtagaaggcacacaaaggcggcggcgctggtggtgtcagtaaagggcacgacaaaatgttgcgttttggaagcagtccagccgaagatggcaacaaaaagtgatcagaagtggctgatgcgcaggaaaagcgtgccgtcggcaatggccaaatcactttggacggttcagcgggtgccgttgtgccggtgatcagcagagaggggcgtcccttggcggtggcaccgccgccgccgatcggcaaaaggttggagaagacgagctatggaaaatgtcgatttttgataatggattgattagaattatatataaaaaacggaacggatgttagtccctgactgatctgacaggaaatgaaaagccttaagtacccaaaggacattagagattaaattaaattgatcggtttcggggatagttctaaattccgtagatattttggccgaattgagtttttaattaattaaagcatttcattaaatgttttgaataatttttaataaaaacttatactgtatcatttaaaaagttggttttattttctatacatccttaggtataaattgctatatattttgacgcactttaaagtttttcaaatggagaaattaaaaaaaaatgtaggccccgaagattttttggtcctcctaaattccgtgtcccggacttttttttttgagccttcaggcaccatctcttttctgttaaatcagtaaatattgattgtccagatcgatcgtgccggctccctaattgagatcactgatcaaaccgatcagatttagggcccaagaattataattgctgattgaacagacacagtctaactgcagt

SEQ ID NO: 5117 - DNA, 1051 bp, Heterodera glycines
ctattaccttagttttgtttgcattttcttcttaaaagtacgtacttaagtagttactgtccataactacttatctaactactagaggtgtgccgttacttaaaaaacccttgaatcgtgatcgtgaaatgtccagttaatcttgaccgtgaatcaaaaagcccgagaaattcacggttttggtgaccgtgaatttttgagtttaatttttctctggcgtcgacccttttttttgcttaatacaccgtcttttaataatttttgacaatatgaaatggaaaatgtgactggcccttggggcccagatggcggggcccagttaatccggggcccagtcgacccccaccgctcattaatagtctttagaggtcgaatgaattactaaatttttccaaaaaaaaacgctgaaaatttttcaaatgctaaagttccttttccatcataccattccgcctttaattctcatttttcgttcacatttttagaaactgaaggcgatttttcatggcccgattatttgcggcagtgccaagcgattccggcgcccaatgcgctttttgtaagcatattttttaaatttacacttacgctttgaatttctttcatctttttcattgccaggacccacttccttcggcggcaaaacttcagtattttaaggtacactttttcatagtaaaataaatggggtattttgccaaatttgtctgtattttaacattttttgctatactgaattttcaggtcggtgccaaattggaggccaccgaccaatgcgagcccaacttggtctgtccggccaccatttgtgcgatccgcggtcgtctgctgcaagtgcactttgacggatgggagagcgaaatggaccagctgttcgactacaggtggccgggggaacggatgatggggacacgaaaaaattcggaaattttttaggtctcgtgaactgttcccgattggctggtgtgagatgtacgggtacaagcgagttgtgctgtatttaacaaatctatgtttttcctggctacattttcaccttactctctcccat

SEQ ID NO: 5118 - DNA, 4130 bp, Heterodera glycines
aaagatgagaccatcggcgagtgatgatttacggaataaaacaaaattaaattatgcctcattttgccttcgccatggaaaaagaacttttgctggtattttattccgtccaatactttcccatttttcactccttttggcatttttcattgtttgctgtattccgatgcttaaattatgtcatttttgttttacaaattattctttttacttttattcgcagaaattagaagaattccacttcctatgattcttaacccttgatttttgttgtcattttccattaaatgcgctccttttggtaggaattcgaatggcgtcgaactgtccattaattttggcacttgatgttggcacgacgaatttgaaggtgggtggaattcaaatttatccactttccgtttaaccatgggttcgaaatttctgcaaaaatgcggcgattgtaaattttgtccagcgaggccattttaaaatgtcataattttgccaatttgggaccggaaaaggaaaattaattgaccgatggattattacgttgcaaaatcgcctccttttttgcgtagtaaagtgctgtttactgtttagctgtgcgttttcgacgtctccccctccgcgggctgtgcactgatccatggccacgaggagagcatcaaattgttgtgctcgtcggacagcgacaaccgaatggagatggagccggaacagctgtggacacaaattgtggacgcaatacgaagggcaggtagcagcgccagagagcaaacggatttgtagccgttttcaccaaaaagaacgcatttcccttttttttttgattttagtcgctgaaacgaagtcgagaggatctttggtcggcattgggctgagctgtcagcggaacacattcctttcgtggaacaagtaaaaacagaaactgaaaacaatagattttaaagaaagaccaacttggttaattactctttttgattaggcaacttttccgtccgtgccatcggcttgtcacgtggaaggacgggcgctccaggcatttctgcaaccaatggaacgagtcgatgcgaagaaaagtgagaaaacttgcctaaattaaaaaaaatatgctttggttgttgcggcaaagagactattatttcgaaatgccaacgccacccatgcccacttttggcactttcagctgctcaacttggctggcgccgtcgccttctttttcacgcgtgcccaacgctttcgtgcggcgcggatgtttttgctggacacagcgatggtgccgccccgcttcatggccatgcttgaacaggtgccaatgccattgccaatcgtcgactaatttttttctgaaaaagatatttcggtcttttgattacaattaaaacaatttaactgaaaaaatgtttatctctctctatccattatttatatcgcatttaaaccatttaattatcctctctttcttcagaaaacttaaaaatacttccgatttttttctgaaactttttaaaattacatttaatatttcaattgacccataaaacacctttaactctcaaatttaagaatgccgaaatgcgtcgtctattggaagccgaccagcttgcgcttggttgtctggacacatggcttatgatgaagctcagcggctgtgatgatcaaagctttgtcaccgaaccttccagtgcttcttccaccggaatgttcgacccgttcacggtgattgctcattcattttcccagtgtagttaatcattgtccatgcatttaactctaattatacattaattgattttgttctgcattaattaggccgagtggggccgtcccattttgcgtctgctcggcttccccgacccgggcgcggtgctcccgtcgctggtcgacacgacgcggctcggcgtgcacacggcgcccgagctgttcggccgcgcaattccaatttttgcatcggtaaaaaacgacggatatttttttaaattaattttattagtcctatcccacagtcaaaaacaataaaattgaattaattagtgtacaatatttttttttagctcggcgattcccaagcggccgcgttcggtgccggatgcattcgccgcgggacctgaaaatctcactgggcaccggcactctgttcgactacgtgagcgggcccgaaattcacagttcaatgcatggtcggtcgggaattggtattgaagaatgttgttgttttactcttcgaaatgggaaaaaaatttttgaggcgtcccagatttaggacaataaattttactaattgtggcgactgtcagtgtacgatccaagtgctatcgggtgaatggcattttttaattctaaataaatttttttagaaatcttcaccaatttccacaaaatacagcgataatttgccaattggcattcccccgcactttacgttgatcgattataaatgaatttcacttaaaaattaaaatattttttatctaacctctaaaaaaatttttccaggaatatatcctttggtggcatggcgtttaaatggcatttccactcatttacttgaggtggatcgaaattgcatttcctttttaattttataatttcaattttccacaattctcaaagggccgttccaatgacgtggcgtccgcagtccgttgggcccaatccgtgggattgattgcacaaaatttggaggcattgcagtccgacgacgagccggagtttgacaatgccgacggagacgaaggtggacatgacgacagtgccgtttgttttgtgcccgcttttggcggcatccaaacgcccatcggtgacgattttgcgtgtgccgcactgatggggtgagtggcaccacgtagggcaccacaatgagcgcattttttgtcaggattcgttccgataccacgcggcgtcagattgcacgtgccgtgttcgactcggtcgcctttggcgtctaccaaatttggcagtgccttgtcgaggaagtgccggaggcccgcgccggcgtgtgccgaattcggtgcgcatttgcgggagggagggacaaacgacttgggggaggggaatccaaatcggtgcagaatgaaatctctaactaaaacgccgcgggaaaaaatgccaaacattttccaattagcttacttttagcatttcccattgcttctaacgctgtctgtctgttttcgtttttttgcttccatttttcaattttctcctctcttttagcctctgcggcggtgtgtcgcgcaattcgcgcatttgcgaacacatcgccacgctcattcgtcgtccggtggagcgcgtgtgtgagccccagttttgctctgcgcgtggtgccgcactgttggccggcatcggcgccggtgcgtttcccttgaagattcagtctccatttgactaatgcgttgcgcaccctctgccatttttgacgatttcccaaaattcccatgaaatattttcgagtcggaattctcgacagtcgccaatgtgtccatctcccattttcaaggactgtggacacttgaccaagtggacagcaccgtcggcaacggtagtggcggtggcaaaagtttggtcggcgttaagcgcgtgttcgctccgcggaagggcgctgccgcttcggcacttcgccgtcgattcaaccggtggagggatgcgcagcggcggtgtcttcattattatgaacggaaatgatggaaaggacgacgaaatgccaatggaatttttatgatatttttgattttatatgtaggccattcattttcatcactcaatcaatcttttgcctttcatcaatcattcgaaaatcttgccttaattgttttgtgatatttctgtttcaatttataaattctcaattagaattagatcaaagaaaacttttccatattaaaactttgatatgacgggggactgggtaaatcgtacgctttactggtcccacaaaaaaaaaggtgaaaagaggaatttcagcttttaagtagtgcacccgggggttttcagggggcgctgatcacgaatataacatccatttcgaatcccgaacccgaattctaacaaaagccgaaaattaatttttcaccaaaattcacatgtattttccaaaatcgattcaaatgcaccaaatgaccatgaatccttattttctattatat

SEQ ID NO: 5119 - DNA, 1633 bp, Heterodera glycines
ttttaacccctttaaaaattaacccattttgcatatcaaaaagaaattttttggaatatgaaaaaaaaagtatttgaattttccctggatcaggaaggaaattcgctctatatgagaaaaataggcgattaaaccataaagcattgaataactcttcagcaaatgcttggatctgctccgaacaaaagagcacagatgttttttaaggattctctatcgattggtgaaaagtatttttttaaaggtctgaatgaaaaaaagtttcttcagaaattttttgaaaatttttgtccaaaatttttgcacgcctcactaaaaccatcataactattcttaaaatggacggaattgaaaaaagaagggtcgatacatgtacctgagagtgttttctttccaaccgtgtataaatgtttagggttagggtttgggaaataccctaaaaagggatctaattgacaattggttttctgcctttttcagccctgcttttcagaatccggctcagggggatacgcagggaatcagggtgggttttgagtgggatagtaaaatctggcacgttaggaaatattgtttatatatgtagagatcacctacgtgcaaattagcatggggtagaatgccggactcaagattggatcttggcatttttttaaaagcctgaatttaagctaattaaattttttgcgaaatcggtaaaaatggcacatttgggatgctgggctatatatataaagaccacctacgtgcgaatgggcatgatttataatgccaaactcaagatctgtactttgcatttaacactgaatttaaccaacttcttatacaactttcagtacaactttctacacaactttcaaaaaactttcaaccaatttctcaactttataaacaactttcagtcaactttgcatacaactttcagcacaacttttaaaatttaacaaaagcggccgagcgagtaccttaaggttatttatcctattatatgacaaatctgtgtcatgctggccccggtgttgaaagcggccccggcgctttcacagggccccttgtggccctggttcaaaagttggataatatcggaattaagggaaaactgcttaattggttatctgagtttttaaaggaaagaacttatacggtaaaaattaataacaaatattcaaaatcttatccgattaagtctggtgttccacagggatcagttttaggcccactgttgtttctaatctatataaatgatcttccgaaggttattccttcggaaataaaagttaagctttttgcagatgatgtgaaactatatgtttcatacaaaaaaagaaatgagcgcattaagctaaacacagctttacaaaacattgaatattggaccagtttaaatggtttaaaaatctcacccgataaaacatttattatatttttcggcaaaaacaactctaaacaacaatacaaattatgcaacaaattatcaatgatgttgaatcgattaatgatttgggtattttaattgataataagctaaagttttctgatcactatctcaaaattacggtactcatggagtttgtatccccctttttttgggtcgaattttttcaaatttttttttttcttttttattgtcgca

SEQ ID NO: 5120 - DNA, 1926 bp, Heterodera glycines
ggagggggccgaaggccccctacgaggccgcgaagcggccgagcgagtaccttaagcgcggggaaaagccaatggccccggctggccccggtgttgaaagcggccccggcgctttcacagggccccttggggccctggttccctatataagaataatataccccagtttcaagcttaaaaactaatttaagactttctaccgagtgttacgggtcgggaatggtatcattcgatagggttttggactggctataaggaaaaactatcggcatcccaatcggttaagaattgttcgaactgtgttcgaaaaacgagtcaaaatttgcactttttttgggtgtcccatttttgaacgctttttgcatacctaaaaagggtcaaatcaaaaatcgaaacaatttcgcatgatctacaaactcttggctttcgaatgataccagggttgtttgggtccgggtccgggaagtgccctaaaaagggatttcaagcacttttggtcgggattttttccaaaaaagaaggaaaaggaaaagggaattaaaagggatggagacaagcgacccagtggttaagtggttagtgtacctgcctttggtcacgaggtgttgtgggttcgagtcccattaatttattggattttcccgtcaaatattatatttaaattatttggtttaaaatttgtttttaatatttttcttataaaaaatttatgagtgagttaaaagagaaagaaaggcataataaaaaatatggagcaaagcacttttggataaaaaatgatttcattcctttttttatatgtaatgcacactcgccagtggtctttaacctcgccttttcaataagcaaaaaatgtctcctccttttctttccccagttcattatcaattgtttccgtttacattttcagttttttactgctcctacttttattcaataaatatttccaactaaattattgctgttttaatagcataaatttttagtttttgcctttggtggtggtggtcgacggctcgggtcccacctattctgggtgttttcatccataattttattaaattttttgaatgattttatttttttaaattaattaagtttattaaaaataatttattttaaatattaaaaataataattctttctttctaatttagcccaaaaatctattgtttgaccttttttgtgcaaaatcatttaaaaaatggagacaaattaataagttacctaaacataaaattattgggcaaaactgggtccggatatttccgggtccagcaaagccgggtccgggtccaagtttttaaaccgggtacgggaggaacagaaagtggaagaggaacagaaagtggaagagaaagtggaagaggaacagaaagtggaagagaaagtggaagaggaacagaaagtggaagaggaacagaaagtggatgaggaacagaaagtggaagagaaagtgtaagaggaagtggaagagaaagtggaagaggaacagaaagaggaagagaagaagaggaacagaaagtggaagagaaagtggaagaggaacagaaagtggaagaggagcagaaagtggaagaggaacagaaagtggaagaggaacagaaagcggaagagaaagtggaagaggaacataaagcggaagagaagaagaggaacagaaagtggaagagaaacagaaagtggaagagaaacagaaagtggaagaggaacagaaagcggaagagaaagtggaagaggaaaagaaaatggaagagaaagtgtaagaggaacagatagcggaagagaaagtggaagaggaacagaaaatggaagagaaagtgtaagaggaccagaaagtggaagagaaagtgtaagaggaacagaaagtgggagaggaacagaaagtgtaagagaacagaaagtggaagaggaacagaaagcgga

SEQ ID NO: 5121 - DNA, 1303 bp, Heterodera glycines
atttttgggtatgttagccttagcgctgtttggcccctttccgtcatcagaggtcggacggaggatgacgatagataaaatgtgaatgggaaaaatgcatttatttgtccactgttgtgagacgacgccggcggggagaaagggcgaagaattaaagaaaagcaaaaacggagacagatcgatttggcttggattttccatcggaaaattcaaaattttttcagcaaaaaatgtctgtaaaatgaaaaaaattttgtttaaaattttaatattacataccaagacataattcattgttgagtttttaagaaataatgataatagatttttttttagaattttagacaccaaaagaataaaaactccctcccatttacacacattttgtttcacaaaaaaattaatttttcattgttttatatataaaaaaaaacagttggtgtctaacaaataaaatgctaattagaattaatcaaattagtgtcaaaataatttttaacccaaattgaagtaggaagcattaattattttgtgacgaattttaagcaattttttttttttaacttaatgtgaaccaagaaataatttcaggtattttcatgggcaccaggcgatgctgccgagaaattttttgaaaaaatattactgaattcacagtaattaatagaagagagtttcacaaaattttttgctaaaaagtttccaatttttcattttttttttacactaaaataaataagtacaaaaaatgaaacgaattaaatttaattaattaatcaaaataattacaacataaatatttatttttcaattaacgcaaaatcagtgttaaaatgttgtgcattgattattattttggtattggtcactcattcattcattaatcgttggactttagtcgggcggtggttgagcgacttgacgacgttttgtgtgggcaaacaaaacatgacccgacagcagcacaacacaacgggcaaataatatatgagaaggaacaaaatggtggtggaaaatgtgcaaataaaccaaataataaggttattatttagaatggattatgacataaaataatttgaaaataatgcaaaattcccccaattttaaatgaattaattattcataaaattcattgaaatgacaaaattggagttgcgtcttaaagtagtattaaaaagatacaaaaattaattttgaattatttggaggggattattggctaaaataattcgaaaataatcaaaattcatccaattttaaatgaattatttgtgtaaatttcattgaaatccaaaattggagc

SEQ ID NO: 5122 - DNA, 4936 bp, Heterodera glycines
caaaatattacattttaatttttaaatttctacctcaattcgactttggttgtttatgcgaaaatcaaatcaaaataagcattttctatggaaaatctattactaaatgtgccaaaatttcttaatcttcgaccgacgaaaagtgcaaaaatcaaacacttgctttatgtaattgatttttaatctaattaatagatattaaagccaagaaatatttagagcaatcaaaaagttaattagtaaatttttttgctaatttttaaatggaacaaaaataagaaaatattttatggaattgatttttcatgaaactttaactgaaaacatttatttatttattattgacaatgggcaaattgtatcgacattttttgtagcgtttttttggatttttaatatttcatttaattaaagagtataatttataaaataaaacattagtaatatataaataattaagtagaagtgtgaagaaaatcattataaaaaaacaagtagaattttctgatgtgagtgaagccaagtaataaataataatcagcataaatatgggaataaaaatgaatccgtaaaagtatttgtattagattttaatggttttattcagaaatataaaaattaatatattattttcaattttaattttcataaatgcaatttttaatatttattctggaaagataaacgaagaaaaaagttttgatgaaatatttgtccaaaaataggacgaaaaattggaggcaaacggagagaatgaaactgatcaaaatgcaataattggacaaacggatggccaaaatgaggcaaattatggtgaaaatatttcaaaattaattaattaaaaataaatttaaaaaaagttaattaattaaaaatattataaaaatatagcaaaataaatgccataaattctttttgtttttttattattggaaagtaaataattaaaataatacatacaaattaatagaaataatgaaaaaaaggaaaacattttttaaaaaacaattattcaccgaaattaaatttttcaaaattttgtaaatgatcaataatcaaacacttaaaaaatgatataatgaacaaaaaataattttaaaaaaatttgaaaaccgataaaagttattttttttcatttaaataaattaaataaaaaataggaaaaaaaccgtaaacgaaaataataagatgattctcttaattaatttatttttaaatcctgttttaatagtaattttttaataaaaaaaaatttattcacttaatgccaattttttgtccaaaattgagagcggaatgccaatttcaaggccaagacggttttgcattgacgacaatccgtcatgcttttgacgacaaaaaattccgtcgccataattagcctaaaataaattaccaaaatatttcattttaatttttaaattgctacctcaattcgactttggttgacaaatgctcgtccatccaatgtgctctcaataacaattccatggccacgattatgtgaaattgttgagttggcaattaaaacgggaccctaaaaattcgaaaattataaaaaaaaaattagattatttatgctttttttgaaaaatagaatttttaattcaaaattttcttaaaatgacacctttcaaaataattaaaaaaatataatataatttcatttaatcaaaatgagtataatttataaaaaataaaacattaataagtagaatttcgaaaaaatgtaaacattattttaaaaaataagtagatttgctgagtaaagctatgcaataaatcagcataaatatgggaataaaaatgaattcgtaaaagtatttctaatcattttaatgggtttattaagaaatatgaaaattaaaataatattattttcattattaattttcaaaaatgctgataatatttatgctggaaagataaacgatgaaaaaagttttgatgaaatttttggccaaagatgggacgaaaaatcggaggaaaatggagagaaagaaactgatcaacatggaataattggacaaatggatgatcaaaatgagacaaaaaatgatgaaattaatgctcaattattacatgagacacaatttgatcaattatttgatgaaaatttgcaagtgaaacaagaaagtgcaacaaattgtgatcaattggaacaattgccaataaattttggacaaaattgtgaacagttttcaaatgcaattgacaaaaagaaaagagaaattgtggaaaaattttaaaaacaaagaaaaaattaagcaaatggggaaaaaatactcagaaaaagaaatggctaaaattgaaagaaaaattgcccaaaaattgggtgccagccaaagtaaaatttacaaatggaaaagacaatttggaatgaatatcataaacagatattcggatgagggatcaattatatgataaaataacaattaaattaaaagaaaaattgaagggaaaaagagaaaaatgtaaaaaaaataatagcaaaacatttgggcataaatatcagcagcatttataaatggaagaaacaattaaaaaatggaatataaaaaatgatgatgaaaaaagagaaattgtggaaaaatatattacaatataaaataaaaaaaatgaatttatgaaaatgggaaacatcagaaaaaaggaatgggaaaatttttatgcaaaattaaacaaatattgaaagattggcaaagaaaaaagaacattgatgaatttgaaaattgctttttatgtaattagtgtagataataaatggtagaaaaaaaatttacaaatttaaaactttgcataaattttagattttttaagaatttattcttttcataattaattatttaatttttcaattgataaatttattaatttaaaaaagaacgaacaaattttcttacttaaaagtgtgttaatgctctcaacaaaaccattccaaacatatttttcatgaactttacgatatgcccacaatgtttgaatgtaattttgtgcctgaaaattaaaaaaatattgtggaatattgaacgaatttaaaaattaaaatttcaaaattattttaaaattaaatatgatttattattaaaataagttaaagttacctgataaacaatcgctgtgataataatggaaaatattgaccaatgaaaaacaacccgattctgataggccgcaaaaaaatttgtctgaaaacgcaaataatttttttttttttcattttttgaaaatttttttattttaataaatgaatgattatgtgatttgataaattaaaattcatttttcagaaaatttcaatttttaccttaatttttgcccaatgggatggcttttgttgatcacttttcggccgatcaatttccaactgatcagataccttgttggcattcatttgatcaattaatactactgttctatcaatgccatccgatttgggctgatcagcatttttgtttgggtcgctctccaataaaacttgaaaaaaataatagcgatgtgtggaaaacaaaaatattaaaaaatattgcaaaatattgaataaaaaagcaaccaaactttgaatgattgatatcattcaataacagacgaacgcagcccttcttttgtgttgaaagttttcaaaaatttcgtaaatttttttactaaaaatgtttgaaaaacatggtggttttttggtgttgttctttccataacatttcttttgaatattaatggtatttttttgaaggttaattaataaagaacacttagggctatcaataaaattcaggttactagaattataaattactttttttgctggctgaacccagaaaaacccaggcctggaaaattacctgcattttgctgttgttctgccggtgactttttgtcaatttgttctttttcttttttgggcatcggcaacacaattacgatgggaatgagcaacgatgaaacaatcaaagtaatctgattatacaaaacatttaaataaaatgattaattattttttaatgaattaaaaaagggtaaaaataaaataaaaattgaaatttttattctcaaaataatattaaaacatgttattgttgcaattaaaaaaattcgaaaaaaatagtttaataagtatttaattaatattaattttaactggaggaggataatttagctttggaaaacttgtcataaacatcccaatagctttggtcattttaaattgtaaaaaggcaaatcaacattttaactttaaaaatatttttttattaaatataaacatacggtttcccattctaattatcaaagctatttttaaaaaataatttttttagcgggaaaaaaatcggggagagggataaagcaagagagtttgcttaacatccagtacacatacaatggcgatttgcctttctctacttttaaaaaagcggccgatatttttttaaggaatttgcattaaaacaaaaataatttgtgtttttttttaaatttaagtattaaaaatatcaataacccacctcattaagcaataaaaaatcgccaatttttgtggtgatcaaaatttggcctgaagagtaggccagaaatttgccaaccatagaagccgtccgaaagtatgacgtcactttcttgtaatgccttttgtctacaatggcatacaaatatgtgttatatgcaacactggccgcagttgaaattccttaatttgtttattataaaatcatttatttattattgaactttaataagaaaataaaattataaagtgaattttcttgttttttgattattttttattgaatatttttaagaaaatttaaataataaaagattaatttgttttttttaaattattttaagaaaaaaaaaattaaataatacaataataatactaacaaaactatatttatcaaaaataataattgaactttttatattgaataagaaattttaa

SEQ ID NO: 5123 - DNA, 1919 bp, Heterodera glycines
ttagaaaactcaaacaacgtttaaaataaattttcttactgagtatttaatttaaaattcccagacatatgaattcttgaattaaacacaatgtcattttttcaaaaaattgttgcgattttagggggtcgttaaaaggatggatcaatataaatttttgctgatcgaagaagatgataagcagtaggagcaaatagtagttcaaaaaccaaataataaatggaatcgaaagattgttttttaaaatatattaaattttataatatatttagaattttattgcaggattttattattttacaagatatataatttaggtagatggtacgagtgcgcttcctaaatttctaaaaaaaaaaaatcggaaaaggcaatattttcagacatttcaaatccgactgagcactcgctgttttttccataataatgacaattttctttcccctaaataaaataaattaaaatttgtttatttatttttgaaattttgaggtaatgtctgtcagattgggtctttcaatttttggattatgacaaaaaaactaagaaaataagtacgaaaataacagaaattgctttaaaactgcatcgaaaaacaaaatgtttcgctatataaaatttaagataatttaattttaaaattattttatataaaaaacatttcaccttttgaaatattttgattgatgtcaaatttcttggcccataattcaattgtcttataactcaaaccaaatatttgttttatttttatataaaattctttccattctttccgtgaatgtttcccaatttgcataaattcattttttaatttaaaatatttttcaataatttccttttttttatcatcagtttttttatttttcatagtttttccattttttaattgtttcttccatttattcatacttctgatatgtgtgcccaaatgttttgctaatattttttggcattttgtactttttttatacaatttttcatttaatttcgtttttaatttgccatatatttgatcaaattgctttaatatttggcgtttttcatcttccgaatttttatggatcatcattccaaattctcttttccatttgtaaattttcttttgatttatacccaatttttttgcaatttttctttcaattttcaccctttctttctttgaatatttctttcccatttgcttaattttctcttttattttatggaatttttcaacaatttctctcttttgtttatcatttaaaattggaatttgatcataaatttgtccactattttctgtcatttgttccaattgatcacaatttgtggacatttcttcactttcctcttctttcatttccaaattttcatcaaaaatttgattagattcttctacaaataatctttgcacaaaattttcaatatttgttggtccattttgatcattcatttgtccatttattccattttcatcagtttctttctcttcatttttctcctctttttcgtcccatctttggccaaatatttcgtcaaagtttttttcttcttttattccaccagcataaattgtatttaaatttttgagcattaataaaaataataaaactattttaaactccatttttcataaaataaaaatgattagaaattcattttattaattgcttttattctcattgattttatgaaaattcatttttcctcctcatattaattttaaatattgatgaaatatgttatgcatatttttttttgcatattattattattaatattttatctaaataaaatttaaaatttattaatgataattatatttttacaaaatttaaattttgatttttgccaaattttcattttacttttctttttaaattgccattctttaagtgaacattttttccccaatgaattaaaaaaatttctatttt

SEQ ID NO: 5124 - DNA, 2453 bp, Heterodera glycines
taaaatttgaaaattccaaaagtcaattaaatatgttggaaacgcttgaattttatttgggtattttttcattttgttaaataacaaagaaattccttttagaaacataattttctttcttttaatttttttaattttatattcttatatttatttccctgttttgttgttatttataatttttgaaatgttacttcatttttattaaaaaattaaatttattattgcaattatttttaatttgtgcccctcgaatcgctggcaccgcggtggcccgcacatttatcatttaattttcatgaatatgatgctaatgttttccttcataaccattgtatgtcataaacattaaaagacaatttataaagcttttcagtactttatttgctcttttttaaatttattctcttttttattcgtcattttattttaaattaataagagaagaattagtccattctttcctcgaaatttttgaaaaattgaccggtctcgaaaaaatagtaaatggaaaaaaatgttgttcatttattttttaaggaatcggcttgtctcatgaatttcaaaatttttagctttaagagtttaaatttatttttaaatgctagatgctttgaaatattattgttgcactttcttgctcattaaatgttgttaaaattaattctgtttaaattttattttatttgattttaaatataaaaaataatgaatttaattaagtattgtccatttatatccttagtttcatcatttaataatataggggcggccgcaaatgtcggggcacccttttctcgagcctttaagagtgtgattttttttcaaaatatgttcttacaaaataaaaacggaataaatttttttataaataaatatttttgaggcccttaaatatttattattctttttactatttttataatttcaaaaaaattataaatctgcaaatatattattgttttattataatttttttttcattaattaacatattacatcactttccaattgatttaataattatagggtttttatttttattgctatagcattttttcagttttttatggaatttaattttttgtaattattttatttggaatatccttttttttctttgttgatgatttgctttttatgtttcaaagtgaaaaaattatgaaacttgccttcatataatataatattgcttctcaatttcaagcgtaaattttcatttaatttaaatatttttattgaattacatacgttcaattcactaattgcataatttatgctcttattttatgattttcctttattaaaagataaagatttttgtaaattttatatttggaatatcgctttttaacaaaatattttacaaccttaaattatagcgcattaagccgataatgaccagaagtgtctttttacgattagtaaaattttttattaatgcgaaatcttggcttgtatttaaaattgtgctgtgattggcctatcgaacgcttgccctattcgaaattgagcctggcgtggcatttgagggatcccttacctaaatatgcctgccgtatttcttgtttattgggattgcgttatttttcattaaaagatctgttccaatcctgcagtggaattctcaaagcttgattttttataactccgccagataaactaagttttatctttatcttcaagttcaaaaattaggcttctttctaaggtcaggcatctgactccaagaaattagtccttttttgagatatatcccgaccccgatgccatttttgaaggaaaaagttaatttatctttgccataagtttttgaatttgtagttaacgaattgtttcgatggttgaatagtttaatgctgaaaattatttattttttaaatgacattaccatactatttattataattaatttttgttctagatgagaagagatgatattttcttttttaagactgttattgactacaaaattaataaagaatatcatttcttatatttctattcaagattagcatttttaattattatttttcatgtattttttatttaatataattattttatacctctatatcaggggtttgacttgtctcagaaaagacgagagcgagagttcggcgagaagcgagagttcccaaaaagacgagagttggcgagaggcgagactttttcaatttttctttagccttattttttacgttaaaaaatttcattcataagtacaatcatacaatttgatatgataaaaaatagagtgccacgggaccgggaatttttggcaaaaccgggaccgggattaaaaattaaaaaaaaaattcaaattttaatttatatcaagtgaaagtaatgcaaaattatgtggttttttattgaataaaataaattaatgaaaatcttcaaacaaatgttcttcaattatttcaaacaattaatcatttatggactaaatc

SEQ ID NO: 5125 - DNA, 3003 bp, Heterodera glycines
attattaagctcattggtaggattttcatttaaaaaatgataaaatatgtatcaatttaaaaaaacaatgaggaaccatattttctttataggaaacccacgagtatacaaaaaaaaattgaaaataatctaatttctgtagagggattgaaccaggggaaagaagaagggaaagtcaaggagactagccattaggccatttgcatacttgggcagtgttacttttaaagaatatattaattattattttttatttttccctttgactccaattttcttcactaatttttcactcagaccccattcttaccagtgcttgtttttcccggttcccggttgccctaccgggaccgggacctgagattttcaaaacccgggacccggggaccgggacctcggatgaccgggaattcccggcccggtcccggtcccgtggcactctgataaaaaacaagaaaatgccaaaatgtgctaaaaagttccaaaattggaacataattgctcaaaaatgcgaaaatttctcagaatggttttttcgcgtaaatttgaatatttttctgactgctcaaaagttcaatctttaggggtgcatttcacctctcgtcccaaaaaacgagaggtgagaggcgagaatcccaaaaatggcggagttggcgagaggcgagagttgtcccacccctacctgttaaaaacctaaaaatacgggttcaacacataattttgcttaaaagtactaaattttataatcttgatgtcattcgatagcacaaaggcttcttaaggctaaaaaatttcaaaaaataatccgccaagtttgaacaattattgccgaaagtaatcaatagagcccggcaaaaaaatttcccgggaacgggaaaacgaaaatgaacggggcgggattcccgaacgggattcccgccttttttcccgttcccgtaaaaatcccgtcaattttaacgggaatcccgccaggaacgggaaaaatgttttttttcaaaaaaatattgatttaaaaaaaaattttttactttatttatttttcaagtgaaaatatagtattttaaaccttaaaaaaatttttgtttttagtaaatgattaaattgaattttattaatggaaaaaaattttaaaattgaatttttaaattgatttgttttaaaaataagccataataattttttcgagggtactggcaaaactggtaatttttgtgctctaaaattcctagaaaatttttttgcatgcaataattttcattaaaattgtctattatttttttaaattccaaaaattcttagagaatttttctatgtttttcaacttattaacaaaacctgttttgattaaaaaaaaaaatttcgcggtgcactttttacaaaatcttttgtggtacagcgagggggtagccgataggcgccgccgggaaaaaattaaaatttttatctaaatttgttaacagatttatccaaaaaatgaactataattggttaatggcgctttaaaagttgattatagaaaaacccacaaaaataagacaaacccagtaacactctttaaccaaatgcggacccccacaacaccaacagggtttgggccatttcaaaagcggcagttttggctttggtggcttacgtccccgcatttcctgttcaattctgatttcttgggcccgtgacgggccacaagtcggtccagacaaacgcaagattccctctgaattttcagttttttaaagagcacaccaataccatgtttagtttaccatttcgaaccttcgtgtgagtttgcgaagagcctggtggctcaatgtcagggaggacgtcccaaaagtcgtcgtcgtcgttgttgtttgcttccggacccacacttctgacaggaacttctttgtccgaagcaacatcccaaaggtcctcgtattcctctgggctttgaacacggatccccttcttagctttgagacgtttttggggcgggaggtactggttgaagatttcatgtcaccgaaaacaaggattaagtttaattataatgagacagccaaaaggtattttaaatgtttaaacatataaaaggatattgcctatggttttttgctagctatttatgtaagccaaaacatgacgtacccacatggggtgaaaatagatatatagatccttttaatctttgtttgaaccctcatttcttcacaacatcctgaatcttgacggacgccagcttcatagtattgtcgagaactgcaactttttcctggaaagaatatgcagctttgcgagagctcgcttcaaatcgtgctcaaccgtacccactttcgtttggagagcacaaatgtcctgacgcatgtcctcagtctaaataagtcatgtaattatcataaataatatatacaactttaccgcaattgaagaaagcgtttgcgagctctgaactctcgcgttcagatcgctgacttgcacgcccaaatttccagtcgaatcctcaatagccaattgcaggttgttgagcttttcctcaatgcctctagtgtccacggtgatgttcaaaagcgcggaacccccaaaagtttcagaaagcgcatttgatgaatgagagtcgttagccatttaaaacaatctaaaacattaaagatgaacaaattaaagcctacacaaaaaaagaacatcaaagaagagtaaagtaacaaaaatggggaaacaatagacataaatttaaatttatttaaatcaattttagcgtctctgcatttatttcagtgagagctcagacagagaaaagagagagcgtatagcagatagcggaaggagaggagagagagcactgcgtgaccgtgtgctggtggcggtctatactactacaaaatagggggcagcaggagctgacgccgtttgcaactatgcaaagaaaggatgggaaatggaatattgaaaaacagaagaaaggatgtggaaggttggaggggatggggccaaattttggggccggatattgcgacttatactact

SEQ ID NO: 5126 - DNA, 2121 bp, Heterodera glycines
aagaagaggagcgaaacgcgcgtgaatatgaccagctaatgggctacgcgtacgacgacctcatcagcagcctcaataaagagtaggtacggtctaaagtggttacaacacagtcaacactccggaacacgaccacgacaaggacgggatttagcgtttcacagcatgttagcaggacagaaacaacctcgcgacagcgggtgcggtctcactcaaccaccaaaagaaaagaggatggttcttcttatgggaaagagcgcaaatgttcaaattgtgggtccgctgagcactggttgtcccaatgtcccgaaagacaggttgtaactcgtgttttcaacccaaaaaattttgtaaacggcatgttttagtagttctttctattaaggaactgcagcgggttcggtcgcattcaaccaccaaaaaaaaggacgattttccatattggaagggtgaccagcgcaaatgttcaaattgtgggtccgctgggcattggttgtcgcaatgtcccggaaaacaggtcttttttaactcatgttttcagtaaaaaaagattttatggcatattatttgttaaggaacagatgcagtcccatgggctgtatccttcagaagcactacaggatccatcaacgcgtgcttcacaaataaggcgcaaacagtttactaagggggtccgtgctccggcaaagggtgcgccgggacagccacttgcatgttaccattgcggcggaccacacctcgtcaagaattgtccaaaggtgtttttgagcttaaaactataaatcaataatgttttaagcggcaagcaaaccccaagtgttttaaatgcggggggtccggccacaaagacgttgattgtccaatggcgttgaacttgggcaatccagacttgtttccccaacgggactttaacactcgtggtattttttaaattttttttagattttttgttatgcgaattacattaagcaggatgctacaactgtgggggtccgcacaaggatgcacaatgtccggcacgcagcaactttccatcttatgccggcattgatcgagatcggaggcgcatgtatgcgttggacactcatgggggatccgctgggcagtactatcgtcgctcagaaaagggtactgaaacagttttttgtaagagtctacacctttgaatttaaagatccaaagtgcgatcactgtggagggcctcatgaatctgacaagtgtatttttggtccacgaaataaatgcgcaaagggtgggtacgttcatgggaaaacagcaaaatgcgtcgaaacgaccgatgagcatatgggtatgtttgtttctaatatacaactactattattctaataattttaggaaatggctgcaaaatatgcggcgaaatccatgatggtgattgccccgaagcaatgcagaagttgcactgtcctcattgtgggtacgatcacaaatcctatgattgtcctaaccaaccaatacgttagttttttaaaacatatgcaaaaaatatcattcaatcttttcagcactctgcggagtttgcggctctctcgcgcacaccactaaaaagtgccaagagcgctgcgctttttgcggaaggaagcacctgaccaaggattgtcctgattcacaaccaggctaataaattttctacctattaaaataacggtttattgcttatataggcccgtctagttctaaattcagccactgtgggggtccgcatagcgcacggcactgtccgaacatatagaggactgaatgatgtcgaagaagattgtgatttacattgaaagttttctgttcgtacgaataacaaaatacttttgctaatgatggtctgacagaaatcagtatgtctacaaagaatatttgtgggtacgaatttttgtttattgtaataaatgatgtgtagggctgccaaaagtatgcaaatgcatatttttttcctggcttcttacattttcatgcatattttgccattttttgtgcatattttccgattttttgcatattttgccatttttcgccaaatattttcctttccgatttgaatatcgcttaagaaaaaaaatttttattcctaaaattaaatccaactctgcatggatgcgcgagtgg

SEQ ID NO: 5127 - DNA, 7444 bp, Heterodera glycines
attttcaattttttacgattttttgaaatatattattcactggccggggtcgtacgagacgggggcccggggttcgtgtccgcttcggctcgcggtttatttttttacgacactccgacgaaaatcatagacaaaatgaaggttcatgcataatcagaacttagattcgtgatcagagtattttttaacccaaattcattgctaaacttttaaaaaaataactttaaaaatcgaaaaaaatcaagtagttgacaaaaaatcttagataaaaatcgatgattttcaaaatctgagctcagattcgtgatcagcgcattttttaagcctagaaaaaatacccgacaaatttttaaaaaattttttcgtcgggacaccaattcttagattgccatcaaatgtattttgttgttgtgtatttcactataccaaaaaattgcaaaaaaaaactgtaaaaatttttgatttaattatttatgcctttcacaccaccactttgttcatgttcgaacgaaccctatctttttggtatcattctaaagtacaaaatccaaataatagaattctaacatttcaagaaagttacaaatgggctattaaggtaaaaggggtcattaattggagggggccttctatcagatcaaagggggggggggacttcaaatagcggatacggtaattacagcccaagtgatcaaatgtatttttttagttgatgttgttttgtatttcacaataccaaaaaattgcaaaaaaaaactaaagacaaataaaaaattttgatttaattatttatgcctttcacaccaccattattgtgcgtgcatttccatctcttcaagtctcatcccatctcaaattggcatcaaactcagccatctccagctcttcctcgtctatttctgcctcaattttcgcataaaattctttcatcttctcagcttctctacgctgcacactggccgaaatgcgacgcaacagacgaaaacacaaaacgagcattacgaagacaaaaatatttgcaaagatggctgagccagtggcaatgtaaaacacgatggcatggatcacgggaaaccaaaccaccaaaaagggtggatcacggacaatggaaggcacggaagaactgttggaatgaatcggctgaaaaatggatacataaaatacacataagaattatgtagtgctgtagaatttttttggcccgaaaagcaacaaaaaaaaattgccttcgtatttcccccccccctccgaatttttttttagctactggcttatgtttgtttcccattggtaatttttagcctaaaattgacaaacggtgttttttgttcaaatttagttttagtaatcacgttttgaaaacaataaaaatttcaatcgcatttctggttcttaaaaaaatttaggggatttttgaggcctgtgtttaatttttttttttaaattttcgattgtaatgaaatgtctcccgccgctccctcaaaaagtgagcaaacgaacagtgtttgaggtttgagttttatttgaggcacaccagcagaacacagcgaatgaaaggagcaggaaagccaagccaaagaacagcttaaatgaaaaaagattctgaaaaaaaattaattgtaggaattttttttaggtttttctagatttgaaaattcggtatgattttctaaaaattaagtttaatcggtaagactgacatttctgtcttatttttaacatttgacccatacctgaacccatgaaaacatttcgcagaattttgtctcctttggctcagtttccttctcttcgctgtcaattatgcccaatatttctttgatttcgcgcttcaattgggctgaaattgggttaggaaatcaagataaatgtttaaatatatgcgaaaaaatgggtgtcccaaaaaaaagcacgaaaatattaccatttttttccttggcattgtctgacagcggtcgatagccattgccattttcgtttggtggcactctgttctccttcggctccttttccttctcttcgctgtcagtggtgcccatttttgtttcaatgtcccgcttcaattgtgctgaaattgggttagaaaatcaagaaataaataattaaatttgacgcggaaattttcaacggctataggtacttcagtgttttttgctatccgccaccctcgaaaaaattgaaacttccaaaaaatcatagttattttgttaaatcgatacacagcagatgtatattcatgtgatcagcgagtgccctcgaaaaaacaaaaatattataattttttgaattttttcgagggggggggggtagcaaaagactgaagtacccggctctgttgcattttaggcgtccaatcttcagtttgtttgaacataatttttttcttaattggttaatacctaaattcttggcatcaaatgaaagcttgaagtataaattcaaaaaaaaaaaaattttttttttgtatttgctggaaaaatgaccaagaaaaaaaaattcgagtccgggttcggatttcaaacttgagacaaaagaatgccaggttcctcgtgcctaaaaaatgcttccaagaaaacaataaccttttttgtcaatgcctttgccgtttaccggcaatttggtagtgccaatgtcagtgggtggcattttcagagatttgttggcacgccgatttttcaacatttgcaaattgttcagcttcagctccagttcgttgtcgtccatgtcggaattgtcgaggaagaaatctgacatttgtcagcggaattggatctgtgcttttctttaaaaggaaaatgagtaataaaaagtgacaaatgtagagagcaaaattcaaaattccgggctctagtaagcagtaatagaagtaggtagtcatttttttgttcaaattgtttaacttataacattatgccagaataaataagtgacaaatttaatttaaaaataaaaaaaatttttcaatttgttctttccctgggaattatttttgctgttcgggcactccgaaaaaaaccacagggtgagggccctttttatttcgtgaaaacttattttatgggttttcgggggtagctaatcacgaatcttacaccaattttgacaaagctcacccggactcgaacaaaaatcaaaaactactagtaagtttttcggagtttgcttttttgcttgaatttaggttagacattcaaaattggatataatgggtgtcagatccctggttaacgcccccccccccccgagaacccttcagaatttgggggaaccaaatatactaacaataagtattatatgttacccccgaatttgcaaaaattgaaagaattttattatgtagtgaaaatgtgtaacaaaagttggctgccctgtcagttttggagtgtgaagttttttgtttaaaaaacaaaagatattgatcattatatcctatgcagtttccttacagtttttcaattctgtttttgtttaagcgtaatttttaaattaatgcattttttgctgttggggcactccgaaaaaccataggttgagggcccttttttattcgtgaaaacttgttttatgggttttcgggggtagctaaacacgaatcttacaccaatgttgagaaatctcttacccgaactcgagtgaaatagaaaactaagtttttcggagtttgcttttttgcttgaatttaggttagacattcaaaattggatataatggatgtcagatccctggttaacgccccccgagaacccttcagaatttggggtaaccaaatatacaaacaataagtattatatgttaggtttccttacagtttttcaattctgtttttgtttaagcgtaatttttaaattaaaaacggcaaggtcgcagaaaaaatcagtaaaaacttataaatccggtccctaaattataatttatcccacaacaactcctcgttatattttcattctctgactgccccatgttttttgattcttaggtcaacccgattttggttaatccgccagcccctaactcaaactaatctctccctttcctttttgtctgactaattttcaaacaaaaaaataaaataaattaattgctttctttttattaagcaaaaaatgagcacaccaccaaaagcagacgacaaaaagaaggaagtgggcggaattctgaaaatcggcaacacatgctgcatgggcgctgcactccaagcattggccaacgtgacggcactcagcaattttctgatcgaaaagtgggtgccaataatgccaatgtccaatgccatcaatttatgttttcacccctcttttttcagcgaaaaccgactgcccaacaacaaactcgtcatggaatatgtgcaaatgatcaaaagcattttggtgttgcgacaaccggcggcgccattcgaactgaaggtgtggtgaacagtgtgccgtggtgatggtggtgttgcgtttcatgactcgccgttttttcaggaagtcatctccagccttaccaatttgttcgctgattcgttccaacatgacagccgactgcgcgacattccgctcgacaaaattgacatttggtgcttcatgcgattgttcaaggacaaggacgaagatggacagggcgaccgcctgatttgtatcagcctggcccaggtggggagttcaagcagtaccaggaggacaaccctaaccccatttgacattttgccgctttttttagcgcttcactgatgaatcgcattacattatgggagcgtcggacgctggtcaactgcccatggatgtgccgctgatctccatcaaccattgtctcgcggatttcatcaaaccggaagacattgaaggctcacgctgtgcacagtgcagcaacgcaacgccatgtttgactgttgttgacaactccgttgacgaggcggtggagcaggaaaaggcggagaattgtccaactacatcgtcaagaaaaaataggcaggcggcgattttaagcggaattattttgaagaaaaaaaagtgattcgtccggatttttttttaattttttatttgatgcataaattgatcattttttcctacaatcgtttttcatccattgtttttacagtctgatgctgtgtcattaatattttgcatatttgatttatgtttttattttcaaactgtttttgcagccatttgcgaatttattcaaaataagggaaaatggtcgaagccgccgaacagtcgcaacaacagcccatccgtcgccgtgccggaccgaagtcggcacgtcgcctttatgtgaaggcggtgtttaccgggtacaaacgcggacaccgttctcagcacgagaacacgtccctgctgaagcttgacggggtcaatgacaaggtttctgtttgcattaatttggaattgctatgcttgtagttttagtagtagtgagtgaaggttttttcattttgtgttttattttatttatttattttggtccctgaatacaaatgttaattttcatgttggaccgaaatccgcgaaagattagccccctttcttgactattttctgttcacgcatttattccaaatttttcggcgcttcaattagatagttgtaagtgcaataatgccccgtttttagtcggatgccagcttctatcttggtaagcgtgctgcctgcatgtacaaggggcgcaaaacgatcgcacgcggtggtgggccgaagacgagcgattttttggtcggttttataaaacaatattttacttcatttttatgtttctgtagcattagggtgagcagtgcatgatcagtacaaaaaatagaagtaatatgagggctcttctgttttttgatttccaaaagaaaaacatgaaaaccccaaaattaaataactttttatcagtcttttaattaaacacaaaaaagttttggactttttatggctgtatcccctattctacagaaatttcagaaatgtgtatcaacgatttcgttgttgattttttctctcctttaagttggctttgtttatgtgccttctttttgtacaaagtgcttgcgccgaggaatctttttcaatgaaagtaggagttcataaactctttgacaatgcttaaatacattttttcaggacctagcgctggagtacaagataaaatatgacttctttttcgcacctgtgacgttgattttggctgtgttaagcctagcgatggcgttttctgctggctttatggttgtcctcaaccgcatgttcagtttgcacatggatgtgcaggaaaacaaaaaccaagtgaaagaacttcgaaaagaattggacgagaatgttaaaaattttaacacattgtattctgaatttgttaatttgaaaggagaggtcaatttgctgaaaggcaaataggtagattattttataaaataatttaattgtttttcatgcataattgtgttttaaattcattaattgtgtagacagttaacaaaaatccaagtatacatccgccggtgactgggccgttttgaaatttcgacatcagtagggaatgatattttaggctctaagaactgcctaaataggtaggctctaaaaacccccaaaacaggcaaaaaccatttttaagtgtgtaaaatgtcaaatttaattttaaaatattacatatcagaaattgagataaataattttaaaatgaaaattcttcatatgaaaacaaatagctaaataattttggagatgaatttgcatttttgttaataatttggtaatagtgtacctagtctgcccccccccttttttggaaaaaaatttcaaaaattgtagtcgtgaaaacgtgtttcctgggcttttagaggtcgataatcacgaatccggcatccgtttcggccaattccgaacaccggacccaaattcgaacaaaaactcgaaatccaaattttggatttttgtctaaaaaatggtttaaatcaaaaatagaagtcacagaaatgaatgataaaaccttcaaacaaatttataaggtcatttaatcagcaatataatatctaggtaatccgtttttaatctgtgtgtgcctaatcattttttgataatttgaaaaaatatcggtcatttgaaataataaactttagaattttatctaggaaacccagactttttcgtcttttgcctggacctggattttatttcctatttgaccctgaccttgattttcctggattcaggctgatcttagatatgacctgaatgtaacactaaaaagagtgtttgcagttgcagcaaaaatctcggattcttcaaaatgacacagacacagtgattttcaaaaattacacacaaataaaaaaaatcaaagaaaaaagtccattgcattactccttcctctcccctaaactgaaagaattatttattttcaaaaaaaaatggaattaaagatcttgctccacctaaaaaactgagtttacttaaaaatcaatttacctaattgaaaa

SEQ ID NO: 5128 - DNA, 6465 bp, Heterodera glycines
  unsure (1)..(6465): unsure at all n locations
atgaatgttcntgtcttcaaaattactaaaaaattatcccttaaaactcttaaaacatactgctgccatcggcaaatattgtggcttgaaaaaagtttaatttattcattcaaaaaacaatattgatttttaccggctgattcgcaaaattttggctctgataaaatttttgaaaatatggaatattttagaaaatttttacttgattcgatggtttatttgtttcatgctttgcaacgggctaaaaaattgtaaaaaatatattaaaatattaaaactaaattaaccaatggttgacgtgttggcacccgtgtgggagcttctttcaaaattgtctgaatggatattaaattaataattcgcctattagtttgtctttttaaaataattacaaaatattaattagaggattaattagactatcagactttgtcaattgaagtagcaatttgcggctgtggctttacaatgtaaaattttattttttttaatgaaatgaattttaattgcacctgatccttcgctcgtattaatttccgaaactaaaaataaattttagaaattaaaacaatgaaagtatttcatcaaacttgttcacgaggttgcgcaaaacgatgtcgaaattccttgtaaaaaaaattattaacaaaatattaattttaaaagggaagaataataattaatctcacaaatgtgaattaaataattattaacttaaaaaatacaaaaaatataatttaattattcattttttatttctattaattattttgaatattttatttgatgcttttttcgcttaatatattaatcctaaaattaatgtttaaaaatcgtttactttaatttgtgccttaaggcttgaatttgtttttcgttcatcaactgttgaattgttgttcaaacgcgctgtgttcagcttcacaacgccggtaggttgttgctgttgttgttgttgtacagcttcaacccgtcgttgcgataattcttgtttttgttgttttggcaaatttttttggatgaccaaaattttttgctgaatttgttgaagctgttggactagttggtgaatcaactaaattgaattaatttatgaaatcgttcagatgaaagaattcaataattagtgttaccattaaaagcaatttaattatttttgttataaatttattattgttcacggaatttgccttaaatagcataagtttttcctgaaacaaattttaatgacaaaagaattttaaaaaattgattttgcctttaaaattaatattcggtgatgattttttaatgtcctggataatttaaatccatttaattattttttcgttttttcgcgcattaaatcatcaccccagtataataaataataaaatttcatatttaaaaataattattaatataatttttacttgttctgttgtcgcaatgtttttctgctgttcgccaattgtttcattgtcaatttcagcattggcgtcactgtcatttagctttttctttaaacaagcaatgttaacaaatgtgaaatctttttttaattcataaacctttgtatccgtcaaagcaaccgttgttaacaaagtgattacgataaaaagtgttactgtaatgcaaaggtgcggcatactgtaaaaaaactgagtaattttagattattaaattaataatttttaagacactatattaatttgtgaagctaaaatgacaattaaatattgtcactgaaaagtgtggcttaatgtgttaattatagccaaaattttcagccccattaaaaccagttagcgcactaattagttggatttgtgcaacggtgaagcaatccattaaagtcagcgcgcaccaaattttattgtgatcataattgtttcgttatatttgacatattaattatttaaaataattagaaaaagattttttaatattaaaaaactggatttcaaaaaaattattaaattaattattaaataaatatttttttatgtaataaaacgaaattaattttaatttaaaaaacaaatttatctttaaaattaatttttctatgatttgatttttatctataaaaataatagatttattttttgaattttgtttatagccttatgtaatgtaaataaatatatttattttatattctttttttagcttaacatatttatatcacaaatcacataaaaccagtaaaaaaaagaacccattcatcccaaatccaggacatcgcaaaaagtgtgaccctgtgatattctatgctgttggaatggccgctttttgtttgtatctttattagcaccgctattattaattgcataacatttgataaagcctgtttcttcattgccgatttcatttttttcagaaaaatgagaaagccgcggagattgattagattaattgggttatcaaaatgaactgaccacaacacaaatgtgggacttaatgagatgacaagttttttagtgaaaattatttacagaattctataatttttattaatttcaattaaaaaaaagtatatttcaaattgatttaaaaagaaaattgaacaatttaaatcacaaaaattgtattgatgcaaagattaaaatatttcttttattgctaaacattattaatgaagaaaatgaaatataaaaataataataatgagttcattttattttcttagtttcctcaatcatttatttgtcaaattgaatagcattattcgaatttggttaaaagccaattgtttgacaccatacttgatctctgatcacttaacagatttttgggctaaaaattaattaattattgtttatttaatgaataaaaatcacaaaaaacttttttgcttctatactatgaaataaattaaatgaatttcaatgaaatttacttattgttttaattatataagcttgtaattaaatgatttggtttgcaaaaatttgaaagaatatcgacctatttgtcattatctcttctttttagggcttttgtcacttttgtaactgtttggcgcttttcttcacgatttagttcagttattaaagaaaccagccttattaattcttccattattttatagcctagctctcgactttttcaggaatttctttctaaaaattaatgctacaagaaataaaaaacaaaaaattatttaaaataatttcaaaccaaaagagcaattttattgtaaaatttcgaatttagtcgaattttcttttgcttatttttaacattttttatcctaaccttttccattattttttttccattcatgttgcggacagggcacataataagcagctgatttcatgcctttacccttccatggtttgaatttcttccgcaattttattgttgtttgtggctaaatttttttaaaattttcatttaatatatttgcattttattttactggtgccgcagatgctgaagcaaattgaatgtgatttgtcataaaaatttcattgtcaccttcaaaatgaacactgttgtcatgaagaagatgctacatttaaatgggaattatatattaaataattttaatgtaacatttaaatactaattatggctaaattttaaattattttaatgttttacttctctagttgctttgcagtcagatttattcaaattcattagaaagataatgaaaatactggaagtcgataaaaatttgataattgcataatttttctttagttctaaaaaaaatgaaacattgcagagtggtaaaatcgcgagcagagaatattcatttacctgattaatctttgctaacaataaattttaaatgtcggaaagtgtactttgtattaagatggtcagctcgttctcaaacagagaaaattggatttaaaacattttttaatttcttgttttttactgggaattaaattaattttaatgtcttttactatttgatggattttataactacgaacagcattatgaggttaattttatatttatataattatataaaaaacattttcaaggaaagcacattttttgaaaatttttccagtgaattctgttaaaaacaaaaaatcctaggattcagctcatttttatagtcaatgttattgcatatcccattaatcatctgttaatgggttttgctttttttatttttggctgcaaatgtgcacaacacagtcgcattcatttaagcaaaaaacaactatgttggctcaaagaattgtctgttcaatgaacaggtttccacctaaattgtggtcatatctttttgatatttttgataacaaattagttggaaaatattatttaagcggcattgagtgaaaattgagcaaaattttaaataaaattatatttagaaatgaatattcttgtttatttgtgtaacattttcattttttaaattgtcataattattccatttttggtgtgttctataataatgcattttggaaaaattgctgaaataatttttattaaaacttaatatctaattatcgcaaaggtactttcctgttctggggccccaattcaaattttttaaaaatcagcaaaaagccgcgcaaataacaaaagttctttcccatataaatttaaaaataaacaatttttgtcccgccttttcttccgcataaattacggacaaacgcccaacggatttcgttaatccatatttcatttaaatttcaaatagtaataatttacgaatttttttcttctcaatttaccgtattttctctgattatcccccatgggggattatttttcaatctcctcagaaaggtgggggggggggggtaattggagactgggcgattatttatgcattatgacactattttatcaagaaaatataagatatgtggcaaaatttggtcattttttgaaccattctgtaacctgttaaaaaaaggataatttcaaaaaaaaaaatttggcggcgcctttctgaagcatcattctgaggggggggggggggaagttaagtacgcatccgggtgaggtaagtaattttctttattattttttcgtgtttattaaacatttaaatgtgtttcaattgaaaagtaattatttttattttttaaaaataaatattttttgaaaaaataaaaaattccggaaatatttcgttgccatagtcacaaataaatatgaataaaatcacacaaattatttgcctcaaagtcaatacaaaagtaaaatataataaaatgataaaaaaatttaattaaaaataaataaataaatataactttttaatattttttgttaaggagttcttttgtgctttttgtccatgcgtttcaggctttacaatcggaaacaccgttaaaagaatttttccattagaattaagcaaagttttctagcttttctggaatctgtcttcttttggcaatcacttggatatggaataataaaatatcgttttttcaattaaatgcaatttaaaacagagacaaagggcccatttccagctttgtttactttctattaatttcccaacctttacaattgattgttttaagcttattttcactaaagaaaaagtatcctacattcgtttagtcgaaaaaattattttataaattttttagctttcttatatacaaattatttattttttatttttatgtagtatttgaacccagtgctccgaaaatgcgaatttaaccaactgagccatcaattttgttcattttcctcattttttggtttcttgccattggcctaatatctaattaagaataaaatagtttatttaatctgttcatctttatatattttattttatccagaatcttaagaattcaaacgatcaaagaacttcaaaaatttgtggcttctaaattttctgctttgtcaagacgttaaaacgcacacaaatgattaaatattttatcactagggtcggttttagatttgttttagtttatataaaacattttttaaaaattaaaaaaacttgaatataagaatgttcacatgccttgaatcgaattgaacgtttcattcaaatatggttgacccttatgcaaatcgcagttcatataatcagaatgcattacgcgctgtaaagactggagctcacctgaagtcaatattgtggccgtccgttatgatgacacacaatttggaaaggctgacaaagcattcaacacgttcgacaaccggaaacagaaggaaatggtggcaatcttttatttaagcaaaatttaaataattaacaaaacataaatttgcacagggattggtacgatgaaagttccagccagcctctctcttccctcatggaccgtttgaaagatgatttggaaggatttgccgaccccgacctttatggcaatattgttttgttacgtaattggattttttgatgcctcagcgaccgtagcattcggtaaagtaatacagtaatttttggaccgttcattgctattttcagatgataattattttctttaaaatatttttatttgccccagtact

SEQ ID NO: 5129 - DNA, 2030 bp, Heterodera glycines
aaaaaaatatatttttaaattaaattaaatattttttaaataatttttttttctttttctttttaatgaaagcaaaattacgcaagtatttgggtgtgtgaaaaatattgtgttaaagaattctttttatggaaaaaaataattataaacaggtgatttacctatttgtgcttgtgaatgcaacagaaaattaattaaatggaaaataaaaattaaaaataaaacataataattatttgtttttatttagttggtcctatttggtttcttaaacacgcaaattgataataaaatgaacacattaaatcataagattgcttaaaggtcaaattaaaatttttatggtatcatttattggtctatatttctctaccagagaatatgcaatactcaaaaatttcatcaattttcaaattattttgacaaaaatgcaaaagccaagggttcagaaattcatgaagataaaattttgaaaaaaagcatatagttttttggctgaaaattatgccactattcgtcactattttggcattttccccactatttaattaattgttttgagattttcattactaaaaatcgcatcccttatttataatgcatgtgcacttttgtttatgaaggaagaagacctatttgactttttgttagtgcataattaaaattttctgcccatttgcccttaggcgcaattgcacgaaactcatagtttttaattgggctaaagccaatcgaagtttgttggtttctgcattaataatagaaagttataaattaatgaaaaaaaacaaaaatatttccatttttttatgtttgacattttcttcttgacctctggcaatgcctaagtaaaattgaaaaaaacaaattcattatttaaattttactgatttcttttcattaaatgctgcttttgataattaacaataaaaatagcgtagtgataattataaacaaatatcttaaaataaacagaattcttaatttactttaaatttaataaataaaaaatcattgctattatttggaaaagatatttaaatggttattataaatggaatgcttatttttggatcattttctttatcgcatttccgttttcattcttttgctcttccatcattttcatttctccgcttaaagcaaaatgccatggcgaattgccgtgcagaccaaagccacggcaactaaattaaaattaaatatattttgtttaatttatattgttttttttaccaaaaaccatcacaaagtgatggccaatgccgggcttagtgcttcttccactcccagcagaaggaggcactccaaggggaatttccatatcggaaaagacaatgtctgaaaaaatattaattgatttaaggtagaatcccctactcattaattaatgaccatgaaaaaatagcccaaccacctgatttagctaacccagaaaaaccccgactccgacttttgtcagaccgaattatcggagtcctaccctaaattaattaaaaatataaccaatgccattctgcagttttggcggtactgaaaaataaaaaaaaattagaaaagaaaaaaaaatttcaccaggcacagaagagttctcggggtttggcgggggaggcgctgtaaaataaataaataaataaattaattaatttttttaaaaagttccttaacctaaattgaaatgaaatcggcaaaattaaaatgacacactcaaaaaataatcaaatttttattttttacaaaacaaatttttttgaatttcatttcatatgaatggaatatttacatttaattttgaagaaaaatttccaaatggaactttgtaggtgggtagaccacccctgagttgagagaatttcaaaaaaaatactaatttggaataaaattttgaatattttatatggttttgtgatatttgcacagattaatttccaaaaatcccttgagttgtgtcttcaatctttgaactaaagacattttgtcaaaataattattaaatttttcaaatttggggcagtttcactggcgaaatt

SEQ ID NO: 5130 - DNA, 2617 bp, Heterodera glycines
ggaatgctattttttggataattttgttttcgcatttccgttttcattcttttgctcttccatcattttcatttctccgcttaaagcaaaatgccatggcgaattgccgtgcagaccaaagccacggcaactaaattaaaattaaatatattttgtttaatttatattgtttttttaccaaaaaccatcacaaagtgatggccaatgccgggcttagtgcttcttccactcccagcagaaggaggcactccaaggggaatttccatatcggaaaagacaatgtctgaaaattgttaattaatttgaggtagggttcccgactcattaattaatgaccatgcaaaaatagcccaaccacctgatttagctaacccagaaaaaccccgactccgacttttgtcacaccgaattatcggagtcctaccctaaattaattaaaaatataaccaatgccattctgcagttttggcggtactgaaaaagaaaaaaaaattagaaaagaaaaaaaaatttcaccaggcacagaagagttctcggggtttggcggatgaggcgctgtaaaaataaataaatttatttatttgtttgtttttaaaaagttcattatcctaaattaaaatgaaattggcaaaaaaaaattttaccaacagaagcgttcacaggatttggcggaggcgctgtaaaaagaaaaaaaaattaataatatttttaaaaagttaattaacctaaattataattaaatctactaaaatttaaaaaaacataaaaaatgatcaaattttgcttcaatgaaattaaaatttttacaatgtaaattatatttaattggttttacaaatttatccgattttgtccattgaaaaaatgattaaacagaaaattaaattttaatgctataagaaaacaattttccccaattttttttccaaaagattaattaaaaacaattttttttctactttttggctgatacggcgggaactttgcgttgccattgtcttcattatctttgccaaattggcactgctcgcaccggtaattgccatattttctgataaaattgtccttattcttttttttctcctcttcacaggcttcttctgtgcttccgtttgcttggcactccttctttgccaaaaattcacgaccagcagaattgcaatcggtaatagtggagcatgtgtaaacggtcacatagtgttcggcttgggaaaaaaagtaacaaattgttttatgtaatgtgattaataattacttttttaaatctgtgcgtttttttttgcatattgagaatttcttatatggaagggtttaaaattatttttgcgacggttttatttcgatgaaaaagacaggaacaaaaacattttagcgcccaaaatattgccactatatggtattggtgagaacaaacaacataagcattgtgtacttttcgccaattaataaaatggcatttcttcactatttttgccactttttgctttttgttttttgaaaaaatttaaacaaaaaattcaaaatttacgactattaattaatttctttatttgtattggcatttctgctgttgtgtttgtttatcatattttctacctttgccctctcggaagcagacagctttcgcacaaaattttagctctttcttttcagggcaagcagtcgaaggacttgtgagctctttatcaacaaagggcttatcaacggtgccaataattcccttacggcaactgagaaatgttgctaaaatattaaaaaaaaataatattaagaacatttaaaaatgtactaaaaattaattataattcattattattgtataattaccgctccaaaagcacgcaaacaagacattgagctgaaggatgagcttcatgttaaggttggttcttggattatctaaaaacatatgaaaatttattttatttttaaatcgtttttatttatttttatttattattaaccaaataaattggttgtccaaaatgaaatgaaatgaatggttgggaagggatgtacaattctgttttcgatgcatatctcttgtggttaatgagaatgtaatgcggtttcatcactgatgtgagcaaaaaaaagctgattgacacccaaatcagtaaatttatgcataattattttcctggcaataaatttttctgtgtttggaagatgaatgattcaattattataaaataacaaaaataaaacgaaaaataaattgtatgaaaagggaaaataaattgtacgataaaaaatatcgagttcaatgaatgctttattctgttttagaaattctcgaaaatctatgtatagaaaattactccgaaagattgaattatcgctctggaaatgagagtcatgacaatttgtacataatggaaaccatacaaagtctactcgtacataggcttaggctttattttgtaaaaataatttttgtacgagttgccattaatccctcggaagatataaaaattgctattcgaagtttttctctactcgtcgacattatcaatttgaaaaaaaaaaaaacaaactattggtaatgatatcctaaaaatataatgtcgaattttaggtaataattttaaatgttttaaatttgatgaaaaacaac

SEQ ID NO: 5131 - DNA, 1885 bp, Heterodera glycines
tttgattttcacatcactttttttcggagcgctttttcaaaaacttttgggaaagaaggggtccgacggtgccgataggcgccgccggaggaaattttgaaaatttgagtgtgatttgttaacaaatttcaacaaaaaaaggttggtttttgcgattattaagcttaattggtaggattttcatttaaaaaatgataaaatatgtatcaatttaaaaaaaactatgagtaaacatattttctttataggaaacccacgagtatacaaaaaaaaattgaaaataatctagtttctgtagagggattgaaccaggggaaagaagaagggaaagtcaaggagactagccattaggccatttgcacacttggcagtgttacttttaaagaatatattaattattattttttatttttccctttgactccaattttcttcactaatttttcactcagacccccattcttaccagtgcttgtttttcccggttcccggttgccctaccgggaccgggaccgggacctgagcttttcaaaacccgggaccgggacctcggatgaccgggaattcccggcccggtcccagtcccggtcccgtggcactctatttataaccattacaacaaaatgtgtttttttaattaattgcattcgattttttaagttgagaatgaatccaatcagcgccaaaatattgaatgcccactatgggctaaaacacccgcaaacaaagttgaacatcacccttaacgaggcaattgcacttggactttatgacccagtcacccgacaatttctcaataacaatgagcagatggattattgggattccttagcattccattcgccgaacactgtccacctctacgtcaaatttggggctataaaagtgacaccgatggacttggattatgcactgaagtgtaagtgggcgaaaaagtttctaaatacctaaataggattttcggcccaaaatgcgaatttaactaattttaaaaatggtttcgttttggccaaattttagatttaatgcgaccttaacaatacttggtacttgttaattatcttttcaaaaaaatttttgagaataaacttgttttttagttttttagcgtcggaaaacccgattctggcatctattttggttccgggtttgaatttgggccaaaatagattccagaatcggatttcccgaacctaaaatccctaaaagttttctttaaaaaataaaaaataaatttttttttttgaaaatctgtaaaaaagtacccaataattttcaatgtttcctgggtttcattaaacattccaattttttttatcacctatacaattttgtttaacaatatttcccattaagattttttggaccggtacgtcggagagttccgccttttggaataccaaatttctctgccggaggccctcaaatacggctacattgaaattcgcaagccacaaccgacatttgcattgtcgttgaccgattgcatcgaacagacttggataaacagagaaaccggactgttcattgcccgtcccgaaaaaccgcatggatttggcgaagcaatgcgtttcaatggtgacgggccatcggaaattttgaagtgcgatgtgcgcgagtgtttcgactcggaaaacaacacgcggttgaccattgccgaagcagtgcgccgaggaattttgaatctggcgaccaacacattcgttgacacaaagaatggcacacagctgacccttccacaggcacatcatcgcggattcattcataaaccgttgactctgacggaagcggtgcggatccaccttttggatgagaacgaacagtttcgagatggcaccaaccgtcacacactgcttcaggcaagggcgtatctagggggagggaa

SEQ ID NO: 5132 - DNA, 3375 bp, Heterodera glycines
caatttttgtaacaaattggactcaaactttcaaaattttgcccggcggcgcctatcagcaccgccggacctccatttccactatttttacaagttttgttgagaaggggggcgctgctgtcgtttgccgtactcgaaaaattcggaaatttgaaacaagtaaataatatttgaaaataattaaagacttaaatttttaaaagtttttgtttaataatatcttcgatttaattcgaaacaaatgtttttaaatccaaaatactgcaaatcatttaattcggatggcatttttcctttgactattttcgctacgttttaccggtaatttcatttttactaatataaccaaaacaaatccaatctgatcattccaacaaaaacgaatatttttaggagcaagtcaataattccatcattcaaattgattaatcacttctcacattcgtaaattctaatgcccattcggtccaagtgatgatcaatttgctagccaatcacatcttatttccattccgtgattttgagcaaatttaaaaaaaccaaataagtttttccggccgccagaggaaaaatagaaattttatccatttttaacagattttcactgaaaattggccatttttaagtcaattttgcgctttgaaaatcatcatttcaaaagaacaacaatcatcattgaccctgtgaaaccaccaaaatgatgataaatcattacatctggcaactctgatttaaagcctgatggataaagattttattatggcgtttagaataaacaaacccatgaatttaaatttattgacgaaataacttactgatgaaatctaatgttaccttaattattgtcattttattacttttaattataaatccaaattatatttaatgattttaataaagaaataaatagaattctgccgaatcaaaatcatcactccctgaagtgatcatttttcatttcatgaaaataattaatttaaagtagagtgccacgggaccgggaattttggcttaatcgggaccgggaccttttcgggttgaaaaaccgggaatttttggctgggaaaaccgggaaaaaaccggaactagtcccggtcccggtcaaaaccgggacctcggtactcagttgtccgctaccaggtcccggtcccgtggcactctaatttaaagaaataaaatttctcaaataaatttgtaaaatttaaaaaaccaaattttgcgcaaaccttatattttcttgataaaatagtgacattctgctataaaatttcaaaattttgaatatatttaagaaataagaacaaaataagaacaatagcccgaaatgaggacaaatcttacaaataaggacatttttattttgtaagatttggaccctccaaataaggacaaatcttataaataaggacagatccgagccctggttttaatagccccaaaaaattgtacaacattgatcattttgctaaacatctgctgttaaaaatgatttataaatgcacaaaaatttttctggcgccaaaataaaataattatttcggaagggaaaatttgaagtttagggcctttttaaagacttttatccttttttattagtgaaattgtattgaatgaatttatcgggataaatgtcagtctcaaaatacgaaaaatatttttggttttttttttgcataaaaatgctaattatatgagtgaaatgtttaataattactatcattttaatacttttgttaatcaatccaatttacatttaataactagggctcggaaaaatatggatataaaatcgcaaaatatgtgccgctaaaatttgctcacttttagcgaaaaaccaacccgaaaagcgaaattttcgcattttagcttatttttggcgtaaattaaccaattttatcaaagttcaaatttaatcaatattttcgaaaaattttgttaaaaaataaccttttcggaaattcaaaaaggccaatttaactgatggaggccattataataaaggttttctggaaaaatgccaaatatggacataaaatatggatataaatgccaaaatatggacaaatatggaaatatagacataaatagcgaaatatggaaaaatatggaaaatatggatatagaaatccatcctagaagcttaaaaccaagccaaaacatgtttttcatgcgttccaggccttccacagtcctggaaaaaatatggagatttccatataattccgagccctattaataaatttcacccaacaaagagtcttttggcttttcactgttctccgttggcatttcagctgggctattgagaatgcttatcgtgctgatggtgataataatgatgataccatcatccgttgctgaagatgagtttccaatttatgtgatatgtaagcatttacaaagaacgctacacagttataggcgatgccagggaaaaatttttgggctttaatgaattttgtaaaggaattagctaaataatgtaaattgcatactcttttaaaatattaaatatatttttaagtatgaaatagttttcaggacccggttcgaccctatacccgtaccctggacccggtttaaaaactttggttccggacctgaacccggcttttgtggacccggcaatactcggaccaggtttttgtcaaaattcccggactgaaaatttttcaaattccgcatttggagtaaatctaaatgaaaaaatcaataaaaaaatgtttttttccgcacacactttttccagaaaaaaaacattttggcaatagagggctggtggagccggtaggcggcgccagaaaaaattttaaatgcaatttgttaacaggtttacactaaaaagacgactacgaaaatttttcgaaaaacagtctcgtgtttttgggtctcggttcttgggttttcggtctcgagtctcgtggtcaagtctcggtctcgggaaatttcaggtctcaaacagcattatcaatcacttttaaattgcttaacaacagcttataaacatgtaggtggatttataattttgaaatggaataaagacgtctatacattaagccattaagcataaaaaccacgaaacaggcaaaaataggcattacaaaagtaaaagtcagacaacccaaaccaatttaaaaaatgctttttgcatgcatatttgtgcgtaggaagtgcaattgaacagaaatttaggcatttgcctaaaaaacgaagccctaataattattgtcattttattacttttattgatcaatcaaattacatttaatgactttaataaatataaatatataagtagaattttgccaaattaatttgatcactcaattgccaattcaatattcactataaatatgcaaaattaaaatgatcact

SEQ ID NO: 5133 - DNA, 1819 bp, Heterodera glycines
gagtaaaagttggacaaaatggtagacctggaagggaatcgaaccctcggcctttggtgcggtgatcggcttcccacccaaaccagtgctcttaccgtctgagctaccagaggctatctcccattaacgcttcccttttatggatcttttgactccgctttaagcgttttaaccgtccactagcttaatccttacaggtggatggacgatcgttcaatgagtttggtgagccttatactgtgaaagtggaaaaaacgcactcagtgaaaacattgaaatggaagatcagtcatgagattggcattttgcccaacaggcaaacactgagacataacaaccaatttgccattgtgcttaaggtatcttaacaattcgtacaaaggcaatttgtacaacacagggttggcttaggccgcagctttaggctttggctcaggccaaaatttgaggcttaggcttagacctaagtttgaggcataggctcgcacctaggtttgagggcttaggccaagtttgaggcttaggcttggccaagaattgggcttgcttggcctaggcgtaggctttatttgtaaaaaaattgttttgtacaagttaccattaactcattcttaaggacgagaaaaaaatggaagattatggcattaaaaggggccacaccatttatgtgtcggttgatgaatttaaaatttatgcgaaacgtaagcattacaatatacgctacccagtttgggtgagcagcacggacactgtgacaacattggaggaaaagttcaaggcggtgtatgaacatgctaatggttgtgaatgtttatcatttacgctgaaagaaggtccacgaggcagtaaagtttgggcctccgccaaaatggacgaattaggcattgaagaaggatcatatgttactttggatacccgttattgtgaggatccaccaagagttggtgaattttagggatgctcggcgagttgtcaacacaatttccaagacttgagaatagtgatcccgtaagttgattgagacagactaaaaaaagcccggagaaaattctggactcgagaaatgagaccgagaattgactctcatgagccggttgagacagagactcaaaaaaaacccggataaattttcgattcgcgaatttattcgacttgagaaacgagtctttcgagcatccctactaaatgcacgcagttcccgttgctaacaatgatcagtagggctctaatttttagatttttgcaaatttttcaagagctcccagtgacctgaaacgcacaaaaacccagttttttggcagttgttaagcctcctttcaaattattagtctctattttctaggttttatttttatagcctaaaaactaaaaaaattgaaagaaaaaacttattttgacttatttggtgtttttcccaaaataaatgcaataaaaccgaaaaatacagccctaagaatcgactcgaaaaattcagaaaaatacaccctaggtcggtaaattttctaaaattcatctccaaaattttattaatttatttcttgacaagaattttttggttttaaaaattatttatcttacaatggatttagcttaattttgttatctttttgaataaatttttgtcattttactccctaaatttttggctttttagtgcctattttccatttgtttagtgtctgtttttggcgatttttagaataatctaaaaattggagccctactgatcagtgaaaaaatctactccttttttgattgtccattttcaatggttcatttccattttcatccaactaatttattgcatactatcaattta

SEQ ID NO: 5134 - DNA, 985 bp, Heterodera glycines
  unsure (1)..(985): unsure at all n locations
tgcaggtcacaanaagagaaaaaaagttcaatttcaaatgaaaagggatcaataaaatttctctttgctttgctcgccctcccctcgcccattattttcctttgccttttcctttggtctgtctgtctcttcgtttgtctgttttctcccttttcccaccctttcctttcgtcgtcgcccttaacagctcacttctatagcacttctgcggttcatacacattcatattcatcatttcttgttgttcatttttattttccttttccattttaaatggtcatttgattaattccaacatttaattaacgtgggatgaaaattgaatagtaaaattgtccattaatgaattatattaaatgcctattttaattcgttaaacattttagtacgattattatcttgcacgaatccaattgtttcctatcttagacacttaaatggcactgaaacgtatacaaaaggtttgatcgattgttgatgcaaaacactgttttttccaggagctgcaggacctcggccgtgacccacccgcccagtgcagtgctggccctgtcggcgatgaccttttccattggcaagccaccattatggggccaccagaatcgccttaccagggcggcgtcttctttctgaccatccacttcccgacagactatccgtttaagccaccgaaggtggcgttcaccactcgtatttatcatccgaacatcaacagcaacgggagcatttgccttgatattctgagatctcaatggtctcctgcactgactatctccaaaggttttctttttggattagccatttaagttggtcttgttgtttctttttattaatagatgcgaatgcttgtagtgataatttaactaaaattcagagcctcaagatttttagcatattcagttctatttttgcccagcgtttaatttttcaatttagtcttgctttcgatttgctctcttctctgtgatccgaatcccgatgatcc

SEQ ID NO: 5135 - DNA, 7026 bp, Heterodera glycines
  unsure (1)..(7026): unsure at all n locations
gcgttctgtcaaatcaatacttaaggcttggctatttcttttttgaacactgtatggccatcatttgagtcccattatttttcagggcttaggcaactaccgaaaattcacctttattatttttcaagattagggaactaccgaaaaattatttttgttggcaacttagggctatttcacttaaggcgtccaatcgacttaggcatccgatcagtggacatcctcaatttcttaggccataactttttctttttctcaatgctacatttttggtatcaaacgaaagttagtctcaggagtttacaatatgatttagagaataagaaagaaatatcaatgagaaacacgaaattcactcagtgttttcgagaacaatttattatccaacagcccataaattaagtattaaacaaatggcacggtcatattatattttatgcataaacacataattagtatttcacagttaaaaagtttgaggcaattaaatgggaaatcatcgaaaatgagaagagctgtaatagacattgacaatgagattacaaattaacactgtaaaatcagccacttgtttgggcaaaaaaagcacggggacggaaaccaaaatatgtttaaactgcgcaacaatgcttgagtaagacttaattcattattctaaattcaactccacaatttcgacaatgtgagtgaactttaaattaggtataaacaaatgaaaatatggacaagggatatcggcgctacttaaatgacagaaaatgtaaattaacaaatgcaaaacccgttaagtgagttatcgaaatgcttttgggaaaaactttggattattaactttcctgcgatgaatcaatgttttagatgctaactaatcttggcacaattttgagaagagttcgtttgtcctatttctgagttcgtcgtcatcagattcctctgaaaaataagcgtaattaaagtttcataaaccacaaaaaacaaaaacaaacgctaccagaacaacatggagagaattggattcgattgttgtcgttgctgcaataaaattctggcggactgagagagttctgttgaatttgttctggttcctcaatttgctcgccggttttcccggaaaattctcctctttttaggggtaagtctaaaaaacatttccttcggaaaagacacttttgtgagtcactcacattgacttggttcagtctttggctgtgcgttcgtttcaatcttttcctcattgttcccagttccaaatcgtatttttagccttggcactttcggtggcgcctcttcctgttcttccggtggttttggcttctcctcgtgacttttccttttcctgcttttctttctgtgttccgtcgatttcacctccacgctgctatttcctcctctattcagaatcaagcgcaatttcaaagggtcgccgcctccgttttccggctttatttgacagttttttggtgttgagtgtccatttgtcaaatccacactttctttgttggaatgaaagccatggccgcccaaattcgagctgtactccggcgttacgttgttcgtccctgtccaacaagccaaacgactcagtgaaattttcagcgattgggtaggcattcggtcgtcgttttggaggtgtacggacgatgggcttggctgcggttcgcacttatttaattcctctcgttccttcttcatccgctcctccaactttgcctgtttctttttctcctttttctccgccttccgtcgtttcttttccgattttctcatcatttcttccctttctttcttttctcgtccatcctttttttcttcatttccgttttcatgggcatttctctcctccaccttgttaatattcattttgtccaatttaattttcagttttactggttccttatttacttctcgttgttccttttcctgaaaatttagcaatttgtaaataattattgcattcgttaaatttcttactttcatgaccctttcccgaaactcctcttttgaactctcttgctgatcattcaatttaatttctgcgccattttcatgagtacacaaaagtgacttcgtcatggcattgacaactgaattgttgccgtcattttccaacggtttattgtcgcaatttgacgaggaggacatcgtaacattttggcgtaaaaactcattgagaagaatctctgaggtgagcgacggaaccaatgggtcggacgaaaattctgccgatggtaatgtcgttgtcgtttcaaaagggaaatgctggggtgttgcagagggagcaaatgaatgcacggagacagagacaagctcatccggcgactgttgggtcactttcagttcgtttgatggagaacaaattacatcctaaattaattgttagagtaaatgccgaactattttttggaaaatgttctgggttgatttcatggtccttaaaaattgttcatgttttggaaccgggactgatttcccctccgtccgctttgttcattaccttctcgtcttcttccctgctctcggtgttcatccgctgggactgctccaattcctcgtcgttatgttcactttgtccgtcgtttggcgaatgttgcgcatcgctttgtccattcgtcgtgccgttctccagcgccgcatatttcggcaatgtcagacgaatgttgccaattttggctggtgctgtttcgtactcctcttctacgaatcccctttgtccctccttttggtcggtctctccgtagtcagtcatttcgtcttctgtctcttctacgattttgggcggcgattgcggcggagaaacgaacggagaaatgtccttgtaacgttctctgtcccaactgtcgtcgtattcccagtccaaaaaatcgcttgacgagttaattggaaatggaaaagatgctcctgaaaaaggaagacgagaatggcactttcaaattaaattaccccttgcttcggtggctttttggagtttggccttttcaaattcaacatccaaacggagcaaaaggttcctctgctctttcatttcgcactaaatcccgaaggtttctattcatttctcattatcagcgttttccatttccttaccaatgattctgtgaggaaaatggattggaaacgttctttcaacgaatccatccgttcgcacaaaaattcggaatgcctttgcaattcaccatcaactgaaaagcaattcaattattacgttaaaatgcgtttactcacatttttgtaggaaatcatcggacagttcagtctcggaataaagtccaaaaggaagaagccctaaaatgtaacagttttccatcagactttcaattaaatagaaagatcggcttacgttttacacagtccattttatcggaaaagggcgttttgtagtccaaagtcggaatggatgaacggagagcagaaaatgcgtcggacagtcttcaattagaggggaatttgcttaattttccaaattaccctccccctccaaactttgtcctcctcttctccctctccttctctcttttgaccctttctctttccttttcctgcgctatttgtgcttcgcttttttcttcctttttgatttgctgcttttgtgtccgaacttctctgattgtcgttgctcaaatttgcattgtttttaattattgtttaaaattttgcataaagaatttgtacaaaatgaaaatgagttgtgatggaaaacaattagaaaaaagaaggcaacctttcttttcggttggagtcacatcagcacaaacgggtgaagaaattttgagagaattggcaagaaatggaacaggaaattttggcatggaagttgaggaagaggaagaaggaaaatgattatgggagaaggaagaggcagaaggaagttcagaatggacggtgtactgcttgaacttgttgttgtctgaaaggaaaggggacgacgtattgacagaaaaatggaaattaatcgtatttatacccgggtttaagccaacggcgtttacgggcgatggatggcaaatggcttcctggggtgtcaaaagcatcaccggctgatggcaagttgaaataacggatacgggcccattcgacaatgaaacagttgacggcacgttatgcttagaagaattttgcttttaaatagattagaaatatcccccaacagagacttggcacggatatttgcacctatgccgaaccaaaaattcaactttgccaattcattgtctcaaaaagataaaaaccatattttttgcatttttgaattaattcgcgttttttattcgtgatcatctaattcttccccccccaatgtgccataatcccttgtcaccatttgcgtctgttgtgccattccatctgtcctttgtacattttgctgttccgtcttcggtggtgctttttttctcgctttgctctttttcttggtcgttgttccttgcattactgatgccgttgtgccattcccctgctgtgtcatggcattttgtaccaattcggcaattctcgcttcgcatgcccttagttgctcgcgcacgtcaatcccttgctcttcttgctgaaagatgcgttcgttttaaagaaatggcaatgcaaaagcatgaattgcctctctcagctgttttgtctgttccaacactatgccaaattcgatggtccgttgggggtcgaattggaccgtggccaggttcgagttggagaataacatcgtggcaatctggtccaacttcgtttcactggtcccctgtgcgagttcagtgccggacgatgagttcgtttggttattgttggcagaaggcttcattttggtcggccttttcgttgacttgaactgattttggtggacgagtcgaaattccatggcattttccaccctcagcgaaaattggtgttgctgaatttgtccatctcccaacacaatttgttgttgttgttcagaaaatgacggcacattttggctctaaaaaaataaataatttttgtagctttaaatattccttacattcggaaagttgttgtgaaaagggacattatgatgagactcaatggcacccgaagagcagccgtacgattgtgggggaaaatgatttgccgattggtcatggacaattatcctagccgttggaaatgctaaaaaaaccaaaatatcaaaggtttccggccaccatttaccatttgagccgtttaatttcgccgtctgtgtccctccgtattcgttttgctgttcgaattggtgccgttgtccaatgccattgtttccgcccaattgcgtcgtccacctctgctgctgcggttgttgtgcgtgtctttgcctttgctgctgctgttcgtcccttccgtttagtttttgtaattttactgcgttttgtgtcggtcgaactgttgaaaagtcgctgctcgttgttggtggccaatcggcataaaaacactctctctgcagattttgagttccgtgcccattttgctggactgctgctccattttctccctccaatgttccaatttgcgattgggtgcccaattgatggcactcaatcggcattggattaggatgaacttcttgaacaactttggccttggaagagggacagttgaccatcttctgctgctgctgacaatgactgcccaattcggtcaattgcggcactgtcccttcggcggtggcaaaaaacatttcatcaaccggcacattcagctcgaggaagtccgtttggccatggggtggggccgagtggaagcagctgaagccgttttcgagcggtgtgtgaaatggactcggctggggctgctgctgttcgaccccagccaacggatgtggctttaccacctcatcctcggcagactcttcgaaccagtccctaaaaaagcaacaaaaagtgtttctttttgaaatacgacgattgttttggggaaattaattaaaaagaaaaaacgattttgaaattaaaatgcactcactgatcaacaaaatcgtccatcattgtccgcgtaaattttgacgatgaaagtaacatttgctgcggttacaaaaggcaatggtctggacacttatcattccccgcattcgtttttcatcgcattttaggaacagaaacgaaaatggcaatttttaaaaagtaagcaaagggccgacaaaaagaattggcaaaccctaaattacaactgttatttaaagttaaaatgagaattttttaacaataagcaatgattttacatactctaaaaagtctgatcaattagttctaaactgttgcaatttctttaatctcttaatctgttttgtttgaccaaactatttacctacctaattgtttatttgttaattgattttttaattaggcaattatattaaattcgtgttcgtgccattataaagaaatgcaaaattattaatcgcacttaaggggggcggggggggggggggggaggagggaatcccaatcccctgcccacttcgactctttctgccgttgtcgcttctcttctcacaatttcaactcgttcatccaccccttcccttccctcactttcttcgccctcattagctcatcaatttctaatacgtattattggtaacaataagaaaagaagaaacgagactgaagaacaaaaaagagagggaagaggggaagagacgaacggagcgagaagagaggaagaggagagaagaacagtttcgctgttggtaatggtgaacatgaaagaacaagcacaagcacaaccctcaacaaagaagaaatgagtaaagacggaaggggcgagagaattgaggagacgcggacagagcgagagaaagggccaggcaaaaggagagagtgcagacaaacagagcagccagagaatgtgtgggctgcagacgacgagagcgtggggaatcgagcgcctggcgacctgccagccaactgctgatgaatgcccaaggggaggaatcaattgcggtggggcgggagtcggctagttgaggtgacacgcggcagaaaatggcaacaaatcgcccgagaaaggcgtgagaacggttaatagccanaattaatagccaaccca

SEQ ID NO: 5136 - DNA, 1372 bp, Heterodera glycines
aaagacgaaattaaaaaggtatgtattgtaaaattggctaacttaaaatttaatgaaaaatgccttgattaattaattttatattccgattaaagtgtaattaaattactttttgtcaaataaaaaatttaaataaaaacccatttaaataaatgttaaaattttattaaataaaaaataaaacatttttaaaatccatttattatatatatatatatatatatatatatatatatatatatatatatatattttaaagaaatatatctaataaaaaataataaatggtaattattggtaattaatttccccaattaaataaaaacaaacttaattaaaaataattaggaattaaaaaaaaagcattcatttataataatcaatttttcatagtgatttaaaaagtaaaatttgaataagctaaaaattacaattaaatttaaatttgttttcgtcagatgaaaataaaaattcaaaaatatttaaataatttttaattttattaaataaaagataaagccttttttaaatctatattattttaaatgatttaaagaaataatttaatatttaaataataaatgatattttacttaaccatttaaataaaaaccaaaattagataatataattagataaaattcttttaaaacaaaatgaattattatataaataataaatttttcgtatagttaaaatgtaaaatcaaataaatcaaaaaaataaaataatttaatttaattttagaaattttaaaacgaggatttgaataattaattaaattataataaaatattacataaataataaaaaattatttatttgttgcctgaaagtccacgtcaccgtcaagcgtcaagatgaacgtgttctcggacaacagctctcgccttcgattctcatgcactcgcatggcaagccgatagccgagcaaatagtacaaatacatcacctgtaaaaatttccaaaaaaaatagccaaaaattttctgaaaatttttcttgtgggttcggtttaaaagaatttttcaaattttctaaccagttgaaattttcgaggggctttgaatttttttgtataattttcagaaataattcgaattttccgaaagagaattaaaagggaataaaataagagaaaaatatttttgcttatttcttggacttagaatttttaaatttttttttcccctaaattttaccaattttcgcgtggctttgaatttttttttctcatttttactcacctgactccatcgttttcgttgtcggatcagccatttgtttttcagatgaaccgtcagccgatttttcccaggcaaaatgtagctaagaaatttattaaaaaaattagtttttttaactcaaatttt

SEQ ID NO: 5137 - DNA, 2162 bp, Heterodera glycines
  unsure (1)..(2162): unsure at all n locations
tttaattttttttaccaattaatgcttttaatttaattatactctttttgatttaaaattttcattacntttttcatttctttgtaatataaattagtgtttttaatatcttaatgcctaaaactaaaatttttaagaaaattttcaaaaatttatttcaaattaaaactcaaatattttttaatttaatttttacattgttaattttatattcaataaatttgtattattttttttcttattttccatgcttaaaaaactgaaaagatttcacgaaatttcccgcccccccctaccaacccggcaccggtgaacagcagaggcagccgcgtccatgcaggcgatcagttggcgcacaaatttgttgggccgcggcgtcgcggccggctcagcactgtccagctcgaacgcgtcgtcaaagaaaatgtgcgcctcgaactcgtagtagtccgggtcgaccaccttcaggtagcgctgcgcattccgtcgcgcgcattggtcctttaaattttggaattttcgtttttaagattttttttaaaaatcttttcaggcgcctatttaaaaaacattgagaagtgatcggaaccgtaccaaattttaaggaagtctaaaaggacaaggaaattttattctataatttggcttttgtttttctgattttttgaggcagttataaatgattaaattatgattttaagtctaatattctgtgtatatttctgaaattaattcacatattttttactaataaacaaaatatagattcttaccaaaaaagaattttttataaaaacataaaagtgcatcaggaaaataaaatgaactagacgaaccataaattattcataaaagaacgtggtgagccgaagtgacaaaagtctgaatgtttgtaataattaaatttaattattattttaattaaatttgctaaataattaatcataacttagcttaaactttgtcaaattaatgaaatttagtatttagcgacagctcaaagtaccctctactatttatgtaattttttaaaaattttgcataaatttacaaaaagtgtaaccaaaaaagtacgaaaaattttgacttaacaatttcgaccctaactttattgaagttcaataaaatttttcgaattttaatataatattagagaaatctttgtgctatctaattatataaataaaataaaattggttatttctgaaaaaagttatgaaagaattaatagtgttatatttttatggtcatcaaaaaaatgtaagatcgtttaaatgcatgaaaattgtgccaacatcaattaatcacactgaacttgatatgaaaagatagcccaaagatttctctattattatgttaattttcgaaaaattttattgaacttcaataaagttagggtcaaaattgttaagtcaacatttttcgtacttttttggttacaattttttaaatttttactaatttaaaaaaaaaattacataaatagtagaggttactttgagctgtcgctaaataataaatttcattaatttgactaagtttaagctaagttatgattaattatttagcaaatttaattaaaataataattaaatttaattattacaaacattcagacttttgtcacttcgccacattcagacttttgtcacttcgccacattcagacttttgtcacttcgccacattcagacttttgtcacttcgcccacattcagacttttgtcacttcgccacattcagacttttgtcacttcgccacattcagacttttgtcacttcgccacattcagacttttgtcacttcgccacattcagacttttgtcacttcgcccacattcagacttttgtcacttcgccacattcagacttttgtcacttcgccacattcagacttttgtcacttcgccacattcagacttttgtcacttcgcccacattcagacttttgtcacttcgccacattcagacttttgtcacttcgcccacattcagacttttgttacttcgccacattcagacttttgtcacttcgccacattcagacttttgtcacttcgcccacattcagacttttgtcacttcgccacattcagacttttgtcacttcgcccacattcagacttttgtcacttcgccacattcagacttttgtcacttcg

SEQ ID NO: 5138 - DNA, 1474 bp, Heterodera glycines
aacttgatcggaaaagataggacaaagatttctctattattatgttaattttcgaaaaattttattgaacttcaataaagttagggttaaaattgttaagtcaaaatttttcgtacttttttggttacactttttgtaaatttatgcaaaatttttaaaaaattacataaatagtagagggtactttgagctgtcgctaaatactaaatttcattaatttgactaggtttaagctaagttatgattaattatttagccaatttaattaaaataataattaaatttaattattacaaacatcagacttttgtcacttcgcccacattcagacttttgtcacttcgtcacagcaccataaaagaatagtcatctatactatatatataaccaaatttaagccatccaatattacattccgtgatataaatatatgcatagaaacatatacgaatattcccgagtatatcgcctgggtatacacataatttatagtttataggttttgatttccgtttatatcatcggacccaattttgtattcctatagcttgtatctttggacaggcaatgcatatgcatattcatggatgggatatatagagttcccacggatatgatccccatcagcaaataatattcattcacttcgtcaagacgcagaatggacttcagcatgcacgtcatctccagtgcactttcatgccacattgttgcgcacacataaattttgcaaatggcatcagcggcgctcggctgctccctggcaaaaaaaatatatatatttaaattttgaaaattcataaattgtaaagcgcaattttttgagtcccgagattttgtctcgctcttgagggatagaaattttcaagaaaaaatcttagaaattgcattaaaagaaaaactcgagaaagaaaagggtttttcaaaatttatatatgaattactaagttttttaaaaaaattttcacaataatcactggaaaattttaaaaaatttcttaaattcctaagatttttccagaaaaattcctaggtttcttagtcaattttcttcattttttcataaaattcataaatataaaaagttgcatcgcaaactcagcgctaccgtatcagccccccgcagtcgggcctcccgctgccggcggtcagttggctgctgcacaatgacggcactttacgcgacgccatgccaccaccggcgggcccaccaccgcgctccaccagatagtcagagatggcggtggactcataggtgcgcacactgctctccccgtcatcagtgccatcatccgtctccaactccttgtgggtgagtgaaaaattgggtcagattttggtgaaaaagttggccaaattttgatgaaaaatacgccaacttgtggtgaaaaattggaccaactatggcaataaagggacaaaatgtgccaacaatgggaaaaaatggcaaaaatatgccaattatggtgactaa

SEQ ID NO: 5139 - DNA, 1393 bp, Heterodera glycines
atggagattttttcagcgtttaaaaatttcaaccaaattaaagcgaaaaatatccatttttaatttatttaaaaacaaagggagtttgaatctggcagtggccataaacgctggcaaaacttaaaattttcactaaaatttctaaaaaatcgaaaattttcaaaaattccttacattaatctataaaaaaaaatttgcacatttttctcatatataaactgaccagcattgtgccaaccaccagctgagccaaagcagcatcgcagggtctgtccaaaattgccaatggaaagccctaaattttatggggaaaatgccaacaatttaatttggcgcttttaatggcacttactggtccgggcatttccagaacagctccttacttagccaatcgttcatatagcacgcgttttgtgtatgactgaaattcttattatttttttatttaataataaaaattttaaattattaaaaatttaaatgattaaaaaattattaataataaattaaaattattaaattatgtttttttaattataaaatttgcaaattaataatttttatattttaaattattaaatattattttaataaaaattaaaatttttaaattatttttaaaattatgaaatttataacataataaatttttatattttaaattgttataaatattttaataagaaataacattttcaaaaaatatttatttttaaaatataaattcgcaaaataataaatatttaattaaatacacaacgttctaatttgctgacctttcgcacgcatgcgcgagaagaaacacgctgagcgggccgctgagcatcatcggaaacgccatgccaacgcgttgcatcacaacctgtgccaaaatattttttcaaaaaaaaataataatacttagctaaaaattctcaaaaaccaactgtgccgttatgccttcgtgagaatggcttacttgattacttactttgcatgcaaacttggcgctgaaatggcatagcagtgcgcacgcaacttggaacagtgcaagccacagcgcgtcgtacgccgtggtgaactgattcaactccacgcgatcatcgtaaatctggtggaaaatttttagagatttgaaattaataaacaaaaaaatatatacccaaatttcaaaatttaaattttttgctttaaattaaaatttcgataattttctaaaaattttttgaaaataattttcacattgtatgccgaaatgatctcctcctctcctgcctgctcctgcatttttggtgcacgcttttccacccggcgatatgcctttttgtgtgggccaatgtgccgctgcttggccatggtcggctttgatcggttcatgagcattccctcgccgtcgctgaactgctccacaacg

SEQ ID NO: 5140 - DNA, 4754 bp, Heterodera glycines
gaaaccatgataattttttgatgctccctaatttcttaggagaaaataagaaattttataaagaaaattttctagaattttgcttttccttcaagcaaaaaaatttttttttttttaatttcagcaaataatttttaaagaaaaattttatgtgttttctcataaaatttaaatttccgcagaatttttaaaatattccccaaatttctttaaattttttttaggaatttttcaagtgagggggggggggtggatgacagttttaagaaatcgcatagatggcagttttcaagaaacacactagcgccctgaattttctgttctcgacccttgtgaatttggaatccgttcttgaatccactctcgacggggggagcggtcggagaagagattcgataagagtgccattgaagactcgaaagctctcaattacgaatggcacccaaaactgggagaatgaattccatggcacgggctcaatggctgacattcaagcgccaaattaaacaaaaaatcacctcgtcaaagcggtatccactgagcgcgtccacctccgcaacggccatgtttgagcgggcaccggcacgcgtgtaactgaaaaaatggcaaaaaataaataaaataaaattcctagtgatttaattcttcttattgttaataataataattaattaataattaaattcaaaattaaaagatgaaaaaagttgaaattccaaaaaaaaaaatttccaaatttttttgactatttatttgatcagaattcaaaattttctgatcatttttttaatcaaattcatttactgatctgatccttttttgatcaaaattcaaatttggcagtgccaaaaatgtttttctgttttacgcacttgcagcacagctccaactgcagccggttgccgttgcgcacctcgcgcacttctttggcacaataaaatggcacgtcctcccgaagggtttggcgatggtaggagtattggacctgcacaaatgccatcgatgtgccgaccgcctccagctcgacgggcgcgtccaaatttggcaactaaaaaatggaaaataattaatttaaaaaaaattgcaaaacgccaaaaacagggcaattaagcaccgagattgtaaaatgccaaaaacagccgcaatttcaagcgcgaaattttagaaaattcttagacaaaatacagtcaaaaaactcgatgaatcagagaagaattatttatgaaaaaaacaaattatcgaaataaaaaaaattcactacttttgtcctatgagcttcaaaatcggcggtaaaaaaatgcggaaaattaaagaaaaaaaattgtgtatggtttttgtacaagccataaatatttataaaatctgttagatgctctaaagaactgttttgagactcatagaaatattaaatggcaaatttaaaatcaatcattgattttttagccaaaacccaatgggtaaataaatccaaagagttgaatttaaaaccctggaaaattccagtttaataaaagtaagttagcacttagttttttaaaagtaattactaattagtaattagcatttaccaaaggattaaatctatgattgttggctaatcatagacaaaatcagtgatatttttaagatttgggcaccatttaaaaccaccaccatcaaccaccacacctcgtaactctgcaggacaagtgcgttctgtgcgttgatggtgaacaaatgtgtgtcctgctgtccattctgcactttgatgctcaagttgaaggagggcgagtaggctttttcggcatatgcccccagggattggagtgccatcactgtgtcctggggggggggggaagaaggggtttttttttgaacaaaaaatcataaaatcataaaacaagaaactgattgatcaagattgatcactggttagtccaatcaatggatttgatttgggatcacaaaaaaagcggttatctgacccaaaatcatacggaattaggcttgatcagtcaaaaaaaaagattggtcactgattttggtttgatcaatgcttcttttttaaaccacgtcatggtataaaatccaacgattaagcacatgcttgatcaagccggtttcgagattttgatcttttctatgatctagtggtgctatttgtattcagactcttctgatcaattaccggatcctttttattgcattttagcgccaaatttgaattttgaacaaatttccacctgtgtggatgaaaagccgcccagggaattgcgctgcgcggtcagccaacggacaatgggcagcgcgtgctctttgttgtccagcagcatgtaagtgagcagggcataactgtaaaaaaatgacattttcttttttggcattttttaaatgaaaatttgaaagccgataaattgagtacgagagactctctccctctctctctgtctctctctctctctgtctgtccctctctctctctgtctctctccctctctctctgtctctctctctctgtctctccctctctctctctgtctctctccctctcttcctctccctctatctatatctctctctccctccctcgctctctctcttaaaaaagtcgtccccgaggggactcaaacgtacgcgctcatctcaacgtcggccggctggggttggaagaagtactggttggtgtcccgggccgcaccgccaccatttttagctgctccaccagtgccatctttggcaccgtttgacaccttcgtcgtccaatggaccatgccatctgatcagagaaaaaagggatcaatgaatcaagcgcacatttgtatgatcgaagggagaggatagtgtcagagcacaaaatgctattatatagaacaagatcagcagcagatggaatcaaaacttcggattatgttctacaattatattagctaatcagttaatatccaggggggggataatcccgaactccgaccacaagatttcaaaattctcggaccatgtatcagttacatgcgttgatcaggacatttctagtaactaatcaatcaatatccaggggcggggctaatctccgaacctctgaccataaaatttcaaaaatttcggcccatggatcaattataaatgcgctgatcaatctgctgtgatgtgatcggtaaatttagaaagccaattacatgaaagtgatcagtcagaatcaatctatagtgatcagaatcttccaagtccaagcaagaggaaccaatccgatcagaatcatttgggctgatcaggaggaacccatttcctggcataaaaatgccaattttgtccacctgtggcgccggtgatttgaaggccttccagcatcttcagcacgtcacccttcttcggactgttcgccaaatggagccttaaaagggcgcaaaaattggggaaatgtttgaaaaattgtttttggcaattttttacacgtaagtgcacaacgccaacgcgtacgggtcctccttgaagtcggtgaggtgtgactccaaatagcttcgtgccaattccgtcactctgtgtatacagtaaaagtttaggggttaattattttttttattttaacgaataaatttcaattttttttgggttttggatttttgaatttttccgcacttattctgcacgtggttctccaacagtgcaatcagcacatatgcagtcaatgtgaagccgccctccgatgcgccgccctgcatcaatttgtggtgcacttcgccacgcttaaaatttaacaaaaaatttgaaaaatcacattctctggcggtggttttcggtttcgtaatctatggatgattctcgttttcgagagtctcgagcccaatgctcgatcggtctcaattctcggtaagaaaaaaactaagtttttgattgatcaggcttagttattgactgaaaaggcttatttattgattgatcaagcacaattattatttgatccgacttatttattgattgatcagaatggtgcataaagtgtcagctgagacgtcttaaaattttttattctcattccaaaaatttacctcaacaaaagcgccattgtccagttgttgcgaaatcaggaaggcaatggaatccttgaaattttttaaattattttaatttttttttggcattttgtgccatccatgcctcgagcactcggtcgtccacaaaaatgtacgcctgtgcctgcttgaaggagcggagcacaaacgcggtcagccatgtggagccatgttgatcggactcaccgaaggcggaaaacgaattgtcggaacgcctgggggtgtaaaaaaatttaaaaaattttttgcgaaaaaccaggccccctaattaacccccccccccctcaccggtaagtgagctctcgctggtagcccgactccatgtacttcttggccttgagctccagcgacgggttgacacgttgggtggcacgcaggtaacgcatgacgacaatgttcggcaccaactgtttgggaagggacaggtggagttgggaagggttgaaaattttcataattttagaaaattaataaacaaattaggcgacccaaaattttatataggaggttaaaatttaaaatttttaaaattttcttgatacattttgttgaatcaagagataaatttcaaacacttaaattttgccaagaaattttcaaaacaaattgtgaggcttttttgaggtaaatcccaaagtatctaaaaattttaaaaaatttttgtgcgtaaatttttttttgagttttttttttttgattaaattc

SEQ ID NO: 5141 - DNA, 1231 bp, Heterodera glycines
  unsure (1)..(1231): unsure at all n locations
tttttgtgctcacgatcaacgtccactcgagccttgcgcgatctgaaaaagtcattctgatcaaagtaaatggccaggcgtaggccaaaaaattatttaaatttttttaatttttcaaaaattattttttaaagaaaatntaagaacgaataaaattttttgagcaacatacccaagcacgtgatcagcagggaactgtagatcaaccactttgcggtacggcgctgaagcggctgtggccattccaccgctgccgtttgaggcctgcggttggctgctttccgaagcgtgggttggtgaaggtgtctgtaaatttcatggtgatgaaaatttatcccgatcaatgtccaacatcataatcagacctgttcatacataaaaaaggggggtggttcggaaaaattttttgcgaaggggggtcgggccgtccgatgacattttttttatttttttgcttttcaaaaaccgtttttttcggcgcggtttttccaaaaaattttcgggaacaggggggcggcggtgccgataggcgctgccggggaaaatttctgaagttttgggtgtgctttgttaacagattttcaccaaaaatggccaatttttgcgattttgagccagccaattttttatgaaaaattgggatttttggggtccggcggtgccgctaggcgccgcctgggaaaattttttgatttttaatgaatttgttaagaaaattttcaaaatttgcgacccccctcgctgcgaaacccctccccctcgctggctccgaccccccctaaaaaatgtatgatcctgttcattatcccccgatcaatgtctgacatttaagactccttcgatgaatgttaaacattatgatcaggactatcctgatgttcatcatcgtcaacatcataattagaactattctgtccaatgttcgacaattacgattaaggactactccaattagtgtccaatatcatcatgatcaagattatcccaataaataatccatctgatcatgataaagaaaaaatgactaccgtcgcgccgctgctcaggtccacaatcagtggcacgttgcggtccacgcggtacccttccggctccacgcgcagtgtttgctccaacgcgtcgctggccttttccgcctgccccaccacgctcagccgcagttggccaacatccgtgaacacaactgggaagtaaacggcgcgggacacaccgccgccggtgaccgacaaaa

SEQ ID NO: 5142 - DNA, 3331 bp, Heterodera glycines
aatttgcaaaaaatagcactttttacagggttttgactttttagggggactttgtttggtgcattgtttccgtcacccctccgtgccgtcccctggttttttttttgtataaaatttagctaaattttcgatttttaattttttaaggggagggcaagacgagtggttcccgattttcgtattgaaattttgaaattttcttagtagttaaggctttatagggcaaatttttcgttttttccgcactttttcctaattggcattttttgtatgggtttattcccggaaacttcggcactttttattgacattttctaaacttttcgggaagcaaaagttaccctttcttaatgctggagccgtccttttgcagaaaatcaaagccgggctggtgcttcaatgttacagtgacctgtaatacaagtttggtacggtaattacggtagtaatacagcacaaaagttgaggattaaccctccttatgcccgaaatttctcaccaattattggggaattctatagaaattttagaacaaattttcaaaaaatacaaccccctgctgattttataaaaattttttagagagaaatttgttaaatatggcattgatcagagaagggcagaaattttctgatcatttggttgtcgctttgatctatttccgatcacttttgttttttcctaattcattttgcctacttcctgctcattctccaagtagttgaacacgagcacttgcaatgccatcttttcaccacgtttcaccgcataaggcagctcaagacggacaaagaacggcctgaacaccttcagcttgacggtcgacggtgccaactgaagaggaacgggtgggtggatacggtagtggatagaatattgtgcagtacacaacggtacaccaatgagggatgtacggtaaagaaagatttggaaggcttaatgtgccaaatttgtacggcacgtacattaacatcgtatggaatcgaaatggcttaaaccacacgccatatggtataggttgtacagtataccgcgagagtaagcgtataatgtgaaaaaagcgcagagttgcgcatgtgtgttcccttcccacagggaatatggtaggaaacgggatacggtagacagatttttttgaaaaattttttaccccaagtccggctttgtcgttgatggcaaatgcggatgccacccatgaagtgatcgtgtcgggcgccttcgcatcgtacaccacctcaccgctgtcgctgaaatttgttataggtaattacgcttaatttttttttaaattttcccccaaaattccaaggttaaattaaaaaatgtcccaggaaaaaaaatttaaatgaaattttgacttttcaaccctttattgcgcagcaactcagaagcatcaatcacactttcacaaaaaatacaatataatttgcgtttttttttcaccattcaatgtcctttaatctgttaaaaaacattggcattttccaaagatgccattttgacggaatgtccatgacaattgggcaatttgtccatgttttagttttgcaatttttgcaccgctttttacagtattcaaaactccgccaacaacaacaacaccgtagtctgcgcaaccttttgccatcatcatcagcagcagtgtccaaaccggcccaaatccatgtttccgggaattccgatcgcacttttgtcggtgccgatgccgacgccagcccaaaaatgccactatggagttcaccaagtgttccataattaggatcggtcatgatgcctattgtggtcttgattgattgatcgatcagattggtgatcaacaagcaaatgaataatgatgcatgatcagcagaaacgagaaaagtgctgctgattatgaaaacggtccgaaattcgctatgcataaatttttttttctgaaatgggtctaaaatgatcagaaaaaagatcaatttatgtgtgtgtgtgatcagtgaggctaaaaaaaaagaaagaaaacacctgctgctgatcaattagcaagaggatcaaaataattgttaaggtttgacgtaaataaaaaggtgcgagatcatcacccaatcaattggtgagtgacctaattagtgtcaattaatgtcaataatattgattagtttctgacaaaggatgatcaaagcgacggtggatatgataggtgatagatgatgacacgcaaaaagcacaaaaaatgcaaacgcattatcagacacacacacagtagccgcataagatagcgagaatacacacgagaatactgttcctaccgtatgcccccattactgtagctacagttggggccttttcggcatcaaccaaaaaaagggatccaacccgtttccaattgcttaaccctttcaatgcataaacaaattatctagtttttggagaaatgccaaagtccgttttctaccgtatccaaaattctataccaacaccgtaacccgtgcaaccttttcccatcaccagcagcagtgtccaaatctgtccaaatccaagtttccgggaattccgatcgcactcgcgccggtgccgacttcggtcggtccattttcaatgagcgcaaactggcaccagcgatgggcgggccgccaaagtacgaaatgccgggattatcttccgccagcatgtacgcagttgcaactcctccaactttatttttacatttattgactgatcagtgatagagtgatcaacgagcaacgatcagaaattagtggaggtgattatgagcaattagttgctaattggccggtcccattagcattgggcagcagcaatgatcaaaaagtgttagatatgaaacgagggaagtgatggacaagtgcacagaacaaagtgatcaaaaaaaaccatcgtacacgtaaagcatgccgacaaaaggataatggtacaagggatactgtaaaaacataacccgctacaaaaatggtagaatgatatcccaaatagaacagtatgcactgcgcaaaaacggcatatttctgcccaaatattacaaaaaaccggcgcgaatatggccaacaatgtccagttattacagtattcccgcacaaatacgcgcaaatcattgtccaaatagtgcggtatgtactgcataaaatacggtaattacctaaccatcgtctagtagtattacagtatgcctctgcacaaatacgcaaattaggcactcatcaccttggaccagctgggtccagcaggtcggcccatatccacgcctccggaaagtatttgcgctggcgcggtgctggcaacagttgtggcaccggcgcggtaaagcgtgacaccatcagtggagcgtttgacttggact

SEQ ID NO: 5143 - DNA, 1465 bp, Heterodera glycines
  unsure (1)..(1465): unsure at all n locations
atcaaggtggaganagtctgatcaatcaatcgacaatcaatcaacgtccaacaatgagtgatcagtcaatcaaccaaaaaatcacgcaaaagtgatcaatcaaatacaataattttaatagtggaattgtgctaattgctgcaaaggaacaccagggaagtagtacgatggttgagtgaatggcacgcaaaatgccatcagaaggatatacactatggcttaatagcatacggtcagagccatactgttcgaagcaatacggtaattaatgtacgcgcttctaatatggtaataaacgctgttgctatacagtaatgtgtgcgcggctgctgtcctactgtaacctgttgctgggcgtgacaaccgcatccagatccgcccatatccacgtgtccggaaagtgtttgcgcagatgcggcgccggtgcttcgcgaagcggctgcagcgcctggggggcggctacggcggcggaccgtgccatcgcgaacatcaccactgttgtgtgatcagtgtgtgagggttgtgatcattgacgaacaaattttgatcagtttttaatcatagcaatcagaaagccacagaatgatgagagaagcggataattgaagaggagaggttgttaaaggcgaattcacaaataatatgctgtaagcaccacaacaccacacaggaacagcagagagcacacacaacggtaaagcaacagactaatagagcatgagcacatttggggaattctacggtagcgcgagcattgacatacaaaaagtactgtacaagcgcttttcaagaccgaaaagtgttcaagtgatcgcgagagcaccagaccacacaaaaactgcggaatattttctcgagaccgactctttaaacaccgatcagtcattttgatccaatagagagaagcaagggggatttgatacgatagttggaaggattaatgtaatgggagggctacggtcagctggcgcaagagctaatcggaggccgaaacagtcaaaatgtgttgactcaaccggaaatggcatacggtagtgtacacctacagacgcccgcgtcatggtttggtacggttgaaatggcacacactcgcgagtcaccttggcgtcgtgccgttggcggcggcgtccagatcaacccaaatccacgcctcggggaagtgcttgcgctgggcgtggcggtggtgccaccgacaacaaactggggagaggacttcctgacattggcctgaagcggcatcggcgggcccggcatgccgggctgctccttcagcttgcgctcctcgccgccggcaaaatcggtccgcatgtgcatgtacatgggacggaagcgccagtgccctgtagggttgggcatgggaatccagtcagtccaatagagactttctcgcatcgaacaatttcaggtagtccccaaaatttcgagattcccgagccgataaatgatgtcatcggggtgaagaaag

SEQ ID NO: 5144 - DNA, 2461 bp, Heterodera glycines
ataattaatttggagttcatagggagtcaattaggggggtgattagtaaacttaaacatttactcgtgactgagatttctcgaattttccaattcaaaacaaaaataccagaatttttctcggacttcgacttgaagaagggcaccacaaattcaaagtgtcaatttaaaatcacagatatatccccaattcaaattttaatgttgattaaaaatgccaaaaataaaatgagagatttccactgacaatagcgttgtcccggcttcagcccttcaattagtgcccgatgggtgtatcgtttcgttttctcggtgccaccgtccacaaaatagtctactgtagccggcgttttgcgcgttagctgactgtactggtcgccccatacgaccagcgagtccaatgtgtcgtcaaaggtcagccaagtgacccacaactgttgtaaattaattaattaattagtttaagaaattaattaattaattagttaatttaaaatcttcttaattaatgaaaaatcttggaaaaaatatccatagctatgattatcaaataacaaatttcaaggacataaaattatttcctaggaaaaaatgtttagcttgtgataaattaaaagttttaaatgttacattattaaagaatgtattcgactttttaatgaacaaataatcttgggtgcatttttcaagggtattcattgaaaactgttagcaaaacaaatcacaaaagtggaaaaatgctatttttataataaaataaaaataaacattttacctttgatgggtcactggcataagacaaatggacttgttctggttgtccataaaatggtccttaaaacaaacaaaaacaaacaataaatacgcattaaaagataaattaaattaatttcaaaatattaaactaataatccatctttattaatataaaatgaatgaaagtaattaggctactttaattaaattaattatttttcttaatagttggcaggctactttaattaaattaattaatcacaaattttgttttaacctctattaatattgttctccactttccaatgtggcactctgtttgggcttagcacaattcgattttgctgctgcttttgttgttgttgttgttgttgttgtttttgctgcttttgccgatcagcagtgattaggccaaccgactgaattagcaggaaaatggtggtggtgccgacaatgaatttaaatcccatttttttcttcaaaaccaaaatttcaacaatattttgaatgggttgaaaaattcatttataaaatgatcaaaaatgcagtaatatatttattttttttctccacatgatcgaataatcgattttgtgtattaattaaaactttttaaatttttctgggctaaataaatgaaaaattgggcgaaaacatggaaaattttcaaaatatcaacgaaaaatccaaagacccataaatgatgtgataataaattgtgagggaaaggaaaatgattaaataataataaaaatatatttttgtcatgcgaggagtgcaaaaattttggtgacaaatctacgacggcaaaattcccattttatcaccaccaaacataaccaaccaaccccacgaccattcaccagccagagcccacaattctcaattagatactaatatgtgataattttagttgaaaatagttgacacacaagtgatgaaattgataaaaaaaaattgtgattggaaatttttcctagaaaattttaagagacaaaaaaaaatgaaaattggttttttaaatgtataaagtgaggttatctatctgtcatctgtgctaaattgaaaattaatagtttcatgttttaaaaaagtattgcagtaaggaacaaccccatcttttataataatgaatttgttaaaaaaataaaataaaattttaacaattattaattaataaaacttcaggaaaatgttattttcttttccggacagtgttatgtcgaactattgtagaaaaatagtgtcaatttttttttaatttctgttatatttaaacaaaaaaaacctttatttttcaatattttgactttatcaggggcggccggccatcacattcagtggtgccgattagacaccgctagggaaaattttttttttgttgaatataatgagatttattaaaatattttgatcaataataaactttgagggtttcccccctccccaaaaaagaaaaacaaaatgcctcatttttacaattagtctcatcgtcctctcaaaaaaaaaaaataggccatatagcctcacgtctgaagctctctgctgacaaatgaggggcagttaaaatttaatcaaattgatgcttaaatacacattcttctcaaagttttgttgcatatccaataaaaaataattaaaatttacataatattaaataaaaatcattagccagaatactctaaattttttttaatattttaaaa

SEQ ID NO: 5145 - DNA, 6043 bp, Heterodera glycines
  unsure (1)..(6043): unsure at all n locations
taaattttaataatttttttattcgaaatccaacaaaacttttagaagaatgtgtatttaagcatcaatttaactaaattttaacatgttataattaaaaaattaattaaaaaaaagcataggaatttgatttttacacttttctcggaattccgtgccatccctgctgtgtatgaatgatttcgtttaaagtctttttcggttttcattttgcgattatttaaatataatataataaactcaaaaccaaaaaaaaaacattctaccggaagcacttttggctaaacatcaaattcaaatgaatttcgcacaaaacgtgttctacttcaaaatttaaaatgcttttaaatttaaaaaatgctttttaaagcatttccggtgccaaaatagcactttaaaagcattgaaaaattatttgtttacatcgtcatcgttcatcatcacttcatctccctcttcaatttcttcgtctccgccggagggaagaagaactttgctgccttttgtcaataatcaaaattttgaggcttcaatttttttgaaaaatcttttcttctatgtattaaaattcgttttattgaaaatttaaatcatttttgtagaccatgattagtacagttaagtgaagtgtttaatgcgactgatcaatgctttgagaattctgatcaaaatatcagtcacccgttcctcatgaaaaaaaacttttttttttaaatcgtaactagaacattttaaaattagatgaaggagttagctcgcttaattgttgaacttagtatattcgtattaataactgaacatataaaacttcaattcgtttaagaaaatgacagttattctgtttaaaacattaataagccttaagcatagccttatgaaaattctcaaaaacaaattaaaaatttctcataaaattttggcattaaaaaatttctaactactttttttttcaatatcattgtagaactgattgcaattcaagtaagcagtttgatgagtgtgcgttctgatcagaaaacatagcaaaaacttttcaaatccgatcccgtcaaaatttttataataataaaaaaattttctgccaaaaatcacaaaatttctctcaaaattcaattcagtgctgaatgagtggtgaagatggggcttaagcctccttactaatcagtgtgagaactctgatcacagcaaaaaaaaagaaaacatactttttgcccccccccctccccttaaagcgttggttggttggagtgcttcatcatcgcaactccactttaaaaaattgtctccaataagtctcccccaagcccccggccctgggcttcatccctcccattcatttggcccccaatgtttgtccaaaatattttcttgacgacgacgacgacgaacgctgcggcgatggcgggaggacggaatattcagaggattttttggggggaggggggccaatggttgggccttaagtaaaggctaatgtttcaggcctagccaaatccgcttgatcgattaaggccgaattaaggagggcaaaccaaaaacaaagtacaaacaaaacaatttgccaagtctcgcactcagtgctaacatgttttggaattttgattaattaaaaatttgtcaagcgaggcttgtaatttgccgagactcgagactctaattaagttcatgatttaaattttgggcctcgagaaccgtgcttttaatggcatgactaggacagtggatcatgcatctacagtgattattttttgtcgtgcatttttcagtgctaatatgtaagcgcattaaactatgagatttgaaatgttttttaaatcccgaaaatttactccaccaacaggcgagaaatcaaaaaaattttagttataaaataatattttaatgtaatcttttattaatgcaaaattgttattaatttactaatttcttaatccaataattgcttattttaaaaaaaaattaacaaaaaatggaaattgtcaccaattaacatatttttatgcccatttgcaaccgtttaaatttgctctatgtaaatagtgcgggagaccacaccacggccatttcaaaaatcaattcgttccccttttcaaaattgttggcccctgagcgctctttagacttgtgccaacaaaaaattttttccatttttggcacaaaatttgctgccaaaatttgcaaaaaaaaagtcactcaatttgcttgtgatttatttaatggtttggttttttggcatccattaaaatatattaaggttcatcccgggtccattgggagcaaaaattaaattttcttagaattcttggccgatttgtaagaaaattttgcaaacattttgcaaaaatttataatttttaatcatttttaatattttatattgctattaatggaatatttataggaaaattttcggttccctcccaccaatatcttttttttttgatttgcatttaaatggacacacatgctttttccaatacttgtttcttgaaaaatggaaacagaaaagtacaaatcaatttttcctattaaattttgcaaattttttaccgtaaaaatttaaatcctttttttgaaatatttatttaggcttttaaatatttaatttgttattttgaaaggctcactatgcatttttgcccatttctcatgcctttagtcaaattattcacaaaactttgcccaaaagcttagatcaaatttccatggccaataagctgctctgggaaatttcaaacaaaaaaatatttttaaacattatttaaaattgctgttgtttattctttttctgagatttatttgtgagagaagaataaaaggaaaattttaaaatgtaaaaaatatagaaaaggaaattttttgctcaattatatgtaaattaattattttattttatttttgctaaattatatgctttttaaaataaataaaaatgtttaaaaattttaataaaatattagaacatttgcaacatttatgttattttctggggaaatttgatatgcacatatgttgtgagctaatctgttcatttttttaacttttttaaaactttgctctcgatctttcaattgttactaaagaaatattgaaaatttaacaatttgaaaaaaatttaaatattgtagaaccaccgagaaaatttattaaaatttttaaattaattcaaaaaaaagttttactatcttaatttctgagcggagcagggcatgttcagttacaaaagtccaaagttataaagctccaaacttgtcaaatgcacgtcagacgcgaccaccgtgccaaatccgttaatcgcacgatttaaatctcgtttataaaaactactaatcctaactgagataattccttagaacgtctttatttaatgctttaaatttaatttttgcagcattttttgaggcttttaatgcttcaattattaagcatcggaaagacgttccctatctttaaaatttatttccaaagctcttccattcacttgttatgaacattgataaagctaatgacatcatttgtggtaataaattatttcaaaataattttgattttttcgacaaaaataaaggtaattagaggcatatgattttttgccaaattttataaaaaaaagtcattgttgacctaattgctaaatttttattggttgatcatttgaatttcatttctaaaatataataattcaaattaaaataattttaaggatttatttatttcaaaattaaaatattttgttggcggcactgaatgggccacaattttaccatggtggagttgggctggctgtgtaccgcgctggtgtcactgatgcgcaacagttcgcctcccctggtacacactgatcagaatgcgcaacaaatgctcaaactgatcagtgatacaaaatgctcaaatagcaacagtacaacaacaacaattaacggattgtctaccgtaccaactacagtaggaacaacagctacagtacagctgaatgctgcactgcttgaaaaacttataaggccaggcgctgctgatcagcaggtcagcagtaccgattgaaactgggattccaaccataattttttgggatttggaatgaatttgggatttaaaatttgcataaatctttaaaaattaaaaattaagtcccaacaaaataaaatttttgctgacaaccaacgattgcttgactggcttatgacatttgtgtacatgcttatttcaatgtttggcataattggcaatatttttggtatgttgtcgagaaaaaaaaaattaatttgattaatattaattaagtggtaattgttgtacgaactgtgccaggaatggtatgtgttttaatttatttcaataaaatgggtttaaaaatctgaattctttgaaatatttttaataattttagagataacaacctactaaatataatgagacaattagagttttttaatttaaaaattttcgtttgtctaaacatatttaaaaatgccatgtttccgaaacgggaaagcattatccagggtagttttaggcgctaatgaaggatatggagtatgaaaaaaaatcatgctttttcgaaaaaaagccaaaaaaaaaatttgtctatttttaaaaatcaaaaccatcggcatatcggcttaatttagtggagtgtggcataacgaaaaagttaccaatataaaagataaatcttttcaaattaatcaaagatcactccaaccaactgttatttgatgtcattggcaatttccgattgcatttttctgctttctgctgcaccggttgagctcagctttttgcacgttgattggtacgcgtttggctccattggctgcaaagtgctctcatttctcccatttttgggcataaattcgagtaaaaataaaaatttatttaatctttgatttaaatttaaaaatttgttcatcgttcatcttttatttaggttcaatgtcaattacggcatttactgttgagcgattcattggcatttgttatccattgagggcaaggtgaagaaaacaaaaaaaaattgagatattctaaaattattttttcaaaattatgttacatatgaaaaatatttttattttaacttaatatatttcaaaaaaattagaaatatttattaaaaaaattgtctaaatgacaaaaaaaaaaccaataaattaaaatttatataatgcaaatatgaaaaattattttcattttacttaatttgtttcccaaaaaaatggtaattttaatattatttaagttaaaacgaagaatgaacatattaaaaagattataattaaaataatttaaatataaaaatgaaaaaaaaaaaacaatttttttttattcttttccattttcgatacatttgtacggtaaagcgcgcaaaactgatcattttgttcatctggtgcttctgtattctgtacaatagtccttggctttatttggcaacactaattgttgacgaggacactatccaatgcagttttcggcttgaacgggacgattgggcatataaagttggcacaagcaaaacaaaaataaaattaattaaataataaaattatataatttttgaagtattttaattattcttcgcaattatttaatttaattgcttttctaaataaaaatttttaaatggatataattcagtttatgagttcaatcaatgactgacttatcctcggttattaggccataatttttagaaaaaaaaacaggaaattcagcattttttcgagtatagttaacaataaattttttgtcaatgaactattatattattattatcacataacatttttattttaaaaaataataattaaataattaaataaaatataattaaaaaataacgcattaaatgccgattaattttcggccatatgattcatcattttcaggtgatgtttgttgccgatttctcagccttttatcttattccaatgatcatgaacacatacatttatacaaaagttagtccaaaaatactaaataaataaagacaattaattatgtatttattttaaaaaatttatttcaganttatatacacatt

SEQ ID NO: 5146 - DNA, 1356 bp, Heterodera glycines
ccggacgcgatggccgggctgcgcatgacgcgcgctcgcctgcgccaattggaacgcattgcgcgccgccgcattcccaccgcgcggctgcgaccgattgtggggccgaaaacatttttggacatcaattacggggacgacgaagaggaggaaagcacttcagcaaaactgccggggcagcaggacgatgagggagacatggactacaccccggcaaacgacccgaccgcaccaacggaacgaagacgacggaggaggagacggaaaacgaagacggagggggagaagggacaaacggtgagcaacagatggggaaagtcatgggcaagagggacggtgagaaaggcaaagtgcggggacggttttcagcgatgtttttgaaaattagtaattattcataagaaagatttctaatttttttttcttgaaattttctttaaaaaaacaaaacaaaatgcccttaaaattccaaaataatgataaaatttaattgctaaaacaggctgacaaagtttcttattcgcagatttacaataattgttttctcactttatgtttttttagcaaacaaattccgaccgttcggcttctgagtgtgatgatgctgaagacgcgtcatcgtctatgcgctcctccgacacggactttgtctgctcggacatggacgaacaacagcagccggagcagggaacatcacaatcagcaacagttgagactgaacaagtaggagatgaacaacatcagaagcaacaacgatgcacacatgacgaggaagaggaggagggacaaagtgtcgaatatctgacaaaagtgggcaattaatgatcaattaatcaatttaagcaaaggatatcgaaaatgaatgtcttttgtcatattaacagaaaacaattttcatgcaggtggacaatccgatctatccaatcttcatcaaatcgttggccaccgacacggaaattgacccggaagttcgtcagcaactatacgatgacggtacagtttgctgttgtttgttgatcaaggcgagactgaattcatggctatgaaagggggggggggggggcttccccttcggagtttgaattaaaaaatggggatttttaaaataatataccatcttatttagaagacaatgaccccgagtacgtcttcccggactttgacgatttgtgtgatgagcaggaggacgaatacgaattccgacgggaccgagccaccgaaattccgcgtaattttttatgacaggaatttaatttaataaaaatttttatatttgcctttcaggttgggagggtgaggcgcttgagcaggactttgttgaggacggggacgaaccaagtccgttggaagtgccca

SEQ ID NO: 5147 - DNA, 7380 bp, Heterodera glycines
tcatgttctctgctgaatccgtcaccaacaatcgcaccagtggagctggacgcactgaaagtacagcttgaaaaggtgggaagggaatgcgcgcatttttaactttgttctctcctcccatttcaaccttttcagcacgttcagcttctctgccaagccattgtgggcacgtctcaatatgccaacttggtggaaccacacaacaaatctatgttgatgctggtcagtgagtcatgattattaatttttaattgaaaactactaaaatagtgaaaattgtttaaaaaatcgtttcagagcgaattggacggattgtctcgcgagcgtggcgccaaatcggcgtttaacgtgccgacgctggaggcggccatttacagtgcgcacgacatcaaagcgtgccgcgaagtgaatttggcattggcatcaacagcggcagcagaaacgaatggcgatgagctccaacccaaaaacactgtcgaagtcagtcggattgaaatcaaattgttttttggactaatttatttagggtctcattattttttaatccgtcggtaatttctcgtaattaatagaaatgtaattgccataatgtcaccgcgtatactcacacttttttctaccgaaacagctgctccaactcaaggatgagcagcggcctagcaatgagaccatgtgggtgttgtcgcgcagcggtgccgtccgttaccccgacctgttgtgcccgtaccggttcagcagtgccgaagactgtgataaattgcagtcctcaaaaatgggtccaacgcagcgatttttgcattcggaacaggcagaaattactaaattttctgggccgccgaaattttttttcaaaattttcaagaaaaatctctgtgtttcagttactgctcgccatcggtctctaccaattgggtggtgtccagtcacatcggaatggcaaaatgcgcaaccgttaccaacatattcagcagtactttctgcccacaaaacgagtcgaccaaattcgcaatcacattgtcagcaacacaaattagcgattagatctaatgacaatggctaattaattcaaacggcgctttgttttgtgtggcattggcccatttttaattccaaaaaaaaaaaaaaatcaattttacctattttaatattgcagaaaaatgtgcattcgtccccgtcaccgaccatttaccaccagttgatcatgcaggcagaaaagggccattttccggtcacttatcggcccgatttgggcgaaaaagcccagcgaaaaacgccaattgaatggccaacgaatgtgcagccctattggcttaaagtgtgtggggatgcattaagtcacttccgattttttaatcttttaatgcaatttaaattaaatttttccattttttccccattttagtggctttccaacctgctgggcaaatgccaaacccagatgattatggtcgacgatggtgacaacactgacaatgatgcgggtcaacaattgcatggcgttttcgaggcattgaatggcactgatcagccttcttctcctcctgcccctcctcctgctgctttcgcttctgctgatcatctccatcaaccggcatcatctgacacgtctaattccgaagcccaaactgctcaaaatgtcaaagttgagaatgcaaatcgccaacgacacgtaaaggcgggaaaaaagccgaggatattggctactgctcgaaaacgctgcgttcccacagcaacgggagcggcaccatcaacaacttcaacaatggaacagagaaaggatgaccaacagcagttggacacgacgacaaccgtcccgtacaacaacaacgaagcggccaccgaactgcttggagacgttttcattccaggggagcaacaacagccagattttgtggacgtggaggaggaggaccatgtggtgggtgtggagacccggtggcggaaacgtatacgaacagcctcgtcaacaacaacggaagacggggcaagtcgcttgagtggtgttgccgctgctacagatgttgctgaaaagggaggaacaacgccgccgacacaaacagttacagcagcagcaacgatggtaaacaacaacgccagcagcaggaggaattgtagcagtgcagcaaacggcgccggtggcgcagaagccgccacattgtcgacgatggcgcagatgacagcgaaaagcgccggcgttgaaaatattaatggcactaattgtgccgaaagtggtgtcatgcctgccgcaacagctacgtcgcaattggtgcgtttatctatcatttattaaattggaattgtacctgaaccaattcggaagatttatggcaccattctttttcagcaaaagaagtcacggcgacatgaacgggccgagcgcggaatggccgcgctgggcgacgcgcattcgcttgagcaaaccgaacgggcgctggccgccgcaatttacgaggacttcggcaagcgaatgttcatgcatcaggcaaatttgctcacttttttcttgccacttcctcctcgtaaatccacagacgttttgccctctggcaatattcgcaaaatgccattgtcgccatttcaggacaaattgcgtgccgtccagcgcgtgttggccactgctccaccgccgcgttatgatccatcactgtctgctgcttgctcaaccgcacaatctttcgcctctctatggcaactgatgggcctcacccatccccaactgttccatttgttcgccgccattgcgcccgaggcgcagctgccgcacgcactgcgcgtcgacccgcactggcaggcgtgcaaacgcgcgctgcgcatgctgaagaccatccatgtgcgtttttgcttgtagtttggtcggttggcagcccaattcgggaattctcgaacttttcttctcgtcttggtgccaattcctgacacaatttcgattctcgatcagacttctagggccattcaaattgccaatttttcagacttatttggctgcgagtcgaacccttgcccagatgaagcatatgctcaaattcctcaaagagagtgagttaatttctgtttatgtataaaaaaataaacataataatttaatggaactttgtggggtcaaatttatagatttttttgcatttttttgttattttaatttctttcttaatacaaagttttcatctttgctattgctcttccactgtttcttttgttagtttccgtggacatcacttctgagcaacagtttttcgaggctcttcagcgccaatttggggttagggacgagccgttgtggcggctgttgcgacgcgaatggatgggcggaaaatttgttgaaaagtgggtttattgggttagcacaaaaccaatgtttaattttgagttcagaaaactcgtttcaaaactatttaacattagagcaaattggaatcaaagcaattctcaaacaaaaaataattttcagcgtcgaggattgggagtacgaatttgtggacatggacaagcagtaccagcagcaacaacaacacacgagcgaatgcgcaacagtttccactgatggaattggcaacggggacaagcagcaattccagttcgaacatgtccgacttccctaccgacgcgacccgtccgaacgcagtcgccttcgcgtccgacacggccgcgtcacggcggaactgaacggacggttgtgcaacgtgtcaattggtgccaatttcataaggggggggggcactgatttcaattacatttgccattgtttaagcctgtgcttcgtcatcttctggtctctcctcctccgactctttgtcggttgttgaacctcagcagagcaattgtccaacaacaacagcacgtgccagtgtggacaaatccaatgaactgcaaaagaatcgctgctgttggacccgaaaaatggacatggaattaatgttggcctacaagaatgcgggtggcgatcagtaagttttttaattcattctttacggggcaaaaaatgttaaaatgatggaatatttactggactatggactgtatacaaacttttgggtgttttagcaagaaatgtgtgaacgccttcctacaccaacgttccacacaatccaaaattggtgaatcggtcgtagcagaagacgctgaaaaacggttggaccaacttttgaacgtggccaacacattgaggaggaggaggagggagacagaagaaagggacgggaaatgatctcatcattttacccattttattgcaaataaatatcagtcaaattcaaaaattgtctgtcttttcccgccactgaactgctcttcaaaggtcggctttgtattggacacgcgtgtgcaccgtgtgaattgagctggagaaggagcgcagctgcacctgctcggcattgtcaatgtggcactcgctcgagtcggcccagccctgggaaaagcaatttttattggcaaaaaagtagtcattgtttaacgcaaaactgtgacatttctgtttttcgccacggtgttcataccacacgattggttggccctctgctcacctcgggcagttcagtgtccctgaacgtgtagacgagcacgtcgaaggagcagcgctgttcaagcagaggcagaaaggcgacagaagctgtgatttgcctaaatgaaaagaaattggaaaaaacctcttgattgttttttaggctctattccaatttacgcgtccaaaggaagacgacactcacaaagcggcataatttttcaaaattgccatttttcgtttgggggacaatggtctcttcagtccctcctcccccatgtctacgcccatagtaaatacctgagcacgtcactgatttcctgctttattcgcttctcatctttacttccatagccattttcactgcaaaaaaagatggattcaataattggcatttcccgtcccattttcccacttttcctacccctccggcgtcgtttcgatgtcaaattgccatctctccagcgcttctttgctggaaatgtccgtaatgaccagcaccaacttcttcagcatttgtttggtcaacatcgtctaaaacgtaattaaattccattcgctccaaatttgtctgaaacctcaacgtgctgaaggagagggtttaaaaactgctccaacttcgggtctttgttcaccagcagcgtcatcccgtactttttgtcactaaaagaaaaatttaaaaacaatttttgcataattaaatgggtaaccgcgtaaaattgtcggatgggtaaatgccgcgctggtagagaatgctgtgaatgccgtaatggaagaattgctggaccatttgtgcggaacccttcagagtaatcgaatttttggtggctaactccgtcattgtttgtacttttcttgtagaaatatgctcaggttggagtcactggctaaaaaattagtttcgtacaattatgaaccctctaagagttggttcaaaaacctagttactgtttatctagtgaaaaaaggtttttttgaatgggtcttaacaatccgttctaaatttattttctaacaggttatctgtttattttatttaaaattaattcttacgctaaaaaacgtcaagcatgaaacgccaaatataattaacataattttgccgctaattttaaatattgttcaatgcctttttatttactttgattactatcagccataactcgctcgcttcattcccatcgagatttacaattaggaaaaaggtcatttgattatcattttattagggaataacttttgttaaagctttgccgctccttaaaaatgattccgtcgatggtaccattgacttctctcactgagatgaatcgattgaattataaataaaaagttatctaaatcaaggtgtcaattattcttggcttttacctttttttacagctttcctaaacattaaataatcacgctaacatttcacgaatacaacttcagcattaaacagtgttgaattgaaatgacatgccaaaccggaattcgtggtatgtttatttaaaaaaagaaattgtgaaagtttgacaaattttagccgatgaaaaactgttggactttttcgagcagtgcaaacagtgcaaagtgcgctttggcaaaattgtcattaacaacggttcgtctcatttttcaacattttttagtggaaattccgcccattttccctcctttagagcgtctctgtgtgaatcacaatttgaagccctcaaaagattggcgcaaagattggaaaaaatggtgagcaatttttttcgaatttttctaatatttttttttcagtttgcccgactgtgtagatgcctatgagccttgctttttgcttttccgtttcgactcgagccacgattggattctgatcaggcaatcaaaacggatgactctgaccatttttgaatggtttgtctttctttcagtttttccgacgacaaagcgtccacacgcgacaaaatgatgttggccgccaccaaagcgacgtttaaagtgccacaaataaatgtggcattttcatttgttttgcccccttttcagtcagagtttggccaatcgttcgttcgtgccgagtaccaaattagcaaccgaaatgagttggaattggaccaatttgagaagcgccatctccgggacagcgaattgcttttggtgctcattttggaccccttataacaattttggagaggcttttaaattgaatttaaaattctggtcaaattggtaaggtgtcagacgacaaaatcactacaatttgaaaaaacattttttaaatatttttgaaaatttaaaactttgagaaatgatttttggagctttttttattccttttgaataaatacgaaatttctgttcaaaaatttaagtgatgcatttttggcacttttaggagggcgctggtgacggcgacgcggcggcggaggacgcgcgtccgctttcctttgtcgagcgcgagctgagcgcggtggccaaagagcgggcgaacattcccttctcaatgcacgcctcgcaaacactgcgcggtgtccaatttccaattgaccaggcgaggcggacgagggggggggggggaaggcaattattgacggaaaacttttccaaaaaaaaaaaaaatgaattttcgattttttaacttttaaaagcagaattattgggagggggaatagcgcataaaattttaaaatgaaattaggccaattttggtgacaaaatctgctacttcacctcacaggtcacacattttcatgaaattcttcacaaaaaggcaatacccgtaataaaaaataactcgggaatttgtttttcgcttcgttttactaataaaactcggtatttttcttagaattttagttcatttattaatttattggctcaaaaaatgacaaattttgggcatattgggt

SEQ ID NO: 5148 - DNA, 1764 bp, Heterodera glycines
aaactttttggccctgtttaaaagaggaattaaaaaattttaaaaaatttttattcatcttcctttttgatagaaaaagcatcagagagccttatttaacatgtaaatagaatttggtgcgtttaagagcactttctgaaaaaataattatgaattaattttgcaaaaaataaataaattgtgaacctttaaaaattcataggaaatttaaattcataggtactactgctaaatcaacgcagagacgcctttccttgacctttttaggctcctgcaaaacctggtgcacttctgatcactactcgaaaaatgagtaaattaattttcactaaaaagttaagcctaaactttttggcctgtttaaagaggaattaaaaattttttaaaatttattcatctccctttttgatagaaaaagcatcagagtgcctaaaatagcttgtaaataaaatttggtgcgtttcagagcactttctgaaaaaataattatgaattaattttgcaaaaaataataaataattaaataaaaacgaaagactctgattttcgaaaaaatttttaaacccagctagctcggcgctcatttcagtgtaagttagtcctttaccggggagtttccctgcaaagtttggtgcgcttctgatcagtttctgaaaaaaaaagttaagcctaaactttttggcctgtttaaaaaggaattaaaaatttttaaaaatttattcatctccctttttgatagaaaaagcatcagagtgcctaaaatagcttgtaaataaaatttggtgcgtttcagagcactttctgaaaaaataattatgaattaattttgcaaaaaattggaaaagtacgcaaaattgcaatgtctaaaatttttaaagaaacattatgggacagttaaataattatatgaataagcattattctcagctgttaccctgcaaaacctggtgcgcttctgagcactactcgaaaaatgagtaaattaattttcactaaaaagttaagcctaaactttttggcctgtttaaaaaggaattaaaaatttttaaaaatttattcatctccctttttgatagaaaaagcatcagagagccttatttaacatgtaaatagaatttggtgcgtttaagagcactttctgaaaaaataattatgaattaattttgcaaaaaataaataaattgtgaacctttaaaaattcataggaaatttaaattcataggtactactgctaaatcaacgcagagacgcctttccttgacctttttaggctcctgcaaaacctggtgcacttctgatcactactcgaaaaatgagtgattgaattttcactaaaaagttaagcctaaattttttggcctgttttttcttgcaaccaaggtactgactcggccgcttcgcggcctcgtggggggccttcggcccccccccctaaaatagcttggaaataaaatttggggcggttcaaagcactttctgaaaaaataattatgaattaattttgcaaaaaataataaataattaaataaaaaccaaagactctgattttcgaaaaaatttttaaacccagctagctcggcgctcatttcagtgttagtaagacctttaccggggagtttccctgcaaagtttggtgcgcttctgatcagtttctgaaagaaaaagttaagactaaactttttggcctgtttaaaaaggaattaaaaatttttaaaaatttattcatctccctttttgatagaaaaaagcatcaaagtgcctaaa

SEQ ID NO: 5149 - DNA, 1593 bp, Heterodera glycines
aaatagaatttgggtgcgtttaagagcactttctgaaaaaataattatgaattaattttgcaaaaaataaataaattgtgaacctttaaaaattcataggaaatttaaattcataggtactactgctaaatcaacgcagagacgcctttccttgacctttttaggctcctgcaaaacctggtgcacttctgatcactactcgaaaaatgagtaaattaattttcactaaaaagttaagcctaaactttttggcctgtttaaagaggaattaaaaattttttaaaatttattcatctccctttttgatagaaaaagcatcagagtgcctaaaatagcttgtaaataaaatttggtgcgtttcagagcactttctgaaaaaataattatgaattaattttgcaaaaaataataaataattaaataaaaacgaaagactctgattttcgaaaaaatttttaaacccagctagctcggcgctcatttcagtgtaagttagtcctttaccggggagtttccctgcaaagtttggtgcgcttctgatcagtttctgaaaaaaaaagttaagactaaactttttggcctgtttaaaaaggaattaaaaatttttaaaaatttattcatctccctttttgatagaaaaagcatcagcgtgcctaaaatagcttgtaaataaaatttggtgcgtttcagagcactttctgaaaaaataattatgaattaattttgcaaaaaataataaataattaaataaaaacgaaagactttgatttttgaaaaaatttttaaacccagctagctcggcgctcatttcagtgtaagttagtcctttaccggggagtttccctgcaaagtttggtgcgcttctgatcagtttctgaaaaaaaaagttaagcctaaactttttggcctgtttaaaaaggaattaaaaatttttaaaaatttattcatctccctttttgatagaaaaagcatcagagtgcctaaaatagcttgtaaataaaatttggtgcgtttcagagcactttctgaaaaaaataattatgaattaattttgcaaaaaattggaaaagtacgcaaaattgcaatgtctaaaatttttaaagaaacattatgggacagttaaataattatatgaataagcattattctcagctgttaccctgcaaaacctggtgcgcttctgagcactactcgaaaaatgagtaaattaattttcactaaaaagttaagcctaaactttttggcctgtttaaagaggaattaaaaattttaaaaaattttattcatcttcctttttgatagaaaaagcatcagagagccttatttaacatgtaaatagaatttggtgcgtttaagagcactttctgaaaaaataattatgaattaattttgcaaaaaataaataaattgtgaacctttaaaaattcataggaaatttaaattcataggtactactgctaaatcaacgcagagacgcctttccttgacctttttaggctcctgcaaaacctgatgcacttctgatcactactcgaaaaatgagtaaattaaaaacgactaaaaagttaagcctaaactttttggcctgtttaa

SEQ ID NO: 5150 - DNA, 1289 bp, Heterodera glycines
ccccccccccccttcagagcacgacatatatttcaacaaaaaatttgaaaaattgactagagaaatcgtacgctaacggatgacctaatggaaaaaaatccccgaaggagagaatttaattaaatccattccttcgggggtccgtgccgggtgccgcggggtaagcagtgctggtttcgtttcatcacggcccccatccttttgactagtcagccagcgttgcttaacttgtcagatcggacgggtacgcatgtttccacttttccaagcaccccaccgaaagttgaacgaaataaccaaaatataaggaaaaatttaaaaaattttttattctttagccttattcataatataagcctaagaggaccttgttaacatgtaaataaaattaggtgcgtttaagagcactttctgaaaaaaataattatgaattaattttgcaaaaaattggaaaagtacgcaaaattgcaatgtctaaaatttttaaagaaacattatgggacagttaaataattatatgaataagcattcttctcagctgttaccctgcaaaacctggtgcgcttctgagcactactcgaaaaatgagtaaattaattttcactaaaaagttaagcctaaactttttggcctgtttaaagaggaattaaaaattttaaaaaattttattcatcttcctttttgatagaaaaagcatcagagagccttatttaacatgtaaatagaatttggtgcgtttaagagcactttctgaaaaaataattatgaattaattttgcaaaaaataaataaattgtgaacctttaaaaattcataggaaatttaaattcataggtactactgctaaatcaacgcagagacgcctttccttgacctttttaggctcctgcaaaacctggtgcacttctgatcactactcgaaaaatgagtaaattaattttcactaaaaagttaagcctaaactttttggcctgtttaaagaggaattaaaaattttttaaaatttattcatctccctttttgatagaaaaagcatcagagtgcctaaaatagcttgtaaataaaatttggtgcgtttcagagcactttctgaaaaaataattatgaattaattttgcaaaaaataataaataattaaataaaaacgaaagactctgattttcgaaaaaatttttaaacccagctagctcggcgctcatttcagtgtaagttagtcctttaccggggagtttccctgcaaagtttgtgcgcttctgatcagtttctgaaaaaaaagttaaacctaaact

SEQ ID NO: 5151 - DNA, 4672 bp, Heterodera glycines
tcctgcctgataggaacatgccggacaatcacctccccgagtgcttggtcccgaattgccgtgacgtgcaaaaacgacggtttcgtacaaatagcaatttacgatttcaactgttctccagaaaaggccgattggccaggttctccacccgggctctaacgaattttgtgtggccctcaatgtcccattaatttgaaccattttccccgcagatgattcatcaaaatccttcatttttcggcacattgccgtaggcatttcaacgttttctgttgataattcctcgtattttcccccaaaaaatccaatccttctggatatttttgtcttgatgcatttacatgcagttgcctttgttttgtactttaccgtatttactctgtatacgttcaatttcattgccacaggcaattccgttggtgtccaacttggacaaatcgggtcaattgggattgaccataaagttgcgggagaatcgggatggcaaatcattgggctctccaccgaatttgtcgcaaaatttgcaccaaacaatgagagaataaccattaatgctagaaaaattgggctagcaatccttgcggctcctattctttggccaccaaatcgaactcgcctccccggcgactgagttcgttcattttcatattcccttccttcataagaaattggtgaccgatgattatttctgccgtggctcggcctgttgtggggtgagaagtgccgttgtcggtgttccccctcatttcctccatagttcggcctgtcgtggggtgaaaaatgcctatgccggtgttctctttcatttctctcataattccattttctttccccatagaacggtcggtccctttgaccaccatgtcctctcctttcttcgtcccttttcttgtctctacaatcctttacaacatggcctggacgccgacaatagtaacagacgcgccgttctattcctcttttaggtacagaatgttggcggatggccaatgcttcaactttatgcgacaattcagcgactgaatccgccaccgacacttggttagtccgcttagtggcgagaagaagctcaaaatgttgagcaatttcataagcgtttgaatagctcgttggcctccccgccttgacctcaaattgtaattcgggggttaatttttcaagaaattcctcaagaagtcttcttcttattgtctcttcattttctcctgatagagcagttctgactgcctcatttaatcggtttgcaaactcataaacacgttcgcccggtgcttgtctgcaacttgccattgcctgcctggcaattgaccgagtattttcgttttcaaattttctttttaaatggtttagagcatcagaaagagagacaggtgagggttcaattgagtcaaactcggctcgggcttgtccactgagcaaaattctcaatctactcaatttttgcacttcagaatactgtgggtatagtgttagcatatcctcgaaacgtgcaacccaccgtgagaatgatacacttgggtttccatcataaccctcgaggggggtaattccccctaaaaatggatctgcaaccataatttcgcaacttccgtccccaattgggatgttgtcttccccttccgttgcccctttgtcatcaggcaatcgattatgttcttgggattgtccgtcatcaaaccattccccaaatccctctggattatcttgttcaaattccaacagttgtactcggccttttagaacatccaaattttcggtaattttccgaacctcatccttcattttttcaacaattttcccaaatcgaacctttgtgaacgtctcataacgttccatatgattacttacctttccaatttcttcctccacttcaataaacttttctttggtctcaaatgtgtccatttctgtaaagttctcgagttcctttatcgaactttccaattctcttactcggtcagcggtgtcctgaatctgaatttgactcgagatttgtgaaaatgcgttctcgattgttcgaaattggcgacaaactgccagttcaaatgctcgcattcgaccaagtaaatttgcccatttctcattttcttcgggcgtgaaatgaacgggatcaaagtccgatccgttgttaggtgaaatgttgatttcactttccattttcaaattcaattcttctttttttcacgtgttaagcacccagctcgactggaaagtacacacttttgaccagcctttttcacttcttttttttaaacggcacaacagcccggctggaagcacacagctttgaccagctcaaatgttccttgcttttttttcccggcacaaagcctgagatgccccttaaaatactcttttaggggtcccgggtcgtggcaccaaaatgtgttgtgtccgtacccaaactctggacttttcccggttacttttcagcaaggcttcttttaagacaatttattaaaatggaaatcaaaagtggaaatgcaaagttaaataaagaatgatcgctttttaaatagtaagaaaacaaagccaattgttaagtgagttgtatcgctttaggcagggaacctgagtcaacgaatgggtgagtaaaatcctgaggataagagaataagcaaagacttaaataccaatgacaaatgggaggggccaaacagatggaattacacaaaattgtttggaagaatattttccgatggattggacgaaggggtcacttttatgagtgagtgaggagcagaagggccagggaaattacaacataggaaatgtcaaagaaacgaagaaaaaaagagaaacaaataaataatggaaaaaatgaattaagccaaaaatgcagatccaacagttgttgtccgaatttccgtcgtttccccatttaatcgccgccttttcactaattgggcaccgtttcaacagccaataataagcgttctcctttattagtgtcaacttttctttggtccattcgttcaccaattcaaatggctcctcaattgatgatggaggcgagaaaactccaaaacgaattttgtaactgacagaagaagtgcgggcacaaataaatttctaaacaaatgaaaataaaaaaaattgaaaagcaaactaaatatgtaggtatttattttaaaatgggtgcacttcatttcccctcccccccacgtcaaaatttttcgggggggggggggggggggggaacgatctactccctttaaaaatagctcaaaatcggaaatttagccatttttagacgaaatcggttgacaaatcgcattaaaaactatttttaaaaaatttcccgacggcgcctaacggcaccgccggtcccattagtataccgatttttttttaatttttttttagaaaaaagcgtgccacaaaaaagggatgtgaaaacgtaaaaatggtggtcgtcaatgggttcaaaatgccaaaaatctgccttttttgatcaaaatttgtttttttttaaataatttcttggcatattattgagcagaacccgaaaaccattttcgtgatcagcacattaattcagcctagaaaaatttcaagggggtgacaaaacctacaagcaccgttttttttttgttggaaaaagcgccgcaaaaaaagttaagttgccgccggagaaaaacctttgtatgaaaaatcggtcccgagacacccaaatatgatgagaatctgagcacaacaacaacaacaacacctctttgaaactggtgatccattggaagtttgttcttatgctattttcgcaaaacaatcgcttcggttggccatttggtgtcggcgtgtgcacccatttggacaacgcttggtcagcagttgcatttggcccatcatcacaaagcccatcatcagcagggcacacaaaatcggaatcgattgaatgcaactgattgagatcagtgagaattgtgggtgaaatgagacgccgcaaattgtccaaatgatcagcattggaaagggtcaaatggcgaatggttgtcacaaaaattggccaaatttcacggaccaaaacatcccaaatgtgctgaacatcagcagcagcgttatggtgtgaagaaggcatccacagacgcaactttgtgccccatcggtcccaaatgtgcttgttggcatggagaaatttgatcacgaaatggtcaatgtaactgaaaaaagggaaaggaaggactacgaaacatttactcattaattagatggatgcatttcatttcccgttaaaatcttttttttttaatttgcaaacttagaaattcttcaaaaaaaaagaacagagttagggatccgagactgaagtgtccaaatcccacggggactcaattgtccaatgtcttttgagtctctctctctctctctgtataaaatttgatttaattactcaatccgaaggaaatgaaaacgaattttgttgtgcagcggacggtacggcaacgaaaaatccactgagtggaaattagacagtatcagcacagatagtttcgggtttggtccctcttcaattgaaatggtattccgaagcgtcaattccggtttgccatcgaaatgcgtgtccaccagcgcatcgaaacgataagaaagcaatgccattttgagtccaagttggggacggtcaaacgatggaagaatgtccatccaaacatcgttacaaatccagctgaaa

SEQ ID NO: 5152 - DNA, 1056 bp, Heterodera glycines
agagattaaccatcagaaaaatgaagtactcgttcaatgtccgcgaaattcaatccctcctcaacgggttcatgtgcattttcaagccccgtgatgtgtccatttcggccattgaaaagttgctgatgcgccgcatttgtgagcaggcgaactgcttggacccgtgccgtcctttgcccaccattgaaatgccaattgttgaagcccacccgaagagtggtgcattggttgtggttggaagaaaaaaacaaattgactacaggtcggtaaaattcgatttatatttgtcctgtttttttcggaaatttaaaaaaaaattttttcgtaaacatccaactaatttgatggttgttttccattttttgaatattctcacaaaattcaaaaatttcagcaaacatccgttgatggtaggccagatgttcaggcccgaagacatgcgcattgaagcgctcaattatttggagccttcctgctcgggcgtatgcggtaaattcaatggatattttctttttttattatgacaaattgtttggtctacattttaaaattttttcggaatggaattttagacatttctatggagaatttattgaaaataaaaagggggactttttggatttacaaaaaaatgacacaaaagatgggatccaggccaggattgagtgaggcccaaatcatttttcggtaacctggatttttttgggttttgtccaggaaatctccaggtgtacaacattgaatccaagtctagttttaggcttattttcaaatgtcgaactctattattgagttcttactctttagaaatgccccctccccttttgtcagtgtttggtctgaacgacggatgcgatcagttggagaaggtgcgggacagagcatggctaaatgaatacattttggagggcgaattgggccgagaaactgtggagcaccaaatccggggcaaagttgtgtcacgcgaaaaatttggtaaaaaaaatttttttttttttgcgtatgaaaaattatattttttagaccatgtctctttgcacaaaatgaattgcgtgc

SEQ ID NO: 5153 - DNA, 1686 bp, Heterodera glycines
  unsure (1)..(1686): unsure at all n locations
tttatgagtttacataaggacaaagtcaagacaaagcacaaagatgattaacactgnnatcagatattcaagcggagcaaatattttncgtggaaaaaaaaagattttatcactaaactttattttttctccgttttttatattcaatntagactcatgtttgtattttgtccggcgacgcaaatttattttaattttgtagattaattattcattattatttttttatttctataattcttgttcagataaactgctcgagtgttatcagatgtggcattattataaatataaaagaatatgattttttatatttattgtactaattatatttagttttgtggttttgtttatgttactttaaaaataactctctttatcatgctgttatagctgttatatctgagtttatatttgcaaacctaataaaataatatttccttaaaattttatattaaatattcttttgtcatcatgaatttcatgttcataataaatgaaaattcgtaaaataaacgcagaaatttgggttttcaacaccaatctcaaggaatgattggaaaattatgtttttttatgaatataattttatgttttattcctatattattgaccaattttctttcacacttttatatattattatgttcttattacattaaatgtttaaagttttgttgtctttataattttaaaatgaattttaactattaaaatattcacgttttaatatcacataattgctacggcaggagttaaaggaaagaaccagacttaaaataaatttatttaaattaatcaattattattgtgtaatatattactatattgattttatattcttattaaaaattatttccacttttattaaaatactcagatttaatattgttaatttattttataatttaagatttaatctaatattttatttttaaatttcttggcattgcacacataaatgttgcgaaaatttgatgttggcctttcttgtttcatttttctttttatactttgggatatttatgcaaaaatgaataaggtttgttaatttgtttaaattattttttaattatgattatctttttataaattttaaaatttagataatatttttaattttttacagtaaataataaatattcattaattacttttgccttttgattaacaatttcatgaaaatttattattaattttttaaagttatttttcttaaatataacacaaaccttttcattaattcccaatttagcctttaattcaggggtgtgatcaaaaaattttcaaaataagaacatcaaggccaaaaaataagatttttgggtccaaaataaggacattttgcaaaattgcttcaaatcagttatttctacaattattcgatcaataatgtatcaaatattatatttttgtctcccattaacgattttaacaattttggggaggaaattagcaaatcataaaattttagtgcattcgggataaaaaaataacaattttttgcggcgcatttttccaaaaaacttttgggaagtgcgagggagngggggtccggcggtgccgataggcgccgacgaaaaaattttttgtaatttaattctcgatttgtgaacagattttcaccaaaaaaggccaatctttatgcgattttgagccaatctcttttataaaaataaggatttg

SEQ ID NO: 5154 - DNA, 929 bp, Heterodera glycines
ccgccgttggtgtcgtcatcgcgcggcgaggcgttgtcccccccctgtgctgcaaccgttggctggtgccgttcgccaccggtgacgtgcgtgccgtccttgctgctgctaggttcgtcgctgtacaccgactgccgacgtttgctcgccttggtaggcggaggcgatcgcggctcgtgccgttcgtcaccagtgatcacagcatcatcatcattatgattattgttctgatcagctaatgccgatgctgccacttttgatgatgccgcctttgatggtgccgctgttgatgataagcttgacgtcataccacaactgtctgacgcccattcgtcgtcctcacattctgctgccttctctgctgcaatcatcagcaccagttgaggtggctgctgatcagtgttgtcatccgtcttttgatcactggtggtgccattctcttcctcctcctcctcttcctcaaacgtgctcacattctctcgcttcgcttcttcggcacggagcagcattggcggctgatcgtgatcatcgcaagcacccccaatggcactctctcgcacaccgtacgcactctctcgctgcaccgctgcggcatccgcagccaatgatggcatttgatcagtgcggcggcatctttgatcgacgctcaacggcacactgatcagtgtggctttcggcccagttttccaatcaatttgttcattgactgtagacatgccatgccctttgtctgctgccatggtggatgtacgtgatggagaagtgttcatcaccagttgagcttttggcggtgccaataacatcgaaacaattgcacttgttgttgatgttatcgtcgttcccgttggctttgttatactgcttgaatcccatgtcgttgctgctgccgctttcgtcatccttggtgttgctgcactacttgaacttgc

SEQ ID NO: 5155 - DNA, 1612 bp, Heterodera glycines
ttctgaggatctgaaaaaatttatttttttgaaaaaaaatcaaattttgtgccgagaattgatgataagagaggacgaactcgaacttgaactagagaatcgggagttgagccgaattctcgagaccacaaaaaagagagtgatcaaaagtttcaggattattttgaacaaatttctaataaaattctttaaaatttcaaaaaaaatttcccctacggcacctatcggctccgccgggcttcactgtattattattattttttgaaaaagcgcgccgcaaaaaagcggtttgaaaggcaaaaaagaaaaccgtcgattaacatgtccccggacccttcccaaaaattcggtaggccttccccaccctttttcttgtataattaaaccagtgattagtccattgtctaaagctatccaaaacaaaatatgaggatgctgagatcaatgccgtccttgccttaccaattgtttctgctgctgttgttgttgctgtggcactttttttggtcccatcagttcactgaaatcggttggcatcggcattggcagccgctgtttgttggcagcagtgggggccattgttgttgcacatcggcggcaccggcacaccatgattttgatgataaagccgctgttgttgatcttgatgatgataaagcggctgcttcgtcaacaaaatggcgctggcggtcggcactgtggcggcagccgcgccgcacagtgaggaggacgagttggagtcgggcgagtcggaactgccggccggcgacggcaagctgtccagcgaggccaacgacgagccgcaacaggacggactttggtgatgttgctgttgttgggtggtggtggtggcgtcgaacatattctgaatatttttccaaaaatcatgactaagcaagccaacacttctgtataggtagaatgagtgtttaagagttgatctgatcaaaaaataatgacagtgatcagcagcagcaacaacaacaacaaagtccaatcaaattattatttctttttttatacgcgtaattggccctctctctctctgatcaaaaatggtttgatcgcgagaccggaaagagataaaaaactttaaaaaagcaacatcagcccctaaaggactcgaacccacagacgctttttcgtccaaagcacaaaccactagacaaagaattgacagtgatcacgtctgatcatttgttttttgatgggactgatcacgtctgatcactttttaggagactgatcacgtcagattcacttgcttcaggtgactgattactctgatcatggcctattatttatttgatcatttattctacctgaaatgtgttgcttctgatcgtgctggtgacgttgttgttgtatgctgaaaatgcactcgttgaacttctgttggcggagtttttgctgaacatttggtgcaccagcggagtcagcggaggcaaatcggcggcattggcaaactgatcaaagcttgtcgcttcatgagtggtgacgacaaaatgctgctgtaaaattttgttttggaaagaatattactcattattaattagataaatgattcccgggggagaaatttttatttcaaagcgacacatttataaattaa

SEQ ID NO: 5156 - DNA, 3758 bp, Heterodera glycines
  unsure (1)..(3758): unsure at all n locations
tcaaaaaaaacttatcaaaattaggggggggggggggggtgatggggaggaactccgatcagcagcagtcgatcgatgaccatgaactattttggagtaaaatttgatcaccgcagcctaatttggttgagaaaaacaattctctgatcaccacggccttcaataaaaaaaccccatggaaaaggcggttctttggggtatcaaattttcaaaaatatggtaaaatggagctgaaatagtgcctataggtgccgccggggaaaatttttggaaattttaattaaatttgttaagaaaattgtgaaaattgggagggggtgaggcacacccatggcataatttgcttaaaagtgacaagattttacattcttgggattgttcgattgcctagggtttttttctaataggctgtaaaatttcaaaaaaaatttttggtcaactttcgaaaaattgtattaaaatgaatactatttcgaccataatttatatattttatttggaattttatattttgcaggataatgtagagacaggatttttatgtgctaaaaatttgcacaaatcgcgaaacagaattttctaactcagctcattgttttcagaggagtttgaaattttgcatgaaaatacttttacataaggccagacactctgccaaatttcagaattttttatgcactcagattttataagaaaatccttctttttccagcctctgaacgccaacttggtggtcaagatttaaaaacaggcgattttttgtaaaaaagttttaccaaaatgaaaattctgaaattttgcaggtgttatgactcatgtcaaggaattttcatgcaaaatttcaggctattctgatactctgaatcgaatttaaaaaatcaacttgagcaaaattcaagtttttagcacattaaattcgtcccctgaccatgacaattcaaatagcagtcagtaatgatcatacgaattaattaggttgggaaagaacagagatcactccgatcaacgaagaaactgatcagctctcaaatcaagaagtttatgtatgtgtacatcttttggatgggaaaggaagaattaaacaattagctagtgatcactcacttctccaaccaccagcagatcaatgaaaccgcaattttggatggggaaaaaaggaggggggggggggggggggaccaattgttgcgcgtcaacaaaaaaccattctgatttggatcactgattacgaaaactacacaatctctccagtatctgatcacactgatcaatttttcagttggtggtgatcaagtccaatttttttcctttgggggtacaaagcctcgaaattttaaaaaatttaggcacctttgcctactccccctcctcgaaatgaaataattttaaggaaaaaaggcattgataaaaagtctccggcatatgactactaatcattcttcatcttcagattttgatttgctaagacattcccaagaatttttggctttgccccaagttaacgcggcgagagaaaattcgatcgatcatattttcgggtgttgagatattgattgataactacgatcagatcagcagtccgtacctgatccggcaccgacgaaaacgatgccatcggtttggcggcacagaacggcgcggcggcgaatggtccggcagtacccggggcggtgccaaattggagcggtgccattgttggaaatggagacgatgtggtggcggtagcggcagaagccggcggaagcactgccggttgatgctgaagggcatggaacagtgggaagggcgagggcgccagaggaagcagcggggcatggaattgctgaacaaaatggcattggtaagtaacctatccaagacctccctcaccaaattttttcaaaaaatttcgctaaatttttccaaaagtccggaaaatatgaaagtgattgaaaatggcatgggaaaggggcataattaataaaaataaattaattgtttaattaatttttgacaaattgtttttagagaacgggaaaggagtcattataaaaaaggttaaaattatttttattataaggaggcactaattaggggggggctattaaataagtttattgaaataagaatttttttataattatttggagggggggggggaaaaagatggcacacatttggaaatttcctccaccagagaaaggagttttaattgtcgaaaagcacaaatgggtatttaattttctgaaatgctcctaaatttttccgaaaattttcgcttttaggggtcgaacaaaaataaatttttaatattttcgtgccattctcacagtttgttgttgctgctgttgttgttgaagcatgtattcgcgttggagtttctgttgcatcagcagctccttcatgtacagctcgaccatgttcagactcatgacgaaaataatttaaaaacaaacaaacaaaaataaattaaattgaattgcccctgtaatgaaaaaaaattattaattaattatttgatcacaaatcatatttttggcgtggtaaaaatatgtcgggatcgagtacggtaagttgctgagattttgtactgtgtaagattaatcagcgaagggataatttgagttgtataaggtaaaatattatttgtctaggatacagtaaatctctgtcgggacttgcacggtataattttcaaaagatcgaatacagtagtttgccataacgccaaaatttggcatggtaaaatatatgtctcagttcaagtatctgtaaatttgacgtcgggatttagtactgtgtaaaatttatcagcgatgggagatctgattgaatactgtaaaattgtcaagatatttagtacagtaatttgtccatgacgtcgtaatgtttggtacggtaaaataatttggccaaaatttgagcaggaagattaacttactcattttctgaaagcagcaagcacaaagaatggaaatgaaaatgccattcgtagccaaatggaacacgccttctattacggtcgacagcacttaaaatggcacggcatttacaaaccaaaaaaaaaacagatttttgtatttgacactctgttggcaggttgttcccatgccattttggcattttctcatggcatttcattaaagtttagtagaccacaccatcatactaattagctgttggtgtcagtgctaatgagggggcgtgaattttgagtatattatgatacggcaattaaatgcgctaatgtgacaattatttttggcattttaaattgtcggcatttcctcccctctcaaattttcggtttttcatttgggaaaatttattttagtgattttttttttgcaataaatatgaattttaaaatgccatggcgcgcttttctcacattcattcttctctcatttgatgtggtgggaaattttataaatttggcaattttaattagaaaatgaaatggtttgggaaataaatgaacggttgccttggcattgtgccaacaatgaaattcaccgggtattttaaattttttggcattcaaaaatttcttaaatgaacaaagaatttgatcatgaatgtgtctgattattagtggaattttctgtcagcgtgattttgggacagaaaattcaggaaatttgatcggagcctgactgatcactcggcgtatttgtttgaagtgatcaatggctctctattcatgatttgatcggatctacaaccagaagtctgggccnaatggttttggcttagtagccgaagccaaacctcggcat

SEQ ID NO: 5157 - DNA, 935 bp, Heterodera glycines
agtagccgagccaaacctcggcatggagccaaattttcgtggcacgatttttcgaaaattttggaatttccaagctgatgatctcgagtgttcagatttcatataaatatttaattaaatggaccaatggttgggaaagttattttaatcgatttgaataaaattagttcggaattatatagaaatataattttaatttatttgaattgacattaattcaaaaacagaaattatttgatgataattttatttaaatataagtaattaaaattttatttattttaatttattttaggtaacatgaattaaaattggttgattctttcccgtcgattaattgctaattaggcaatgaaattaattaacccaattagccaaaagggcaaatggatgggaaattgtatccaaattggacagtgtattttgttcattatgtttttctgatttggcaaagtgtaccaacgccaaaaacaaaaaaatgcgccttaaaataattatttttgtaagctcgattaaccccgatctgaaaagaagcttttgcccaaataagccataagcaaaaaacatgttttgcagcgattggcaaattttggtatttaaaaaaaaacacggaaataattgccatttttgtacagaaaaaataaggccaaaaccctaacccatcacatccgatttagggagcagctcaattaaaaaatatatgaaataaaatatttcaatggcaaatgaataagttttaaataaaatttttaatataaaaaattttaatatttgaaaaatggaaggaattggcattttgttaagcaaatcatatgaccgcaacccaatccagaacatccgattttgaggtcagctcaaataaaaaatatcaaataaagttttgttgcaaaatgataaaattttttaaaattatatttgcaattaattaatttgca

SEQ ID NO: 5158 - DNA, 940 bp, Heterodera glycines
aaaaaatggaaaacaaaatgccaaacaaaaaaaatcaaattagccaccagacgattaactgtggaaagtattacctaacatatgctaacaaaaaaaatttcatgtttacacaaacacatgtatggcacataaaaaaattttttgatttttggcgccaaaagaaaataaaaatattattggaaaggaacttttaaaaaaacttggaaaatttaaaagccgaaaaacaaaagaacgaattgaatttgttaaaaggtttaacgaagattgtaaaggataagaatttaaatgttgtgttaagcctataaatgattttaagattaatttccaattggcaatgccagcggattgtcgcaattaattaaaaccctttatttaatattttgaaattttaacaaatcgaagagagaaaattgaaataattatgattttttaggtgtaaaagtgttcaaaacaattttaatgggaaaattaaatttaaatgggtgggttttaatgacataattgtaaaaagaaactggctaatttttattattttaaaaattaaatttccaaaaatattgctcagtcactgatttttaatgctgctgaaaaaagaaactaaataattttattgcgcagaaattggccacgaaaggttggcccaattggcggcaattcgcagaattgaaaagccgtgaaaacatttcgccaaattagcggttaattaaatttcgaatgaacagatgtttaacgtcaagtgtttatgtgcaaacaaaaaaagcaaacgcattggctcatttgtggaaaaataaccttattaattaactaaatagtttcattttttattttttaaaatccaaaaaacatccaacaaataaaatttttattaaaccaatggcataaaattatgtcaaaaagactgtcagaggtttaaagctcgtcggggagaggggggggggga

SEQ ID NO: 5159 - DNA, 941 bp, Heterodera glycines
accaccatcgccacacagtgaatttagtgaatgagccatcagcagccatcgacggcttttgacgcggcgccaacggattatcccttcccccagccgcccctaatcagctgatgtgttatggcgctaatgccaaaaaacattacttactcttcttggggggggggggggcgaaaaggcacaccacgtagcagcagcatttttggtcgatgaaacatgtgccgcgggttacggtatggagaaaaaagagaaaagtgcaaaaaacataaactggaaaaaatagatcgaggtttcatactgtaattaggggataagcgattacggtgggaacgagagtggaaaaacagagcccagaatttgaaatgaccgggaacaggagattgaaaatcgactgggacgggatttcccgggttcacgtttttcctgaacttctgctggtccggtgtttggcccagaaacccggacgggagtccggaaaattcacggcggaccctcggtcccgtctgggctctactggcaaataattttgtgaggctcggaaagcgagaccgagaatttatgaatttacagtcgagaccaacacccaaaaactcgagaattatattcgtgtcgatactctcgaagtcaaacattggataaatgtctataaatttatgaaggagactaattctaagcagatggtgattatgttaaccttgtatgtgtgtgaaaagaatttggcgataccgtagtatagaaatgcattctttaaggatacgataattttatggattgtagcggaacaataatttatttaaagttacaaaaaatgtatgataaataatattattccggaataagatgcacaaaccataaactacatattacagtacctcccccccccgaggtgaaaagcttaacgataataatgaaaataatgactagccgagattcaaaaaatatat

SEQ ID NO: 5160 - DNA, 1629 bp, Heterodera glycines
  unsure (1)..(1629): unsure at all n locations
aaaagatgcatcacaatttttctaacatgaacattaaactgtgcacttatttgttggtccacccaaatcaaaaaaaaaaatttttggaagtgtgccagtaaattgaaaaattcgcaaaccctcgtcgtgctcgtccgtatcgctctccttggccttctgcgctgtcttcttcggtgggcgtccgcgcttgcccgtgcctccgcccgccggtgcggccgccttcttcttcgctgctgccgatgtgccggtgccctttgggcggccacggccgcgtccagtcgctgctgccggcttgacggcgttctttgcggcgggcgagccctttgcctaaacaaattttggatgaaaacatgttttggtggtggacatgcgtaattgatggtccggcattaaaatttgaaatcccaaaaattaaaccggctgcggtggtgaactcggaggcgatttggctggtgacttggacggcgacttgggcgccgcttttgtggtcgctggtggtttcttggcaattgttttcgctacgccgcccgccttcggtggtcggccacgcttcttcgctggagcggacggatccattcaaatatgatttgatattattgctcaaaaagttgtttaacaaattgctgaacaaaagttttaaaagaaaaaatggaagtagtgattaatttgaaaaaaaaaattggaaaaaatagcaatgcttggatttggtccaagacatacatgcttaaacaaattatgaaatctaggtcagattttttagaaaaaatgtccagccttatagaaaattgaaattttaagtaaaatttttcccattaagcaaatattaaacaaaaattatgaaggaaaatttttctcaaaaaaaaaattattattcttttttcttcttttagcaaaattttttataattttatttttaataacatatgcttctatgaaatataaaacataataaaacatatatcaaaaagatatcaaaaaaaaattcaataatttggacggaccattttatgcgaaaattagagaaatatgaatgaatgcaaattgtcaacaagcgatttaaaaagagtgaatgggagagtgactcttttcatgcaaattaataatgccaattatttttcaaacttaattttagtgcaaaatttagcggaaatttaaatttttctctcaaattttttctcactcgatcagcaataaaaaaggagtacaaagtccattatttaatgggaacacccccagcactttcactcactcatcttcacagacgaacccaaccaaccaccacgactctcattcatttttcattatcttaacttcatttactaaagatttacccagggctgccatcgtccatgctccgttttcaaggacgggttgccgatttgcaaggacataatgggaaaaattcatgaaacccaaggacatttaaaattttttattatatacaatgaaaaatagttaatatttatttaatggcttgtatttgtcatcggaatggatttttccaacctttttttgtttcggctgatcattttcctcatttgcgacgacttttttctgctttaaaaacgcatttttttgcgccgcgcttttgcaaaaaattttgtgggacaggggggngggggggggggt

SEQ ID NO: 5161 - DNA, 6100 bp, Heterodera glycines
aaaataaataatatatatttagtccctttttcatagtaatcaaagttgtaaataactgcctaataaaatatagtaaatcttattgtaaaatgctgttaaggtatttatttgctatagaattcgtaattaatgattatttaaattatgccagaaaaatctgtcaaaatttcgaaaactcttaagtatgtttcttcattctataattttaccttaaaaaggcgaaaagcattgattgctaatactaacaagcaccgaaataatacacactcagttactaacttataattagtccgtattttagagtgataagaaccacaagattagctgaaaaatttcagaatgcaatttctgtgctaattaatataaagacctacctgttaatagcgggtaattgcatgagaaaatatattttaaattatttcgataaatacgaattacagaaggaaatttttttacagtttcagcttttgcattccaatcagggctggctgtgattgaatttccaatcacggaaatccgtgagccgtgatcacggggcttttaaaaaaatccgtgacccgtgaaccgtgatcacggcaccccaaaatccccgtgatttccgtgatccgtgagccgtgatccgtgattataaaaaaaatttttctaatgattttttatttaaatttatttaaaaaacggaatttaatcgcgggaaaaattcccaaaaaatgttttaaagaaacaaaacatataaaccgctttttttgcggcgaccatttccaaacaatgactaagtttacgatttttggcaattttttgaagaaaattagagctttttgtagaaatctccaaggaaaaatttttatttttaactaatttattaagaaaatttttcaaatttttcttaaatttaaccaaaaatctatttatgtagagaaaaaaaaatttcctctaatttgtaagctaacttttgatgctgaaaaaaatcttttggaccaacatgctcagtccttcatgacgatctgaacaccccaaaagatactgaaagtcgggaaaattttagaaaaaattcttagagggttgggaaaattttctgaaaattttgattaggcctgtcgttttaaatttaagcgacggagagaaaaaatagggttttagcagtttatatgccaaaaatggtaatttttctgccattttggggtcaaaatttcaaaaatacggtaaaatgggggtccgtctgccggtggtgccgacaggcgccgccgggaaaaattttgaaattttgagtgaatttgttgacagattttgtccaaaatatgtccaatcattggttaatttattggtctaaggacgttttaaaaaataaagaaaaataattttcaatgttatgaaatttcttgttaattaaatttcaattaaaattatcaaaacaaaatatataaattgtcctatcccaatggggaattgaacccaagggacagacaacgaaagaaagaaggcttaaccaccagactacatatatatgtttactttataatttgtaagcagcggccggaaaaaaaattgtaatttttaatgcgatttgtttacagatatttgtcaaaaaatgaccaaaatttaaaattgtgactttatgtcataaaatttcaaaaattctcaaccatgagaaaaaaattacattttcattgacataatgccataagtaattaaatattgttgaaaattacaaaaatttgtcaaatttctttgaattttttaaaacttttccaaatgcttatttccaaggacgtccttggcatccaaggacattttttattttcaagaaagagggtccaatttcaaggacgtccttgccattcaaggacggatggaagccctggatttacctattggttttatggttttttatacatttatattaaaaggaaatgaacaataatataattttgggattagagggggccagagactcgttaaaatttaggtaacatgtacttgagaattacggttccaacaatcaaacgttttatgtcttgaccatacttacctagtttcttatgccacaactttgttttctaacttagtcaaatcttacattcttgtttcttgagcacaaaatttagataatcaaaaacttatagactttaagctttcgattgataccaagaatgttgtggtcttgatcaagtatgaaaaaaagttatggcctaagaaatatgtgtggtcattaattggacgcataaactgcagtagagcccttttttctgttatagccacccctccattaaagccacccccatacgctttctttggccacaaaaataagttgcgcatttacaatgccttttcaattcaggagaatctcagcatacaaatacatattttttgtccaaattcccgtccattgttgtaaatacacaataataaacaaacgatgagtgacacaaatgtggtgaccaatttcatcgctggcggcgtcggcggctcatgcgccgtcatcaccggccatccgttcgacacggtcaaagtgcgactgcagacaatgccaaagccggcgcccggacagccgccactgttcaccggtgcgctcgactgtgtgcgccaaaccgtggcacgggagggattttttgtgaggttttttcaaaattaaaaaaaaaaaaatttgattttcgtccgcttcgagcgtaaatggacagtgattcggagtgggattttctctaaaacccacccaacccctaaatcatcgactgtttaatttgaaatacgtagatagacgcaatttggtcggaaaagcccacttttcaaagagtcacgagatttctataacctgaaaagttgcataaattcgggtgtggtgagaattttctgaaaaatcatggaaaagcaatgttttaatgggttttgggtccgaaatcacgaattttacacccattttccgcagtttctattaccaaacgccaattcatggacctatatcatataaagaatttccttttttttttggcatttcattaacgggattgacacatctaatttgccaaaaatttatccaaatttcaaaatcatgtcccttttctcaggcactttacaaaggcatggccgccccgctcgtcggcgtttcaccactctttgccgttttctttggcggcactgcactgggcaaatggctgctgcagaacgagccgggccagcagttggacttcaagcagaatttcacggccggtgccattgccggcgtgttcaccaccgctgtgatggtgccaggttgatcacttttttaagggctttttacttcttccgcttaaaagttaccgtatttgctaaaataaagccctgcggaccttaattttccaaccccccggcactaattttaggggatggcactattttccaattgatgccaattcatcatttttaggcgagcgaatcaaatgcattctccaagtgcagtccatggacggcagtgccggcacaacgcccaaatacaccgggccggtggatgtggtgcgcaagctgtacagagagggtggcattcgcagcatttaccggggcacggccgccacactgctcaggggttggtggattggggtacacggagtaaaattcacacccaaaatgggtcgattcaattttttaagtttttttttttctgggacgggcattgatttagggtccgtaaattttcgccaattttcaactcatttgcagacattccggccagcggcgcctacattgctgtgtacgaattgctcaaagacaaattttcgggcggagaacgaaacgagctgacgcccatggcaacgttagtccgggaaattgtagggggggggggggttataattgaggtttaaatttcaatttattacccctagtcattttttgtaaattcaaatcataaataaaacggagcagctcgcccctctctcgaaattttttggaaaagtttggggcgcccggtcaggtaaatcgagattttttttggttttaatgcgtttttacggcgcgttcaaaaactttggggaacgagtgctccgactgtgtcgatccatatccaaatttgttgctcttttcagtctgctggcgggcggttttgccggcatcgccaattggtccgtgtgcattccggccgacgtgatgaagtccaggctgcagacggcgcccgagggcaaatatccgagcaagttttttttggcacggtgtctaagtttttcatttttgttttttttaaatttcaacgagttgtcactattaacgcccgccagggcaaaaaactgtgggacacggagaagttcttgtcgcaaaatgcccgccgcgagaggattcctcccacagttgtccctggccgggctttcaaaagtgcaacaaagaaaataaaaaaatttgggaccctcagggcttgccattctgtccccccttcaaatttttttttgaaaattgtcccccacttctatccgttgtaagatggcatccgtgatgtgttccgcgaaattttgcgagaggagggaccgcgtgcgctgttccgcggcttcgtgcccgtgatgctgcgcgcgtttcccgccaacgcggcctgcttctccgggcttgagctggcgctgtgggcgtttcgccaagcgggcgtttgaaaaaaacaaacaatctctgtgtttactgtatttttcgatattaatttcattgttttgtcgctgggtgtgtctgtctctcctcccttcgtccgtctctctctctctcccattttatttgccttaccacacaacaacaataaatcaataattaaatgtaattaacttgcgaaaatgtatttctgattaaaagcagtgattaaaatgtgtaaatttttgatttttgcatttgacaagtaagtcacaatgaaactgaacaaatttgacggcggagcccaatcgattcagtgcgatcaatcaaaaataactaaaacgtggcgaatttatttgacctcggcattttaaattaacaaatttttatgaaatttcattttttcaaaatctaaattggccaatttgaaaaaagtgtgcggaaattgtcagactgaaccgaccgcggccgcttcatgtggcattttatttctagggcttcgatttttaggtttttacatatttttttcctgagctccccgtggcctgaaacgcacgaaaaacatgtttttttgggctgttgttaagctacttttcgagttattagcacctattttctaggtttttatttttagcacctaaaaaacctaaaaaaattttaaaaaacttattttcacctattttggcattttgcccaaaatttgttaacaaaaatgaaataaaaaggaaaaacagacccctaagaatcgaccgaaaatttttttcaaaaaatatacccctaagaatcgactcgaaaattttcaaaaatatacctttatttctgtgtctttttggcattttgtttgcgtattttgtaatttaattttcccccctctctcaacagaaggcatccgtgatgtgttccgcgaaatgttgcgcgaggaggggcaccgtgcgctgttccgcggcttcgtgcccgtcatgttgtgcgcattccacgccaacgcggcctgcttctccgggcttgagctggcgctgtgggcatttcgccaagcgggcatttgaaaaaaccatttttgctttaattcaaattcagtgctaatttaatcttattgtatttactgtattatgtcgaaaaattaaaaatcttttgctcataaatctcttatgtttcaatttttgagtttgactttggcaattctataggtactttttcgtttagggcgcccaaatttgaattgtggcatttatgcttccaaaataatttttacgccttttttttgcaattcttgcgttcttacttgaattttcaaaaaattcaaatccgggctccaaaacagaaaagtagccaattaattttatctgtgaaaagggggattagtcagtgatcaccaatctctcgttactctctgacagtctgtccgctcttatttgcccacactctctcatcatatctctctttctctttaactcagcgcaaaaaagtggccaattttcgattatgacacaactaagagaatcaaatgtacaataaatactattgtacaggttca

SEQ ID NO: 5162 - DNA, 3280 bp, Heterodera glycines
  unsure (1)..(3280): unsure at all n locations
gaaaagtccgggagccatttaaagaaattttggcaaaaattatccctaaattaaaaaatagttttttcatgttttgcaatttttggtcatatttatgcgcttgtttttgattgtatgtccatataattccatactctatctcttcaccaccagccaaccactgccacattttccatgatttaaaaatttaaattaaatacctaactggatgtgaccactttttgggttgcgttccgcactttttttagacccattcaatatatggaaattttttccccttgggggttccggcgggcgaagagggtcagttccgtcccgccagttcgtcccagcaagtttagagcatcagatatcatttaaaagctcttaacaagttctatcggcttcacaaaaatcacagcgatatacgtacaagtaaaaaaagttataaataaaataaaatattcatgttgcaactttttataacttgttcaatcgcttagaaatagcttgtcaatagcttctaaacatataaagctttcgaatgttgccaaatttataaatttggccaactgagaaaaaagttatgatgttttttaaacatgcctgggacggaattggcgccttggacgggagggagcgatgcatgtatatccctccggcgcaccacccactggaatagtctctgatcccatccatttgacgaaaagccattacctcactcaacggagcacacacatatttctggatctgtttaagatccatctcctggctaatcgctatcgctgcaaagttgcggaattggacctgaaatgctgtctccaggcactttttgcgcgcctcgagatcaaatgacgcgtcaatcatcaacaaattgagcaatttggtgacttcatcttcgagcttaaagttcgtcttcgcttgatcatacaaaaagtgatctgaaaatgataattaggattataaatcatatggactaaaaaaaccccaaaaatttactaaaatatggactaaaatgccaaacacatggacgaaaaagctcaaaaatggccaaatatggaccaaaatatggataaaaactgtcaaattttaagttttaaaccctcaaaaattcccattcgagagcccttcaaaggttcggtaatatcgccgtttgtactccagcagttgagccggtgaattttaaacagtaagcataatagttatgtgtgaaattttaaaaatgaaaggttcctctttgtttttttcagcggagcccaaaaaactaaaaaagtgccataaattgttttcatcattccatactaatggcatatgtcatgccatttatttccagctgctgttcgtcctccccagccgtttgccttcccttccggcgtctgttcctctccttccgtccctggacggagttgaccccaccgcgatgggcactgcggtaggaaacattggaattttgaccctttttaagagattttcacagaaaatggtaatttttgggtcaaattttgaagttttaggggttttttcctagacgaaaaaccctagaccgagaccgagaagcgaaaaacccgagaaatttcccgagacgagaaccgagactctcgcacatccctaaggtctctgtcactttggcaccactctgttaagcggccaacgacgaaatgtttttagaaaatccaaaacgggaaaacagaaggcacaggactcaatccttattttccaaacagaacactaaatgcattttggtagaatggaatggtgccgggtcgttactcaaaaaccatcaaaataaaaaatgttggcagaaaattattcataacttcgcccaaaatgaatcaaattttagaatctagatattattcgatagccctaagtgttttctattatcctgctaaatttcaaaaaaattcatgaagtttcgaaactaaagcaagttttcttgaacatttttggtcataactttctttaaactttctcaaaatttttgaaattttgtaggataatagaaaacactttgggctatcgaataacattaataattaaaatttaatttacttttgagcaaagttatatcaaaaaaattttttattttgatggtttttgagtaacgtcatagcccaattgaatgcttaaaactaaaaagacacttattttccaagtcataaaattctttaaaaatttattttatttatttatttatttatttttttgctatttttgtccataagaaatcaattttttgtctttattttcattggcatcctcacttgtcgaatgcttctgcacccataatttcatttggttacggtcatactgatacggtatttctttttcccaatctttcaacaattcgtgcaacccatgcttattgttgctcaaattattaagacgaatgacaaatgaaaactgtttgttctttttggccaaatcgaccagctcatcgatgcttctttaaaattgtaaataaaatagcgggcacaatgattttaaaagtttcctttttttaattattgtgcacatatcagttaattaacaaatttataatggtttttttaatgatgctaatttaattggaaaaatagctaatttaaaaaaaaaaattgcaaatccctgaatttttttttctagggttttatccggggttttcaacaaaattttggcacattaatatttgataaaatatgggatgttatttttatttgataatttaaaaagtaaaatttattagataattattacgcttttgtttcccgctttgtgtcccttaatttgttcacttttttctccgcttttattataattgcattctgatgttcagtgttctggttaagctttttaagtttgctctttgcattgtttgcttcttttaattcttctctcgctttatgcagttttttctatttaaaaaaaattatctttttaaaaaaaaatttattttagtaagaaatttctctttttaattaagcatttattaaaaatattagtgaattttaattaaatctctcatatctattcctcattttatttagaaatatttttaaaaagccacaagtttatacttaatttgactcgttttttaattattaatcaattactctgagctcaaccagcacgtgttgataataaagggcaagttttagcacctccttctgtttttttatttgttcaggattttcggaatgtaacacttcaagtgcaaggcgaacaatctgctcatttagctattgaaaagaaaattaaattaattttaatgacaanattagaggtaattanattgaaaataaataattanatgtaacgagac

SEQ ID NO: 5163 - DNA, 4457 bp, Heterodera glycines
ttaaaaataaagaagaaaataatttaattaaatagtcgaaaatagattaatacttaaataataaaacaatttaattataataataaattaaatcaaaaaataaaagaaaataatttaaatttaaatttcgaaaataaattaaatattttaaaaataaaactttataaaattaaatataaaaattaaattcatttaaaaataaacaagaaaataattcaaattaaatactcgaaaaaataattaaaaatttaataccaaaaaaatgaaatgtaatagtaaatagtaataaaatttaaaagaaattaaaaaaataataataataaaaacatttttaaaaagtttacaacaaaattttctgtttatgaccatcattttcgcgtgatggccacgttggaattgaggggattattgaggtttaaaagctcctctcaggactttttgacctcatcgacgggaaaatgggcggggggaggtgcaaaattacaacaaccgacggctgttcaacaatattggaaatttgagaccagcagtaaaatttgaaacttggcaagaacattttttttttaaattaaagtaaccaaaaaagagtaacctaaaaaagattaaaatattttaaatttacgaaaaaatggatataaaaacgatttaaaaaataaaaatcaaaaaatgggtaattaaatttctgaaaacgttttaaactttcaaataataattgtcaaaaaagattaaataattattatatatatatatatttaaaattgatgtcaaaatatctcgtcaccattcataattaaaaaaataataataattaaagaaaaataaatggaataatttagaattaattgcttgagaaaatgtatttttttaaatatttaataataaataaaaatattcaacaataaattctttaccaataagaatgcgtccatcttcctgaattgtaatggttggcctcctgagcacaattgtacgcactgagcttccggtgtgttgaggaaaaatcttttagtttactaataatttataaatgttaattaaaaattattttttaaattttttataaaagattttttgtaaatttcaaatataatttaatttatattttggacaggctcattggtactgaaattggcatttttctctagcgacaacaataattagagttgtacgggaccgggactggtactgaaaaaaaacgtacaactgagtacctagtcccggttttgaccgggaccgggactagtcccgattttttcccggttttcccagccaaaaattccctgtttttcaacccgaaaattcccggtttttgtcaaaattcccggtgccgtgcaactctaatattaacacctcatgactgtaccttcttaaaaatccccatccgcccttttttgccaccggcttttccattatttcagtgacaaaacgttggcccgacggtgagtttagcaaacttttcttcaccgatttgctgctgctaaggcttggcaattgttttttcttcttgtcatcatcaccaccacggcgccatcgacgacgagtgccatgctttttgtttgaaaaaatgccagaaaatcaaatcatttggcgccgtgccaagaaaactggggcagccaaaattccaaggatttgatggtttgggaaaagcacatgggcaagaaagagccatcaattcgttggaaatgtgccaaaataaatgctaggtagagggtattccggtaccaattcataaaaaccgccaaaatgtgcgtttcataaaatacgccaatacataaaaaaataatttcatttattaaacatattttataataaaatatttaaataaaataagaatcagagtttttagatatttattggtgtcagtgtatgtcatcagtagggatacgatttttagttttttaactatttttttcctgagctccctatggcctgaaacgcataaaaacatgttttttcgattgttgttaagctagttttcgataattaacctgaattttttttaaaaatatatctttaagaatcgaccctaaaaattttaaaaatattcccctaagaaatgagaaattttctaaaaaaattcatctccaaaaatttgtttattatcttgaaagatttttgattataaaaattatgtgtgtctcattaatgaattggcatatttttgttgctttttgaagaaaattttgattttgcaactattttcttcagacatttaaatatccatttgataaatcaaatcaaatgagatcaaatttatttatttatttgtctccccaattggcagatttcatgaaacgacctagcacctaaattgaccaacccatgaaaaacttggcctaaatatggcttagggagtatgagaaaaatgccaggatgaattaaacaatgccataatttgtattattttcgaaatggctgtgccttgatcgtttgtgtgtcaaatctatgtcaccaaatatcagtatatggaaaaaggcgaatgcttgagaaaaatgcatatgcctctacatacaatgtttggcgttatgatgagagcagttgccggactattgccaccgatgatgccatgttcgggagaaatggtaccattttcttgagtgaagatttaaatgtttaattcaataaaaccatttttaccgttttttgcagtttcagtttgttgtttggtttccaatgtcaccgatatggccaaatttgtcgccaaaaatggcacaagcattaataaagttagaaaattgaatttgttcattttctattaaaataaataatacatttctttaattattttaaaacaattaaaatattttagaaaatattttttctattttttactttccaccgtccgcgattaagataattttttagcaggaatatcgcaattttcgggggaattcttaaaatttttttttcaggtttttgtgtcttttatttttcttaatgttaatctggacggtatgcttgattaaaaaaaattcagttttacaaatctatttgaatacaaaaaacacatataataaaatattaaataatagaatattgtttattaaaataaaaatgatttctgatggctgaaataaaatatattccccaaatagctattacaacaaaaagctaaatgctattaatggggagtgggcatgccaatatttgcatgtcacatttcacagagaaatatatgaatagagatattgatttgattattcataagatttgcataagcataagaaataactaatttataaaaaaaatggtttcgtaaaaacgtaaagtaacataattaatggtggctggacatttcgacaattaccgtttcgccaatgaccgtttcgacgataccttttcgacaatgaccatttacaaccatatcatatcgccaaaatttaaataataaattaatacaaaaataaaaaattactttttaaaaatatagaaaaatataaataaattataaaattagttgttaaatttaatataattgattaaatttaaaatacctagttccaaaaacatgttgttataaataggtatgttaaaaattctctcggacattttgaattaatttatgcataatgaatgcattattatctatcgattcgagagtttattgaatttgtcgaggttaagtcaaaaagaggcgcttcattgttcttgagggacggatagattcgaatacgcttttgaaagactcggcaatactcgaaaacgccgaatattacctatgcctcataaacgcaaaattcgaaaactaaagccattctcataatgctattttgaacaaaaactaaaaaaaaactattttatattgatcccaaatcacatcacctcgtttcatttagcagaaatttgaattttattcaaaataattatttgattttattgtcgaaacggtcattggcgaaacagtcattgtcgaaatgtccggaagcccaattaacttttaaaaatgttttcgtaaaaacgttaagtaacacaattaattttttaaaaatggttcgtaaaaacgtaaagaccagggctcggatttatctttaaaaaaaattcctaaatattaatacggtttaattggcgaatatgaaagaaaagatcataaaaagtatttaatcttttcaaattcagggtaacaaggttgcttgatgtaaaattcaaaagcctattttatggcgaaaaaacctcatttagaaggttaaaactcttatttttaaaagctttattccaaatttaaaaaaagaaaaatcaaagattgtatttttaattttccatttaaccgcggaatggtcttaattagacttacttttagaatctgttatttcaaggagcaaaacctataaaattgcattattgtaaatggcgtagaaataaatttgtgaggaattttaatattatttgtgttggataagaaaaagattgacgcatagcgagcggatttatacgcgaagaaaagctctagagatccccgg

SEQ ID NO: 5164 - DNA, 7862 bp, Heterodera glycines
  unsure (1)..(7862): unsure at all n locations
ctttcttcacatacattttcaaacccatgacctcaaaatgttattntgggtgcacctacgactggtgaaattagcacaaagtcgttgtcgttgggcaaaatttcaatgtccaattcacaaaaattgatcagatacaacggctgattgaacaggtcggtgtcaatttttgcaatgaattgagctacgttgctacccgcaaataaatcgcgtcgcgctgtgcatccgcctcccatctccaatgtatcgcccgtgtcccggaagtacccagctgcattcagatgggagtcttttgcggtcgttgaataggagagttcatgtgagaaatatgatttgtaggccatcagggcgtttgcattaaaaatttcgcgcccattgatgctcattttgatgttacggatgaaggtttgtccgatcatttgaattggcgcaatatttatgtcatcaatgcctaggttaacgagttgaccattaacgttttccttacggattcgaaactcggtgagcaaatagcatttggagaggtcaatgtaattttgactggagtgaagtttgaagtggtagggtgtgtcggtaagcggattgctgggcagaagctcgaatacctttgaagatgagacgctcacatttgtagggggtatacggaaaaagtccaatgcattggtgattgagttcactgagtcgttgtcgattttgtgaaatgtcatttatttagtaaagtccaaaggcgtccgatcgaatacgcttttttgcctgttttacaataggtcgaccaattagtgtctgatgaccatgtacatatgttctctttctttttatactccgttttccgcttccaaactgttttggtagtcctcctttgtcaagtacggtatcaattcctcgctttccctcactgacaagcgcctctttaaatggcaccccctcattcccgactcgctccagcacgcgttgcccagtgcttagcgcctccgaccctaccgtggtgccaacgcggcgaagaatgggtaggaaaaagcgccacagtccacgaaacacatctccaacgcccgcccctcgttgaataccgtaccccctctgaaaggggcttgaccccctgaagtagtcaaaatcgtccttttctaatccgctaccgtactgcacatactcgtcgtactgcgcaatgcttgggtcaaacacaatatgaaccatttttattaacgtatgacaaataaaacataaaatgaatgaaatcaaaaatttatcactttcttaaatatcaacacggccatcgttgtcccataggcgaatggcacgagacgacctttgtccattgtgcgcagttcaatctcaatctcgttgatctcacgtggcaacactcgcgcaaatattggcgagtcgtaaatcttctcattatactccccggggatagcaccgctgatagacacaacccggagcaaggagctcaatgaattgccaattatcatattttcagttagtccttttgagtagactgcaaaacttgatatgccacctcgtagatcaaacccgtatttggcaacttcatttgacaccacatgctgagggttttcaaagccaagcacatacccgagctgtggtgagaaggacaaatggctgatgatctcctcattgaacaccagcttgaaacgttccatattggtttcatacagaataaacactgaattgggcacatatgtcagagggttttgattagctggaggagttctaaaaaatatttttggtgggtcgagcgtgtgaatcaaacgcgatgggtctatttgagctgctgatgttggtggtggtggtggctgttgatgttctgtttcttcaaaacggggtggagagcctgacggcggagcttgaggcttagaaggctgttgaggtttgagttgagatgctgtcggactttttagttgcgctggaggcgccgtaattatcggtttggcagaaggttttacaggcgttgctgtctttacagttaatttgtccttatcttcttcttcatcataatgtggtggagattccgccttaggagacggcggcgtttgaggcctagtgcccactttagcggaaaccgacgctggaagtggcggcttaacagtagaaattggggtttttgattttggagacagtgccgagctttttagttgcgccggcggtaccggaatcgtcggcttaacagatgggctaggaactgcacttattgctggcgtacttgttgttgttgtctttggcggtgcaggcaccgttgttattggcttttctgttgatggagggccggttgatggctttgtgattggtggagggacggttgtggtaggtggagggccggttgatggctttgtgattgctggagggacggttgtggtaggtggagggctggttgttgactttgtggttggagtaggtgtggttgtggtaggaggaggggtcggtgttattggttttgtggttggagaagggacggttactggcggctttgcagttgtgggaggcgctggtgttgttacagatggagtagctggtgtttttactgtcgttggtttcgcagggcttgtgacaggtgctggtaccggcacttttggtgtgacaggagctgttactgtatcattttgctcttcattgtaatgcggcggagactcctcaatcggcccttcatcatcttcttcttcatgatgaggtggtgactcttcaatcggcccttcatcatcttcttcatgatgaggtggtgactcctcaataatttcttcatcgtcatcattttcattatgcaatggaggaggggcaatctgttttctactcacgtcaaacaccgtatctcttttctgtcttttcaaaggcggtggcgagccgagaggctttgttgttgtacgattccgattctcttccacctcacgagggagaggttgtagttttgcaccgctatgattactcaaagtgacagacaaaaattctctcaactgctcaacccgactatgcgatgccttaggcaccggcactctgatcactcgctgtctgtcctcatcggtcgctctgcggtcggtgaagtgaatgtcaatccattgctcatccaatgtgccaatggttgaccatgagtaggggtaactgatactgtgcagtccgcacacccacgagccgttaaaatgtaaaggttttggaagccgaacacggaatttattcggctgattgtcagggtaatcactcacattactaggtaaaaacacaaagaaactgttcgacatgattgtttatctgcataaatgttgaaaaatgtgaacgcttttatacaagttgggactcatgaacccactcccgattgggatagccaataaatttcacaagcatctctgtggtcccgtccgttcttttcctcttcctgtacaccttctcgatacggtagcttgtatccgcgtcctttcttacgcgcgccaactcctgctcatagaagctgcccttgaatttctcaccatgttcatcccgcaatttgtatcgaattgggcgcaccgctttcaacacctcatcaatctcgagaatttcgtctccataatttggtaaatatcccttctcaaattgtcccttctctctgctcattcgcacaaattcatctttacggaagcggggcgtttttttgaaaaatgataggggacggtacattcgtttccacaccttctgagcatttgaaaaatcaacatcaataggtcgcataccgtgaacacgagagtgtgaactattaattccatccacaattttctgtactgcatccacccagttcagcgtctccttctccgcgaaataccggtacagtcgctgcttcacattacgaatggctcgttctgcaaccgacgcttttacggatgaatggacaggctcatgcttctcaatctcccgctcctcgaagaattccttcatcaatcgatttttgaactcggtgcctttgtcggagaaaatacggtggggcaccatgggcatttggtcgatgagttgcttgaatgcctccagcatctcctcggctcgcttatttttcagcggtacaacaaacaggcgtttggagaggacatcaaccgcaacaagtaggtagcggtgaccccgattgtggcgcgaaagagattgaaaatccgccaaatccacttggacatctgtcatgaatcccgctgcaacagttttggcccttggaaagcgcaccctgcgagggcgcatcagagtgtaggtgcggtgaccatccaaataatgctgtacgtcctttttccgtaaatgtttaatcttctttcgcgcctctttccacagcgctgtaacacctgcgaatgccgctggggatgatggatcattgtacattttgtcaagagtggtgttgatcagctccattttttcgggcgaaattccttcttgattgcccgttccgtccgggtggttttgctctgtgacggtctctttggtggggccgtccatgaatacaaaattgggtccttcctaagccgctcttccaataggttcgctcctggtggtttaatggtggggcggcccgctctccggtctattatatacttgatggccattcgcaaattgctatgcgccaacggcttgccgtttgcggtattaattgtatttccccgaacgcccatacgatccgcataatggttgcatttgatgtatagccgttcaatccgctgagtcatggtcagctgatttgacggaatggcaaacagttcacgttgttgccgttgttgttcataagcttgtgctgatgttgaagggcctggctctggcgaatactgtactcttacccttctcggttgcctcacccgttttcttatgtgcacctcaccattctcatcatttacggggtgggggcgtttggtccccctcctaggcggaggaacatagggtatttcttcgacgacagcagtaggatgaggaggttgttgttgctgtaatggtttttctctgatttttggctctctttccgggatacggtatggtacgggcctctttgttggtgcatgttttggttctattttggttgtcgggggagggaagtacccggcttgcctagacgtggatggccgcgggtccagcttaagttctggctctcttttcgcccgaggcgctggagtagggtgttgggttttcttccaattcagctttacctgttgtttttctctcttggcggtaggacgcggtggaggtggtcttggttcaatttttgttttcaaacgaggcggggatgggagccgtggaggtgaacggtgataaaccaaaaatcttttgcgtcgtaaatcatcatcatcattatcatttgcctcatccttttgtaattttcttctggtggcactcctgtgctgagcagtgtccatctcctcaatttcgttcgcgttgtcgggcagcacaggcaaatcgccataatattgtgacggcgctggcaacgcgaatccactctccaacatgtactcatcatcatcatcgtcactttcgggcaatggcgcagcagctgcttctgcaagaaggtcccgcaccaccggctgccgttgctgtatattgtatcgacttttccgccatttctccagacgaccacctctccgagaagctctacttggtctttgggggcgttcaggacggggcggaggacttccgggtggggagggacgaggagtagttggtccagagggagggcgtctcccagtcggtggaggagggggtccacgcggaggacgtctccctggcggtggaggtggtggtggtggagcagggggtcggcgtggagtgtccacaacctcaccatcttcatcttcaccacctctcctcatcagtacactgattcctttggtgagctcaactttggctggtctgtccgcaagatccctcctcattttcaaatagcgccttagctgttggttgtagtggacattttttgttgagggatttgttcgctcacccctggctcggttcaaatcgtgtcgaacagcatccagattgaggtcgcccgtgtcatacacggaggtgagaccacgataaatttcttgaggaacgagtaaaaatttattcgccatttatcgccaatgaatgaatgatggaagcatacaaaataacaatgtcgatgggtatttatgcatttttgttcatgatagactttgccaattcaattagaacgggggttaatacggcagcaaacaatcctccaaatcctgcgcctttctggacaagcacacgccgggcgccccgctcacttctcgctctgctcattcggcgtacagtatccacatggggcatcagtcgctttttctgacgagttgagagtcggaagcgtgaagcgacaaggttcagacaaatttccaccagtgcgagcagctgttcggagtttgctttccctatcagtttcttacattttttagcggatttcgtcctggccaaggcacagagccaatcgcaattgttttttatcagctctccaatatttacttgttgttgttgttgtttatgttgctccatttttggggatgaacacaattgttccttcatcttcctcctgttcatctttaaatatgtttgttcgaagccgtaacgatgggtccgatgaagcatgcatatcgatcaacaaatagccatagggacgggcagtcgctttgcggtaagcatcaaggaaaaaatcaagttgtcgtggaaagagttgaacgccaatgttgcgaatggacaactgggaattcggtgcccgcatcagtaccagatactgagcggacatgcgggccaccttgatcttccgctcaaacaaattttgagtgacgaacaccaccgcaaattggtgatggtgtgactttttggtgaacaaatcggacaaatacttctcatcaatggatagcatcaggtcgtcgagaatgagcaaaagaggcttagggaaacgcttgaccaattcctcggatggaactcccgcatacacatcgactcccgccttttggagagccggcaccgccgaattcatttcaccaaaacaatagagcatggagatgggtttagggattatcaattggtccgattcagcaataaattttaataaaaattcagttttccccgatgaagagggacccgaaatgattagaccaaacggcagtttgaagcaaatatctttattggtgaatgattgggtgttaagcatttttagggacaaaatgaattacaagtttgaggtggatgctttaatactgttgaagaactcatcaagtgttttgtcaatgtctccaatgtcctccttgttttcctctttttctttgggctcttcctgcaccttttcttcctccacagggctattggtcaccttttttgtccagagattccgctaaaaggagatttccgagtacattgattgccgttttggccttgttccaacgcgcgccatcctgcatggcatcggccattaacccagcttccactaagtcaagagctaccttcgcctttctcttcaagtcctgtttatcctcatcggtgtgcgtcccttgggttggcgtggtggtgggggtagtagtgcaagtgtcggagggcaggtcaccgtagggtacattgaatacgcgggccttgtttttcacacggaagaagcagtggcctggtagatcgtagacaacatcaaatgggacgaattggactttgctgatccggctgcaccacatagtgatcccctccttagtcaccattatgtcgacctcaacttcagtagctttacaagcgcggcagcgaccgcactcatcgaatggtataaaacggggagtggacagacgaggaccgctcaatgttatgccgcttgttgtcacggttatgtcagattgggcaagaatttgattgacaagcgatcttttgtcgcacatgttaattgccatttttat

SEQ ID NO: 5165 - DNA, 1240 bp, Heterodera glycines
cctcatcatcttcatctccagcacctgtcgtcatcagtacaatgattgttaaggtgagctcaactttggatggtctgtccgcaagatccctcatcattttcaaataccgccttagctgttggttgtagtggacattttttgttgagggattggttcgctcacccctggctcggttcaaatcgtgtcgaacagcatccagattaagatcacccgtgtccgacattgaggtcagaccccgataaatttcttggggaacaagtaaaaatttattcgccatattttgtcaaatgaatgaatgatggaagcatacaaaataacaatgtcgatgggtatttatgcattcttggtcataacagactttgccaattcaattagaacgggggttaatacggcagcaaacaatcctccaaatcctgcgcctttctggacaagcacacgccgggcgccccgctcacttctcgctctgctcattcggcgtacagtatccacatggggcatcagtcgctttttctgacgagttgagagtcggaagcgtgaagcgacaaggttcagacaaatttccaccaatgcaagcagctgttcggagtttgctttccctatcagtttcttacattttttagcggatttcgtcctggccaaggcacagagccaatcgcaattgtcttttatcagctctccaatatttacttgttgttgttgttgttgttgtttatgccgctccatttttggggatgaacacaactgttccttcttcttcctcctgttcgttcttaaatatgttggttcgcagccgtaacgatgggtccgatgaagcatgcatatcgatcaacaaatagccatagggacgggcagtcgctttgcggtaagcatcaaggaaaaaatcaagttgtcgtggaaagagttgaacgccaatgttgcgaatggacaactgggaattcggtgcccgcatcagtaccatgtactgagcggacatgcgggccaccttgatcttccgctcaaacaaattttgagtgacgaacaccaccgcaaattggtgatggtgtgactttttggtgaacaaatcggacaaatacttctcatcaatggatagcatcaggtcgtcgagaatgagcaaaagaggcttagggaaacgcttgaccaattcctcggatggaactcccgcatacacatcgactcccgccttttggagagccggcaccgccgaattcatttcaccaaaacaatagagcatggagatggg

SEQ ID NO: 5166 - DNA, 1601 bp, Heterodera glycines
aatattagcaaaatgtgtaacccaaaaaaccaacaaactttgtctcaaaattccagaggtacaggtccgagtcgatggacatccatgcacgcattatggagggcaacaaaccggtggcaaaattgctttgcatatctgaaaaatgcgtgtgaaaattatgccaaacttcataaagtgagaaaataattgtaaaattaagtcgggagtaatttaaattttttgcttatttcgcacagaaaacaactaaaagctgattgatttgaactataaaaggagtcgttgttcgtttttgaaagtccaaaacaaaagcaatttaaacttaattggttgggtaattgacactaatgactgaaaacaaagcaaacgtttgaattggtcgagcaactcctgcgggaacgagtgatgccaactctggtagaataacggcacgccaaacggctcgtgccgcgcgtagtccgcgtcggaaagaccggagaaggccgtttttcctgcaaaaacgagacatttgttaggtcaattttttggtggacttttatcggcattttttgtgccagcccatagccactggaaattttaaataaaactcgaaccctattacagtttggacaaaaagaatacgagtaaaaggcgttgcgagaaacagaaaatgccgtaatttgggttaggtatagggatgctttttgtctaacaataagaatttcaggggttggcataagatgtgatacctcttttgaaaaaatgtgtcccaatttgtaaagatttcaatgaatgccagacaaacccaagaaattaaaatgtgtatttttgaagacacaaaaatcccgggcataaattttgaacaattgaatggagcgctaacccttgccaatgtacgggtcgtccatcttgagcttgttgtagagatcaacattttgctgatcagcgcgcaaatagcgcccaatttgttgagcagtgtccataaaattttgcaacaataaaagtaaagtgcgaaggacgacggacgattcagcgacagatattataacacaaaaaagcggtggcaattcgaaaatcgaaaatacccctcaaaataatacgcaaaatttgtgatgaaaagacggcaaatctttgaaaaaggcaaataaattttaaaaaaagaaatgacgaatatgtagaaacaatgaaaatgaaaaatgacgcactttttgataaatgtttatgatggaaatgagaaaagaaaagctgtgcaaacgaaaaattggaattcctttataaagaagtgattgttaattaagtaatagtaggagaggcgaaattcccgaaaatgaaaaattaaaacaggcctaattttgggtaatttcaaggtgttttaatcgagaaaagaaagccttcaattaagccattctctagaggattttcctgactaaaactttcttgaaaatttaatgccgaaaaaacacagatttattggttttagttttgcatcttctaattgcctgtttggggcgtcataagcaattaacaaattaacaatttgtgctcgagaaatcatgacaaaggcaaggcataaaacaaacagttaagaaaatcaatttcggcgggaaacggaaataaattaattc

SEQ ID NO: 5167 - DNA, 2742 bp, Heterodera glycines
  unsure (1)..(2742): unsure at all n locations
gggggaaaattgctgaattagacgaatcgaaagattattccccgcatggggcaccacccaccttaaggatgtaagactccaccattgtctggaagcaccaccaatcgaatttgacggtgaccactttgtaggcgcacatcaccggctcgcagttggtctgccactgctgctccaacggaccacggcctgtgtttacggagcggaacgtcgacggtcgggtgttgttcggtccgaggggtcaaggaacacgatcaataatgtttattgacgaacaataaaataaaaatggaggacaatttggtcggaggaaaaataacaaaatcaaatgaatgagaggaaaagaccaggagggagggaatgaccgtctatttaagggcgagtgacaacaacaaaattgcggggatttgaatagacagatcgccaatataattcaaataggctcatccgaacacctccccttttgagcggctcacggcgagtacctttgtggggcacgtctgttccgttgcgggtatcggcatggctgaacttgctgatctgcttcttcggccactgattcgtcgttgtctgactgactcagatcattctcgagtccctgctcttggacagtttggttttgctcatcccgagcttccaaatcattgacattttgtcgatcggcgggttttccgatgtcaaatgcgtcgagaaagatttgcaattggtcggcttcgtcgggagtgtgtcgaggacggagttggttggcatggaatcttcctgacgacccgtcacggaagcccacgtcataaatgactcctctctttttggacacttcaccaaatttccaattttgtgaaattcaacaattttgatgacaaaatttttttgattttgtcaaatgcatttttgcatttatcgctccaattccattcggtgtcctttttcagcaaatcatcaagcggcttttgatgaattgttggtaatggtttaccattcccaaatatgaccgaagtgaagagacatccgtcggttctggcatctcattgatggcggtgattttgctggggtcgggtctgcgtccgtttttgtcgattatttgcccgagatatttaatttcatcttggaaaacgaacatttttcccgtttgacgcgaaatccccattcttgaaatcgcgagaacatctttttcaaatgttcagaatgttctttttggtccttgctgacgatgatgagaaagtgattgttaattaagtaatagtaggagaggcgaaattcccgaaaatgaaaaaaacaggcctaattttgggtaatttcaaggtgttttaatcgagaaaagaaagccttcaattaagccattctctagaggattttcctgactaaaactttcttgaaaatttaatgccgaaaaaaacacagatttattggttttagttttgcatcttctaattgcctgtttgggcgtcataagcaattaacaaattaacaatttgtgctcgagaattcatgacaaaggcaaggcataaacaaacagttaagaaaatcaaattcggcgggaagcggaattaattaattcgaatgaaaattaatcatcataatgccaatttttttgctaaaaatttttatttgagcccggaaatttcaaattggattttcgaaggcggccaagggttggtgagagataggcctaacaggatcaaccgggtgtttttttttgaaatgaggcttttaaaaattcaactgcaaggccctgtatggcctatattatctaacaaatacattctaaaatctcgaacatttattttctgtcaacataagcacaataatacatacatatcaatcaggaggaaattgggagtgtgttcagtaaacaataagtgccgaaatgaatgcgtggaggtgaaaggacaaatggtgtgacaaatattatatacaatatgacgagcaaatagatgagcgtcatcggcacgatataatatgatgagcaaacagatcagcgtcatcggcacgtcactcgcggttcatcatagcgttcagccggacattccacgcggcctgccggtcatctgagcaaaatggacaacgattacgtaaagcggtggaattggatggacggtggcagagtagaagcccacctcatccaatgccttctttgtctcctcttcgatcagacgaatttgcgccagcgtcagcccgtaccaacggtccatccagcagaacacctcgcgattgaacttgcacaaaaggcgggcgtactgctaaaagggggaaaattgctgaaattagacgaatcgaaagattattccccgcatgggcaccacccaccttaaggatgtaagactccaccattgtctggaagcaccaccaatcgaatttgacggtgaccactttgtaggcgcacatcaccggctcgcagttggtctgccactgctgctccaacggaccacggcctgtgtttacggagcggaacgtcgacggtcgggtgttgttcggtccgaggggtcaaggaacacgatcaataatgtttattgacgaacaataaaataaaaatggaggacaatttggtcggaggaaaaataacaaaatcaaatgaatgagaggaaaagaccaggagggagggaatgaccgtctatttaagggcgagtgacaacaacaaaatgcggngatttgaatagacagatcgccaatataattncaataggctcatccgaacacctcccctttttgagcgctcacggcgagtacctttgtggggcacgtctgttc

SEQ ID NO: 5168 - DNA, 2304 bp, Heterodera glycines
  unsure (1)..(2304): unsure at all n locations
agagataggcctacagggatcanccggggtgtttttttttgaaatgaggctttaaanaattcactgcaaaggccctgtatggcctatattatctaacaaatacattctaaaatctcgaacatttattttctgtcaacataagcacaataatacatacacacacatcaatcaggaggaaattgggagtgtgttcagtatacaataagtgccgaaaggaatgcgtgggggtgaaaggacaaatggtgtgacaaatattatatacaatatacgagcaaatagatcagcgtcctcgcggcacgtcattcggttcatcagcgccgttcagttatcggtcatccccttcgggttgccagtcgcgcgcatctgagcaaaatggacaacgattacgtaaagcggtggaattggatggacggtggcagagtagaagcccacctcatccaatgccttctttgtctcctcttcgatcagacgaatttgcgccagcgtcagtccgtaccagcggtccatccagcagaacacctcgcgattgaacttgcagaaaaggcgtgggaatgactaaaagggggagggaacaaattggaggtggtgtttggaaacaggacgaatgaatgaatctgccaccttttgcattgaagactccaccattgtttggaagccgaaccatttgaaattgacggtgaccactttgtacgcgcacatcaccggctcgcagttggtctgccactgctgctccaacggaccacggcctgtgttcacggaacggaatgtcgacggtcgggtgttgtcaaggatgtcggctgctttcagaaactcgttgtcgttggcgatgtcaatgcgcaccactttgcgttcgttcagctcatccttcgacagaccgagtgcctgaaaaacggaaaattaaattgtggcataattaacaattaattagtgatgatgatgatcattccatccatacattttttgtggtgccgcggtcgctcaagtgcattgtttcaatccggatcagaaagttgtccttcatatagtccgggttggtcacctccgttttgcagtacgggaaggcgttccacgaccgttcatgcagcgtcgtcgaacctcttggcataatcgccctcagaagagcaggcacttttctggagaaaaaaagacgaccaattagcattaattacatttccgcgcctccctctaaaactcacgtatctaagtggatgattttgtgcgtgaactgtccggacgtgaagcggccattgaacagactttggccttcgaagggctcgttgcgcaccatttgaacgccttcgccaccgccggtctcctgtaaaaggaagaaaaagcagataaaacgccgctcactccacgggatttgcgcaagttcctccaacctgtcgcgatgcctcggtcacagaaaacaattggccaatttgatactcctcaatggcgaacggcatgacgatgcgactgaaaaaaggaaagcgtaattaattaacgtaattaaggaggtgtcagaagaatgatgatgatgaaaagcaactcactattctctgatgagcattgttgctgaagtgcagtcaaaaggggaacaaaatgaagaaggagacagacgcttattatgtcagtaaaggacaaatgaagaatgattgtttctacccttaaatcgccccttttatacaaatattttcctacccctcaatttccgtgtaaaaattctctataaaaagggatgaaattcgcgagatccactcattcttcgcatcggcgactttcactctctgctgtacattttcttctctcgacgacactttgcgcattcaatccgagcacacttcttcacccatcggctggtcctatgtctcttcaatacgtcggcatcgctgcgttaatcctcggaagtaagccgggacgagctgttaatccatgttaatttgctgctaattaatccccatttttcagctgccatcgctctgttccaaactgtgtcgctcagcaccagacgacaaatcgccgcacaaaatggccgaagcagcagcagcggcagcaaacgccaaagcaagtcgccgtcgtccgcgaaaaccttggcacacaaaatcgcagcgacggtcatcgctgagaagagcctgagctccatcccggacaacgaaatcgtgcagctgatggacaccggctttcaactgctcgacgaggtgggctcagcctggatccgggatgacctgccagtgcctctgataattcgtgccaccattgttttcaggagccggcgcgtgttgatgtgcatgccccttgctacgttttcggtgacatccatgg

SEQ ID NO: 5169 - DNA, 884 bp, Heterodera glycines
ggtgacgacttccatgtgagttttcgtgttccctgtctaaacctttgccaattccaattttcctcacacatttttcagaaagccaaaaatcgatgaggaaatcgacgaaaacaacacattctgtgacctgctttgggccgaccccactaacaatgcgcaggagcttcgtctttgcaaggattacgagccggacaaagggttcctcggcgagtacggcaactatcgctttaatacggtggattggtcccgaattttgtcaaccgttttttaatacttttacaatcttttcaggaccgcgaaacttcaattcagttcaacgaccgctttgcgcaggagttcttcaatcgcttcccccacatccgcggcatcttccgggcgcacgaaaaccaaccgaaagggcacagcatcaacgaggcgcgtacaatttgcacggtgttcagctcgcctcgctacacggaagacacggactgtggatctgtgctgcgggtgggtgctgtttttgccatggcatcttttatttcaattttcaaaattcttttttcccctcagctttctgccgacttgaaacacattcacttcgtcacgctgaaaccgaaggctactggagagaaattgagccgggaagaatgacagacgagcggcggaaagaaagaagccccgacgacgtaaatgaagtgccgcatattcaattcgatcacctcccatttaatgatgttgaccattctcctgctgttgcccgagtaggtgtgatatgcaattgctccgttttatgctgtcccgatacatatttgaccacgtatatgttattgttgtattatatgtatattgtatatatatgtatgtattgtttttgtatatgtatttgttacaaaacgataaaaaga

SEQ ID NO: 5170 - DNA, 7259 bp, Heterodera glycines
taagtttatttacttaataattatattatcgactattctcccagtgtaattaaattccttacttcaaaatatctcatccttttattcaacaaatttatataaaaaattgtaatttgttgaaagttagaaatttattaaaatccactgttaagtcacaaaacaataataataattaataatttctgaataaaatatcacccactttttcatattaaattcattaaaattaaatgctttaccgatcctctcactcaagattctcataaattgacaataattttaaaaattcttaaatattccgtaaaattctataaaattgatcgatgagtcacaaactttgtatccaaaaataattttgggtgaataactttttaattgttttagtcattcgatctccgccgtttttttcgccccaaatttctcaacattatttcattaacatttgccactgtttcgttcacttttcaaattggcgttctctccccctctttttttcaccttttttatatttgtttttcccactaaaaatttatgggccaaaaatttcgcgcggataaaacgaaaaatgaaaaacgaatgaatcattcgcccactcaaaggggggggggaagaagtgatcgacggacgcgcaaagtgatcaaaccaaacgatgaataaacatttcttatttatttaagtgtttgtcaaccacaaatcctttaattgttttatttttgtttttaaaaatgtcatcactttttttaattttcgccatttttggcacaattttttgagtcgatgtcgttttttcggggcttagtttaattggcgtgccattaatttcatagccaatcaattaaatttcagtccaattttgaaaaatacgggtcggacttgatacaggtttttactgacccgtagccagtaacccgtacttatccgtacattccaaaaattcgatctccagttcgaattaactccatttttttcaacttcaaaaggaatggctaattaatgctaatggctaataattactcttaattggtccctttctttttcactggtcttttctgatcatagtttctctgtcgtttcgagcttactaatttgtcatgttcaaaaggaatggtttgattaaatggaattagagcctccgctgaattatgaccgcccccctgaaataaagcccccctttcgataaaataatttcaaataaatatttattttcgtttttaaaatatatttccatttttaattttaattttggttgaccaaaacttttcctgtaaacaatcatcccaatgttttcttctgttccgatcacttcttccattttctaattttcctttactaatcgaatttcgcgcttcgttccctccaaatttcaacttttgtttttcgtctgtcaccaaaatcagcgcccttttcttctctttttcgtgcgttgttttaacccactaaatttttacacttttttttgtcgcacgtcgaaacgccaaaaggcgacacaaattgcccccaggggcctggcgatggatgacccccgggggcatcaaatggaatcgaaaagtgaaattgaatgggtaattgctgatggggtgcgcacgggaggcaacaaaaacaacaaacgaattccaaccgcgaaaaaatgggcccccggggggacaaaatgtacaaaatgaaaagttattttccatttatgacaaaactatttattgtaaataaatgttgggtgacaaaaaaaacccatttaacacaattataggttaaacgaaaaaaataaatttaaaataggcacaaaaattggtttaatgcttttaatgacccccatcagcagaggtcttaaagtttgaggtttaattttagaaattaaaatgcattttaggagtaatcaaaataaggcgaaagaaacatggcaattagtcgctaattgctcggattttctcgacgcacgaccctcccattttcagggattttactcccgtgtccaacccatcggcaaaagtgccgtttagtcacgaattgactggcccaattcccgattgaatttgtcccgccattcattttaaaagtctctgtctctaattaattttaattttcaaaattcctttgtcaattccttttttaattgctcacttttgcgcgtcattgaatgtgttcacaattgccccttttacccttcacaattatccccaaaattcgccttttctcggtgaccttcaacaacactttttttctgtcaccaatttttcctcttttattcgccaattaattcaaaaaataatttttgtggaagattaattgagtaattaattgaaaataaatgttctttctcagatattttctgtcaccttttcaattgacgtcattttgtcttgcatttttctttcagtgttttttccctattttttgtcatttccaaaaatataagatttaaagttcaacaaaatttttgttcatttttaaattattttgtcaacaattttttggaattttgtggggattttttgatatatttttttaattttttatatccgccatcatttatggcattttatcgccatcatttttgtccgccaccatttgtgccatttgtccgctcacaatatttaatgccattagtccgccactatttatgccatttgtccgtgcccttttgtcccttttcaatttttctctgtgtcttccatttgtctcatccccctacttcatcattcatttcgtcaccactttttcgcccatttgtccctttttcttccatttgtcccttttattcctttttttgcccttctcgattgactaaatgctctgctgtccatcatcatttattttatgatttattttcattgccatcactttttttgctccgttctccgcgccattgccccataaaaaacgccgtcgactttttgtccgtccgtcggtccgtcgcccggggggaggacaaaattttgtttgattgatcgccgctgttcaaaaggctcaacttgcgcactaaaattttcaaattgttttcgcgaattctgcgggaaataattttatatatttcttttaaatttaatttatgaaaaatttttaaattaaaaaatatcatttttaaataaatttctctcattatttattttataatttaattttaagtaaatttcttaaaatttcgattataaattactcaaattattgtttccacttaattacctattcatttaattatttttcatttaattatctctttccctttcgttcgatgcattttcacaaattgtttttgcttttgcctattttgcttctccatctccaacaatcccaagcttgcttttcacgtggcaacagtggcgaaccgtcggatggcaatcccgaggcccaggggctaaaagtgccaaaaattttgaattttaaaattaaaaaattctcaaattttcagtcggaaaacgatgttcggactgttcagttgaagaaggaaaaacaaacggatgaaacggaagaggagaaagacgaggaaagttcggcagaacaaaaattgccatctgaattggacccggaatttgtgaaagtgagagaaattggaaaatttctttttaattaataaatatttaaaaaattaaaattttcttttttaacattatttgatattgtctttatttttgagggttttgaaaaactatttaatatttttatcaatttttaaaaaaatttttgcttggaaatttttgaaaaatcttatttatttgggaacaaaatatttgaatttaaaaatgaatatttctttgaaaaaatattttattgaaaatttaataattttttgaaatttatccaagtttttctattcaaatgattctttttaagacttatctgcgagaatttggtcatctgaagcacaatgagaatggcctttcccatggcgttaagtgcgtttaaataaaatttcaaaaagaaatattttaaaaatcacaaatattttaggcatttccaacgctttttgggctaccggcagacgggcaatgtcgacttgggaacccttcaaaaaatgtcgtggaaacgctgtgccaactctgacgagggctacacagcacaaggtgggggcggatcgatgaattatggcatttgccaggattattttggagtaaagaaaaatgccggaaatttggccctaaaaatcgaaagtcaaactaatttcctggcaaagttaccaaccgagaatggcacttgcattacagggttgttccgggtcgagaaaaatatcgggtcgggtttcgggtcgggtcggccgaaaaatcatcgggtcgggtttcgggtcgagaaaaaggccgggtttcgggtatcgggtttcgggtaacccggaacaaccctggtgcatgggtgcggatggcactgcaatatttgcagcgaattgcgccatttataggacgatggaaataaaaccaaatggaatcaggtttttcagccatttgctttgcttaaattcaagaaattcatacaaaatatctttagaaaaaggataataatgaacaaaaacaaatacaaaattttcgattccattgaacacaatcgtttaaaaaaaattctcaatttccttatctaattttcacccagacccccttcttaccagtgcttatttcgacccgaaacccgacccaaaatcatcgggtcgggtttcgggtttcgggtcgagaaaaaggccgggtttcgggtttcgggtatcgggtttcgggtaacccggaacaaccctgttgcattacacaaagtgtttaatgcaatggcactggctgtgttttaaataaataataatcattattttttaattagtccgataattaattaattacttaattattcgcatttgtttttttcgctttagacccatcgcaactttgggaacgttcgacattgttctggaacctgaacgcgtcgcaccccaagcagttcactcatggcgaaacgaagtcagccaaaatttggcacaatttgccaatttgaattagcactcattaaacatgttttattacatgcttttgcataattaacttaattgcgcttaattttgcagggaattaattgcgcaagcattccgcgcatgggaaattgtgatcaaaatcgactttctggagacgaacaatgcggacaatgcgcagatcattttcacatttgaaagcgacggagcaaaaaaggagaaaagcaaaaatggggaggaggagaaggaaaaggagggcaaaacaggcaaatcactttctgatttgataagcaccgatcggttggtcaaaaagacagagaaggaaattctgatcattttggcaaaaaacaaaatttgatcactttagaatttgttaaaaatttttcaaagtcggaatattcaattcgaaaaacgaatttataaaagtatttgctgaacatcaatttattatttccccatattctgagtaaattaggcgactttttttaatggctcaatgtttaagtttttaattttttactttttaaagagcaattaaattttgatattttaatcaattttattaattaagaaattaacaaaaaacatgaattcatcacataactcattaacttaattaattttttgtgatttttaaatgctttttgctttttgttaaggcctcgccattgccaaggcgtcgtcgccgcccgttgcgcgaattgttttgaatgccgacgagaattggtccacttttcaaacacaagaagaggtgaaagttaaatattgctaatttaacaatttattttttcagggaaaaatcgacatttttgtggtaaactaaatatattttttcgaaaatttttggcattttttgccaattttgaggttttactccacgaaattggccatgcgcttggccttcgccattcgggagacgaacattcagtgatgttcccaatgtttgagcgttctgttggcgaacatgtaaaattaaattaattaatttaaaaattaaaaaaatatttaaataaaattctctaatttatttcagttgccagtcatttcaaatgatgatgtcgagcatttgagagcactttacggtgattaactgctaacaattcattaattattttcttaacatttgtgtgtgtttgaagtgctaattaaaaaatggaaaattctaacattattaattaattttactctttgacaatttattatttatgatatttaaattattacatttttaattttttttaaattttttaaacccttctcttatgtcaatttgctaagccttttttttcttcgtttcggcttcatttgtttccgtatgctttttgttttgtttttttgccatcactttttgcttaaaatatttttcaccatggcatttcccattgctttttccatttttggcattttttcagtgcttttcggtaataaaaatgatgggcccaaactgcgcgtgaagcgcagtagcagcgtcgccagcagcgcaagtgccgccggtgccatcgctggcggtgccaatgccaattcgaatgccaacaatgcgtttgcatcattttatgccgatgatgacaataccgttttgtgttgtgtgtgccctgcgccgatgacattaggcgatttgaagaaaagttcgtcgaaaaaaaataatgaaaaattattttgaaagctttgcggcttttcactatttaaaattttcaaaaatccatttttaaatggcttaaaatagaaaatttgactccaaaaagtgcctgttttgcttttttgctttcttttttcgtttttcgatttttagagcctggtcttcccgagaggccaaaaaatgagacaaaaacctctccacggaggccccaacccaaaccacacactccgaaaagtatgccattacaaaaaaatccattttgtacctggacaaatcgaagaaaaaattccaaaaatgccaaatgcctggcttttgaaaattttgtgcttcacaagatttaaattaattttcaggcttaatattccaaaataattttttttaaaacattcactttttgacgtgtgtttttcactttgctttttcttttgccgtgtgttttcactttattttaaattattttttaaattaatttttaattaaatttattaccattttattttctgatcactttcagagggcgacctcaccgatcggccaacacttgcggccgatctgcgcccaacgaggcccgtgcccgtccagggcggcacgcacagcacagagttacatttagaaaaataaaataaaataagtaaaaaataataacatataaacaataatggctaagctcatacggaggagaaggagctacga

SEQ ID NO: 5171 - DNA, 1820 bp, Heterodera glycines
  unsure (1)..(1820): unsure at all n locations
aaaaaaggagannaagcaaaatgggggaggaggaganggaaanggagggcaanaacaggcaaatcactttctgatttgataagcaccgatcggttggtcaaaaagacagagaaggaaattctgatcattctggcaaaaaacaaaatttgatcactntagaatttgttaaaaatttttcaaagtcggaatattcaattcgaaaaacgaatttataaaagtatttgctgaacatcaatttattatttccccatattctgagtaaattaggcgactttttttaatggctcaatgtttacgtttttaattttttactttttaaagagcaattaaattttgatattttaatcaattttattaattaagaaattaacaaaaaacatgaattcatcacataactcattaacttaattaagtgtttaatttgtattatttatgttttttgtgatttttaaatgctttttgctttttgttaaggcctcgccattgccaaggcgtcgtcgccgcccgttgcgcgaattgttttgaatgccgacgagaattggtccacttttcaaacacaagaagaggtgaaagttaaatattgctaatttaacaatttattttttcagggaaaaatcgacatttttgtggtaaactaaatatatttttcgaaaatttttggcattttttgccaattttgaggttttactccacgaaattggccatgcgcttggccttcgccattcgggagacgaacattcagtgatgttcccaatgtttgagcgttctgttggcgaacatgtaaaattaaattaattaatttaaaaattaaaaaaatatttaaataaaattctctaatttatttcagttgccagtcatttcaaatgatgatgtcgagcatttgagagcactttacggtgattaactgctaacaattcattaattattttcttaacatttgtgtgtgtttgaagtgctaattaaaaaattctaacattattaattaattttactctttgacaatttattatttatgatatttaaattattacatttttaattttttttaaattttttaaacccttctcttatgtcaatttgctaatcctttttttcttcgtttcggcttcatttgtttccgtatgctttttgttttgtttttttgccatcactttttgctttaaatatttttcaccatggcatttccctttgctttttccatttttggcattttttcagtgcttttcggtaataaaaatgatgggcccaaactgcgcgtgaagcgcagtagcagcgtcgccagcagcgcaagtgccgccggtgccatcgctggcggtgccaatgccaattcgaatgccaacaatgcgtttgcatcattttatgccgatgatgacaataccgttttgtgttgtgtgtgccctgcgccgatgacattaggcgatttgaagaaaagttcgtcgaaaaaaaataatgaaaatttattttgaaagctttgcggcttttcactatttagaattttcaaaaatccatttttaaatggcttaaaatagaaaatttgactccaaaaagtgcctgttttgctttttctgctttcttttttcgtttttcgatttttagagcctggtcttcccgggaggccaaaaaatgagacaaaaacctctccacggaggccccaacccaaaccacacactccgaaaagtatgccattacaaaaaaattccattttgtacctggacaaatcgaagaaaaaattccaaaaatgccaaatgcctggcttttgaaaattttgtgcttcacanagatataaattaattttcaggcttaatattccaaaataattt

SEQ ID NO: 5172 - DNA, 1093 bp, Heterodera glycines
tgcaggtatatttgctcatcttaatttattctgggggcttttacgtttaaaaaagtcaaaaataaattcctgaaatttttccccggactacacgatcttttatcaccataatgacaaaatggcgccagaatgcaggtatatttgctcatcttaatttattctgggggcttttacgtttaaaaaagtcaaaaattaattcctgaaatttctccccggactacacgatcttttatcaccataatgacaaaatggcgccagaatgcaggtatatttgatcatcttaatttattctgggggcttttacgtttaaaaaaatcaaaaattaattcctgaaatttttccccggactacacgatcttttattaccataatgacaaaatggcgccagaatgcaggtatatttgatcatcttaatttattctgggggcttttacgtttaaaaaaatcaaaaataaattcctgaaatttttccccggactacacgatcttttatcaccataatgacaaaatggcgccagaatgcaggtatatttgctcatcttaatttattctgggggcttttacgtttaaaaaagtcaaaaataaattcctgaaatttttccccggactacacgatcttttatcaccataatgacaaaatggcgccagaatgcaggtatatttgctcatcttaatttattctgggggcttttacgtttaaaaaagtcaaaaattaattcctgaaatttttccccggactacacgatcttttattaccataatgacaaaatggcgccagaatgcaggtatatttgctcatcttaatttattctgggggcttttacgtttaaaaaaatcaaaaattaattcctgaaatttttccccggactacacgatcttttatcaccataatgacaaaatggcgccagaatgcaggtatatttgctcatcttaatttattctgggggcttttacgtttaaaaaaatcaaaaataaattcctgaaatttttccccggactacacgatcttttatcaccataatgacaaatgggggcagaatggcaggatatttgctcatcttaatttatttctgggggtttttacatttaaaaa

SEQ ID NO: 5173 - DNA, 1120 bp, Heterodera glycines
  unsure (1)..(1120): unsure at all n locations
tcctgaaatttttcnccggactacacgatctttatctaccataatgacaaaatggcaccagaatgcaggtatatttgctcatcttaatttattctgggggcttttacgtttaaaaaagtcaaaaattaattcctgaaatttttccccggactacacgatcttttattaccataatgacaaaatggcaccagaatgcaggtatatttgctcatcttaatttattctgggggcttttacgtttaaaaaagtcaaaaattaattcctgaaatttttccccggactacacgatcttttattaccataatgacaaaatggcgccagaatgcaggtatatttgctcatcttaatttattctgggggcttttacgtttaaaaaaatcaaaaattaattcctgaaatttttccccggactacacgatcttttatcaccataatgacaaaatggcgccagaatgcaggtatatttgctcatcttaatttattctgggggcttttacgtttaaaaaaatcaaaaattaattcctgaaatttttccccggactacacgatcttttatcaccataatgacaaaatggcgccagaatgcaggtatatttgctcatcttaatttattctgggggcttttacgtttaaaaaagtcaaaaattaattcctgaaatttttccccggactacacgatcttttatcaccataatgacaaaatggcgccagaatgcaggtatatttgctcatcttattttattctgggggcttttacgtttaaaaaagtcaaaaataaattcctgaaatttttccccggactacacgatcttttatcaccataatgacaaaatggcgccagaatgcaggtatatttgctcatcttattttattctgggggcttttacgtttaaaaaaatcaaaaattaattcctgaaatttttccccggactacacgatcttttatcaccataatgacaaaatggcaccagaatgcaggtatatttgctcatcttaatttattctgggggcttttacgtttaaaaaaatcaaaaataattccctgaaatttttccccggactacacgatcttttattcaccataatgacaaaatggcaccagaatgcaggtatatttgct

SEQ ID NO: 5174 - DNA, 375 bp, Heterodera glycines
attagaaaaatgataaaaatcacaaaatttgatcattttttagtgaaaatctgtcaacaaattttaatcaaattttcaaaaattttcccggcggcgcctgccccctattcccaaaaagtttttttggaaaaagcgctcctcaaaaaagcgttttattgatttttaaatttggaataaaatttaaaaaaatgatttttgctttatgattttaactattcaattttgtagaaaaaatttcgctttcgcatttcgcctttcgcattttcgcatattttagcttttcgcatttcgcttttttttaatttcgcatttttcagtttcgcaaatttcgcttttcgcatttcgctttttatttttcaatttggcccatccctg

SEQ ID NO: 5175 - DNA, 3292 bp, Heterodera glycines
  unsure (1)..(3292): unsure at all n locations
tgtcgggaatgaggatggccaattgtcaaagtgggccaaatatttattaagaaattaattgggaaatcggcggaagaaaatggagagacgatataaaaatagaagagaactgcagcaggaagattaaaatataaaaacaactgaacttgcatgagaaaagaatgacaaaaagagggatggattttgggactgaattgggaaaatgacaaaataaatgatagcggtaatgcaaaattatttaaaattggatcggttgtccgttggtatgacgtcaccgcgcaccgaccagctgagctcctgcgaagcgtttaggcgtttgtcctccctccgccacgaaccatggaggcctcctggccgacgttgttgttggacagcggcggcattgctgtgacatcaaactgttactgaaatggaaattttgggagacgggatgggaatggcgggcaaattcgggaatggtccaattataattatcggacatattcgagacggggagagtttggggaatgtgggttcgtattgagaggaggcttggtggacgcaattgttgagcaaatgcctttttctcaatcttggcttttttgaattttgaattcaaaaaagttcgaggctggatcggctgcaattttggactgaattgtgctggatccgaatggaaaattttcgttgggaaatgcgaaaattgttttaagtggttttgatttgtgaattcagtttttgacttgtccattctttggaaattcagtggaaacggacacgaatttcgattttgtctccacatttttgatgatgattgtccgacttttttgtattgacggagttgtggtttaggcggtgccgaaaacttgggagatgtttgcaaattttgaggatttgcgtggccgtgatttgcttggtcttcgtctctcttcaaattctccaacaattttagcagatttccacttaaaatgaagtcatattccagtgggattttggtaaccatacaccatgtttctaattctgaatcgcctatatcaattgggacattgaccaatccgtaaacaggaattttttgtcctttgtaggtagcaaattcataaggcaatcctgtcagatcacattttggctgaaaactccattttagaaaatcggttttgtcactcacagacattttgaagagaaattcggggtttatgaaatttatttcggaattcgggtcgataattgacttggccttccaattttggactttcatttcaatggtttgacactttgagggcttcgggattggtttggcttcaactattctttggacaaggccattaaaaaatttttcatagacaaacggactcctttttttcatatccgaatttatttcgttcgaaatcgtgctgattggtgaccggcgttggttcaccatctcttcattcaacactctttcaaattggggccgcgaattcgggttcaattgggacgaaataacatcctttcctgcattttcctgcgtcgttgttgctctgtatagatccaccaattgcttttcttcctcacaaaaatgaatttggttcggtggaaaattttggaaaaattcgattgacttttcggtggaaaaagtttgtgaaggactgattggcgatctattgaaaacacttttctgaattcggtgccgatcctcagaattttctcttccaaaatttttaggaaaatggactcggttctgaacaagatcccgatccttaaaaccatcataaaacaaacctccattctcaacgttttttgaaaaactttcattttcctccctttcatatgcctcaactaataaggaagggtcaattggagaattgttgttgtcttgtcgccgctcttcattggaaatagaggggtgggacgcactgttgaaaggaaaagggaaatattgattattttggaggtggtcattgataaagcgttgttggcactgcgtatgacgaagtgcttgtggaattttgtaaaaattgggatttgtcgaatgaatttcaaaaaacatttttaaaaaatggggatgcttcttgtgcacaatcggtaagcgacggtttgctgtccgaaaggttggatttacgacgtttcggcaggagcgccaagtactgcgaaaatgggttgggggtctacgggaatacgaaatatgtggaatattgtcgggaattgaggatgggccaattgtcaaagttgggccaaatatttattaagaaataaattgggaaatcggcggaagaaaatggagagacgatataaaattagaagagaactgcagcaggagattaaaatataaaaacaactgaactgcatgagaaaagaatgacaaaaagagggatggattttgggactgaattgggaaaatgacaaaataaatgatagcggtaatgcaaaattatttaaaattggatcggttgtccgttggtatgacatcactttattaaaatatctaatgcgaatttaggcgtttgttataaaaataaaaagaaattttataaattttattagttcgagaaaatgagataataaataatcaagaagtaaatctattaataattattatgaaatatgagtagaataatttcttcttacttaaagcaatattttcgctctattttcactttatttttaaaaagcaatgaatacgtaattctttcaaccagtagacccgcagttgaattctgattgatatcatttgtccatgtatattaattaatgttcccaaattaaatttatgttatttgaatatataaatttatataagggaattatcaggattattttttaacttttttgtgaatatttaatcacatgagaagctcaaaaataacatttcttacatttatattttcaatcaaagctaatttttttttttgcaaataaaaaatatttaggcttttggcagataaaaaaaatagtttgggaattttagcaaaattttggcgatttttataaaaaaaaaaataaaatattgaaaaattttcttttaatatttttttacccttttcatgactttttcattttcaaagtaaaaggatttgatttacatgcttgcaaaatggtaaaaaatgaattatttgagaaattcacttatgtttgggcagttttatttcaattcgtaccaaatattttgccttttttggtttataacaaatatattgangggtttttggcaaaatattcacataattgggggtttttagtaaatataaatccgttccctgatatttatttatcagactanatgttttccaatcaaaaaaatcatgttttataattatctaaacgatttttattcatt

SEQ ID NO: 5176 - DNA, 1657 bp, Heterodera glycines
catggttttccggtcactaccatattcgtgctcccgacagaatgttctcgacagtgaacagcccgggggtgcgatgtttgactttggttttctgctgaccatttttaacacaatcatttttcagaataatgaacttcatattttgcatttctacgagtccaatgtttacccattcgccgttgaaatccatggagactttgctcggcttggtcgtattatttctggaaatgccgtcggtttggtgttaggtggtggcggagcacggtattcataaatattcaaatattttataatattttcatttaagaggtgctgctcacgttggcgttattaagtgagtgtcacaattttttctgtttttttaaattttcatcaattttagagctttacgtcagaatggcattcccattgacatgatcggtggcacttccattggctctttggttgggggagtgttggcgagtgacccatatgaccaagacggacttgagcaaaagacacacttctggtttacggtatgatagttctaacattaaacaatttcgttaattttgttcatttcagggaatgggttcggtttggaaggttcttatggttcgttgctcatttttgtttgtttccattaaaccttttgtcaggacttcacttatgggtacgtggcgcgtttcaccggttcccatttcaacagtttgttgatgggactgttcgatgaaaaacacatcgaggacctttggctgccttatttttgcgtgaccactgatattacgtgagtgattgaaaggaatataactgataaataattcattattccatttttatttagtgattctgaaatgcgtgttcatcgcactggttgtctctttctcactttttaaatcattttatcttttaccgatttctgcttcaattaggtcccctctggcgttatgttcgtgcgtcaatgtctttagccgtttggctgccaccgatctgtgattccgaagacggtcagtggtcggaccaaaacactttgaatggtgtttaatttaaggtcattatttgcttgacgggggctatgttaacaatctcccggcggatgttatgaggtcttgttgaattctcctgtgttatctcctttccctgattttcaggtcatttggtgcacgaactgtcattgcggtggatgtcagttcggctgatgaaaaagattttcacaattacggggattccattagcggtttctgggcacaattgagagcgctaaatccgtggtcaacgaaattgcgcattcttacgggccaggaaattcaggtgtttcgaattcccaaagaaaattccaacttgttttttgaggatcgtttggcttatgtgtccagtgtccgtcaattagaaatggtgaagaaagcgccatattgcaattatcttcgtccgccaattgcttcttttttgaccatggattttgctaaattcgaatctatcagggtgactttgtgaatttcgttgttgttgaagtgtcattcacaatatgtttttgcctttttagcgttcgggttatcgttacgcggcagaaattgttccaaatttggtcatgactaacgcccatctgaagacgcttattagtcatgaaaagatgcatgagcggttgctccgttgcggcattatttatcggcctgattcc

SEQ ID NO: 5177 - DNA, 1590 bp, Heterodera glycines
ccgataaaagagggttcctgtaatcaatatcacatgaagcattcacaattttcagacagaagtaagtttattcgtcgtctactatttggagaccgtttcccgttgaaggcgaattgtccattctgtcttcctctctgcaattgccactctgtcggtccgttgtccgtgtttggtttggtcgtactgtactcgctgaatgactcgcggtttgtcgatgctcttggtcattattggcttggccaaaccattctagtttttgctgctgctgttgaggcaaataattgtggttctgctgttgatggaagaactccccggtagttggttgtactgcttgccaaccaacgctgccgctgagctgctgttgggcagggaaatgctgcaacaacggagggaaaggatgctgctgattgtgaccagaccctccatcgcgagagtgctgttggaattggacagtgaaacgatggccagcggtggatgaagaggacgttggccgcctgtaaagcaaaattgaacggaaaataaaaggatgggttcgttcgtgtcaattacgtcgtcgagggtgctgctccgtgctgttttctcggctgttccgaattccctcccccgtgtcgtcctccaccgcccgcttgcgactgtttcggtgctctttgtcggctgtacgcgttgtgtggttggaatgatgagctcccaccacctcctcccgcatatttgtcgttgtattggtaatgtgtgtgttggtgtccagctcctttcgattgttttgctcctccccccgggcgacgttgctcgaaatgatccgaagatttgaatgggccgaatttgctgcgcgaacccttctcattggaagatgatgctaaactcgattgactgctttgttgctgaagttcggtggttcctcctttgtttggaacgaaatgcggggcactgctcgtagaaggaggagggtcagcattttcgatcacttttggtatctaaaagaaatactctttcataatacaacccaagtctgtcaccttgaaattcttgagatttggaaatgggaccgtgatttgacttatcacatttggcagtgccgactctttctttgccgtggtactgttcgccccactttttgccgtcgtattgccttccttcacccattttgtggtggtagtgttgctcgtactgctcgaagtcgtagaaggacggtgttgctgaactggcgaaggagaagacggtcgcccttccatttcagacgacttccgttgttttttcttcgttggctgcgctgtcactgtttcgtcttttcccattggtctcttcgtctgttgccgctgctgtttgtatttcgaaggtggtgccgcgctgcttgacaaacgcgcgacgggttcattgagctgctgctgcggtgttggcacagccaatgccggaggggcggcagtggacgacgaagttgaagatggggaagaggaggaggaagagtgctttgtggacgctgccgaggaggcaccgccctcctttttgatcttcagaaccaacgcgggtcgtttcgcagccaaagagtcgacactctctttcttcacaaacgattctttggacgttcgatcgggg

SEQ ID NO: 5178 - DNA, 2135 bp, Heterodera glycines
atagcctttgcgacggtattttcgacatttgttgttttgggttcgtgtccatctcggtcttgacgatcatggccattggcgttcggtagtcgccttgttcgcttaattgggaaaaagccggcgacgaagaagcggatgatgtcgtagttggaatgagtttgatgtcctgcaaaaatggcacactttgaggagggtcggcaacggccgtctgatcgccgccgctcgactgagaggaagaaacgctgcactttgccaacggcggaccacctttcttcgccgcatttccactgttttcaacagttccagccgccctttcgtctatttcgggaggcgttttttgatcagtagtcgaactttcggattggttatgagccatgagttcttttggcggaggaggtgggtccttaaaacgaaggcactattctgatgccaaacgatgggccaaaccatttcctcgtcatcggtcgaagactcgcaaatgcccatttcataaactgacatcattttggaacggaaatcttcctcaatttgggctgaaacaaaaaggggtaaaaagaaaagcaaaaaatttatatttacgcgaaatataattggacggagtagtgggaagaggcggaattttgcctattgtcggatggctttctgagtgttggaacggcgaccgtggaattccttctcgttgttcaaagctcacattggctggcttacgcggctttctcggtctgcgttgacccgaattccctaaaaccaaaaagcagttgattttagttataaagaaattgaaaatttaagtgagatttgataataatttttttaccaatcccacgcgtttttctgagcgtcccaaaatcggacggcgactctggcgtcccttcgtgttcgattgaggaggaagtggacgggtgtcggtccccaaaattccccgctcttcgccctcggccacgacgacgcactaccccagtcggcaattggtacggagtcgttgaaatattgccaaaatttggagtgtcctcaaatgaatggtccggcacgaaattgaacacgtcagaactggaagaatggcgaaggccaggttggctgtcctgaaaatgaacatcgttggcatttcacaaagtgtgaggatgccattattagtctgccggtggtcggatttatccctcccatcggtgcaattggctgcttcggctgttgctgtctgtacaccacgttcatcccaaatctttggcgctgttgttccactgacatttgtgccaaatgggaagagtcggtgtttccgcccgccacatttttctgctctattggcctcactctttggtcggaagttgtagaaaatgcgttttgttgtgtcaaagaggaaagactattgcccggatttggtgaacatcgtccggtcagtttggaagacggacgagtcaccgtttcgcactgctgcgactccgcgtcgtcggtaccggcgcccatttcggcgattgcctcctattcgtataacagactcaaactcaaaaacagcacacacacacacaataaaaatgctcaccaaatcagagaatgcattcaatgccatcgtcgtttccgtattttgtcgaaattgtcgtggcgctgccgcacctaaaaatgaggaggtcatacactctttggactttcatcaaaaccaattgattctgtgctctgcattcgtgcattgagtcggcattgaacggatcgaaaaccagtggaaagacatggcggtgggatcagttctctgtactcgggcacaacaaccttcatgaaccggagcaaagaatttccgtcattttcacgttccactacgaaggtgtgaggcgaagaataagtggcaaaaacgcgctttgattttgcggagttttgttgccccctcaattggagttgccgccacgaacacccaactttgctttccatagttaaccaaaagaaaaattgtaaatattttgaataagtgatgaaaaaataataattaataattattagcggaatttacgtgtgaaaatgttggagtaacaaatcgtgggcgtgggattgattcgagacgatttacaaccttttcgattattagaccacccgggtcttttattgttcaacccctgcaaaaggggtctttaggtaattgaacggggttc

SEQ ID NO: 5179 - DNA, 1223 bp, Heterodera glycines
atgtttttttattttagaaggtggtcttaaagaaagtgaacgtctctgaggattatgtacattattttaataagtttgggaagttgggacagaattatttcatcggaatcaatgaaaatgacgaggcgacgaaatcatatctcccgtacataaactgtcaggtgctttgatttgccaaactgaacaagaccctttcaatccaaattctgtttaacagaaatataataaaaatgactgcgacaagggaagaagtgatgggtgtatgaaaacggtcaaatgcgttgtgactgacccaatccgcggctcacagcaattggtgggtttaatatgaatttgctcacaaacactgaccaaagttcaaagggcactcatttgaccattgtaccgtttaggcttgcatggctaattattacctacgcgacgcatcgccaaacaaaagcttttctgagggcgacatcattgagccctctctgatggactgctggcagcacgaggagaggcaattggcggagtgtaagcagcaggacaaatgtgtggcggacgtgcgcaagacgggccaagccaatcagtcgtcactcttctgctgttgccgtactcacaattgcaatcgacagatggtctacgcggaggagaaatacattggaccatcgaccacgagtaacaaatcggtcatttcatttcccacccaatccttttttgccttaagcgtcctcttcaattgtcgactttccattgtccgttgggtttaacctacttcaattggccatcatcttctttaccgtccttttcatcgccattttcgtcgtcttcatcctttccatgccaaaattacgaaaaaaaatatgcaaacggagcggaactgcgaagttctttttgccgttttacagaaacacaaatgacggaaaggaccagcggaaagaattactcgccacggaatacgacgggcaaatcactttaccagatggagaaaaagtgcacaaagagaaaatcactctgcacgaggttctaacggtcaaaaggctgatttggtcgattttcttttcgagagagtgtccgttggtcgctttggccaagtgtacgaagcgtttgtaagcggccctgactgttgggctgcggttaaaatagtgccgggccgaaaaatcggcggttggcagaacgaaatggtgccgttacgtttattttggttaccattccctccccttgtgccgctttaggaaatgtat

SEQ ID NO: 5180 - DNA, 1068 bp, Heterodera glycines
ggtaatactttggtttgtcccccccccccccttttgagaaaataattttttttaaagttgtataaaatactttattatgggcttttcggggtcgctgatcacggatatgacattcatttcgaacaattccgaaacccgtaaccgaattcgaaccaaattcgtaaaattctcaaaaaaaggggggggggcaaaccaaagtattaccaaaaagtctatattaagtttaaattggtcattaatttttatttgctacaaaaataattaaaccgttttagattcacagagacatcaaaaggtgagtgttttgttgctgcgtttgtatttttgcgttttcagtaagaatattttggtcactgctgggatgggcgtccgaatcgccgacttaggacatgcgatgaaatgcgaaacgcgtgttttgcttcttgagaaaatccaaggctatgtaagcgacgatgggttgtgcatttgaatggggaaaccattcgatattttaacccgaagttgaaggcaaatgccatcaaacgttgcatttcttttttccttttgccaattttcaaatgtgccttaggttggcaccattcgttacatgtgtcccgaagtgcttggaaatgccaccggaacgaccaatttctacttccagcaaatggacgtttactcggctgccctcgtcatttgggaagttctttcgcgcaccgaaacagcggaaacaaaaagcggtaggcttttgtacagagacgggcaaaataaaacgaaaggccccacatttaagacatggagccgtatgctttgccttatgacaaggaactcggccacaaaaacccttccatttatgatatgcgaaacattgttctgacgaagagaattcgaccgacgacgagggcatctctgagtcggaataaggtgaaacaccgatcagagaatgcgtccccctcccacgaaaatataaaatttttctagtattttttagaaaaagttaggaaattttttaatttcggggtaacgacacaggggaaacgctgtggggggagatgaattgcattcacattcacttggcacgagcaatctttt

SEQ ID NO: 5181 - DNA, 3737 bp, Heterodera glycines
  unsure (1)..(3737): unsure at all n locations
tcaatggacaatccgtcactgatcaattgatcagtggacaatccgtcactgatcaattgatcagtggacaatccgtctaaaaacttaatttgactcaaaaaatgcattcattgtgaattcgtaattttattttctgagcttttgctcttaccgtcagcagtgaccggttgcatcggatgagcttcaacaaacacctcgtcctcctgattcgacgactcgtcgagctgtaaattgtttaaaaatgagataaattaaatttaataaaataattaaattaaatttctgaattaattttaataaaaaaaattacaaaaattttaattgagcctgcgacatttgtaaaaattcatttaataattaaacaattaattaaatttaaaaataattttgaaatgctgatttttaagccaaaatcaaaatgctgatcttgaaaattcaaccctgatttactcaccgtattttttttgccacgtgcccgcgtaaatttctggacaacgtcaattgggccttgggaattgcgtggaatgcctccgggtaatattggggcaccttaaaagaatgcaagattagaaacataaaaaattttttaacgaatttcgttatattttaccaaaatttccctcccggtgtgcctatcggcaccgctgcccaaaatttttttttaaataaagacccaaaaattatcaaattggtcattcagataactgccattttcgcctacacctccctataattttaaaaattgagaatccgtcactgatcaattgatcagtggacaatacgtcactgatcaattgatcagtggacaatccgtcaatttttaaaacatattttattttattatgaaaataaaataatttctaatttgataaaaacttaatgtgactcaaaaaatttaacttttaattgtgaattcgtaattttaattagagaccggacaagagggtcggtcgaacggtttcggttaaaaaccgaaaaaaaaccgaaaccgaaaaaaaccgaaaaactcaaaaaattctcggtcgaacggtttcggttaaaaaaccgaaaaaaaccgaaattgaaaaaaccgaagaaaaattttcggtataccgtttcggtttcggtttttttgaatttttttatcttttcccaaaaaaacaataaaccatttttatcaatagaaaaagcgaaagatcacctctgagtaacagcaaaatttagttttttggttagtttttacgtgttttgctccctaaaaatcattaataaaaaaatttaaatgccttttttcatgccttttcgggatttttgtgccttttttcagtgccattttgcgctttttggtgccttaattgtgagctctagccataactttagggccggcggtgctgataagcgccgccaggaaatttttttttgtaattttaatgctatttgtgagcagattttgtctaaaaataccaaattttgagattttgggctaattttttaagaaaagatagctttttggggggtcggcggtgccgataggcgccgccggaggaaaattttaagaatttttaatgaattttgttaaaaaaatggccaactgatttgtcaaaaaagtcggtcgattgtttcggttttttaattatttcggtcgaacggtttcggttaaaaaaccgaaaaaaaaccgaaaccgaaaaaacccgaaaaactcataaatttctcggtcggtttttttcggttaaaaaccgaaacctaaaaatgaaaataccgaaaaaaccgcaaataaccgaccggttcgatctctacttatgacagtactcagaatcatttgactctctattcttaaaagattatttcgcttttatttgctacctttttaattgtttatgatgcaggtaaattcaatttgcagattaatttaaatctaattaatataattatgtaaccgaaaattatcatttaaatttccgattaaattataccaaaaaccaaaaattttaaaatttccttgtgtatttttgcagtttttcggcgttttccccaacaaccaattgcccttcgctttccttttgaccgttggcattcgctgggccatcggttcgcttggctttctgctcaacttttccctcgtttttgtcacttggaggacaaagtccgctttttctcaattttaaatataatttaatttaattattttaaaattatttccctttatttgtgccatttaaaaggacatttcgtcagttgtgcaactgtttgatcgccgccaatgccctcttttccggcctttttggcctttcgctgtccatcggttgggtatttgccctcagcggacacccttttatgtttgaaggtcccaacaaattttcgaaattttttctatttttcaatatttttaggcccttgtgccgtcgtccaaaccgttcctttgttatgccgaaatgttggcctaagttcgcttttttggattggctttgatcgccttgtcaatgcgttgttcgccaattcgtttatgtacacatttttaaaaatgttaaaatgatttttaattttattcagacatcgccaccaagcgttctacgcttttctgatcattttcagcacttcgcttcattcgggatttattatcatttcggtcttttcgatggccattgattatccggatcagtgagtaaaatactcggcaattaattggctaccgatgattagcgtcactctgtgcttaactcacgacgacacttactttggcccaatggcactgcctttgcttctcgtcaacgttttactgagtgcgctgatctttctgctttacgttctcttggcgtttgtggtcagactcaagaaggacatttcaggcaattcattaattgatgacccatccaattgataattattattaattactcttaattaatcacccattcactttgaattctcatggcagattatgcgtcccattattttatgttataaaaaccttanttaaaatgtcggttcgatttgatttaacagaattgttttgtaataaattatttatgtgtctggcccttaaacctcaattagtttttgtctgagccttctaatttatttaccatttaattactgaacacaccagggatttaattgcattggcctgtggagggctctaaagcaaagccagaaacacctggcgtgggtaatatttgtgtctgacgcatttcgccgattatcattcaaacacaaaaatatttgaaaaatattttgaagtaaatgcgctgtcctattaaaaatgaaatcttctattagcttcttgtttttttataaaaaaataaataaatcgttttgatgtgtaaaatttcacgggactctaaaataattatgggacgcataactcaccaaaacccctttttatcctttcgttcagtgaatgccgaaatcactcggcgccttctccgttctctgatggccattatgattgtgatggtgaccggcttcaccctgaacaattttgtcaatgttttgttcgatttgatggtcataaaagccactgatattgccaaagtgattttttaaaatggaaattttggcaaatatttgccaattttaagaattggcaatttaggtttatgtgtccatggctttgtcctgtcttatggccatcgcttacgcgagcaatgcgccgttgcttatcattttcaggtgctaaccaaatgcttaacaatttaaaacaacaattaaaaatacaattaggaagtggcgaatatcaaaatgcgtatttgcgcattttt

SEQ ID NO: 5182 - DNA, 4997 bp, Heterodera glycines
  unsure (1)..(4997): unsure at all n locations
ggaggaaaattttaagaatttttaatgaattttgttaaaaaaatggccaactgatttgtcaaaaaagtcggtcgattgtttcggttttttaattatttcggtcgaacggtttcggttaaaaaaccgaaaaaaaccgaaaccgaaaaataccgaaaaactcaaaaatttctcggtcggtttttttcggttaaaaaccgaaaccgaaaatcgaaaaataccgaaaaaaaccgaaaaaaaaccgaccggtccgatctctaattttaatttcgcattaagcttttggtcttaccgtcagcagcgacaggttgcaccggatgagcttcagcaaaaacctcttccgtacccgactcatcgagctgtaaattgtttaaaaaatgaaaacaaataaaatttaagaaaataattaaattaaatttttgaatgaatttaattttaataaaaaaaagaattataattgggcccgtgacatttgtaaaaaattaatttaataattaaacaattatttaaatttcaaaattgtaaaaataactttgttttttttggacctatttttttttttttaaaaagcgcgccgcaaaaacatttttgttgatttttaattatttgggataaattatgaaaatgctgaatattaacccaaacttaaattttggatgcaattaattaataaatttaaaatttttaatgggtgtttttaaattaattttttattttggactaaaaaactaataaaaagcaatcgataaattaaaaaatgaattatataaaaattaattaaaaaataaaccatttttgaaaatcaaatttcatttttttcccacccaaaacttacattggccgcgatccgacgagacctccttggtgcatccgatgttgaaggcagcaatgcatcagtgccattgtccgtcaatgtttgcaagtgatcgggtgggatcacatcggccaatgttgtcccatttgacacacggcgagtaattgagcctaattaaagcaaaagctctttttagtttgggacaacaatcaaataaatacatttttttgagagtttaatattataaaaatataaatcaaatgagtcagacgaaattattgtaaaatttggaatgcacgattagagaaataatttaaaattttttttgacaaatttcgtataattggccaaaattgccctcctgatgtgcctatcggcaccactgctctaaatttttgttgtttttaataaggacacaaaaattaacaaaattggtcgtttctgttggataaaaaaatatttaataattgccattttcgtccacacttcccctataatattgcctcggaaaatcccatccctactttgagcgtgcgctttgtcggcactttgaccagcggaagcggcattgttgacagccgcgagccgacgagacttccgttggacagtggcgctgcgcgtccgttgcgcctttggcgtgtctgaaaaagaattaaaaaaatttaaaatcaatttaaaaaaaattaaaaatcaatttttaaatgtaaatttattttgataaaatgaacaactaaaacccagtcctaaacataatccatttttatatttcatttcagaagactctaggaaaatccgtcactgatcaattaatcagtggaaatccatcactgatcagtggacaatcgtcactgatcaattaatcagtggaaatctatcactgatcaattgatcagtggacaatccgtcactgatcaattggtcagtggacaatccgtcactgatcaattgatcagtggacaatccgtcatgaccaattgatcagtggacaatccatcactggtcaattgatcagtggacaatccgtcaacaaaaattaatttttcaaatttaaaactggcttcaactgttaaaaatatcgatttctcaaatcaattcaaaaataaataaaaaatatttaataattgccattttcgtccacacttcccctataatattgcctcggaaaatcccatccctactttgagcgtgcgctttgtcggcactttgaccagcggaagcggcattgttgacaggtgcgagccgacgcgacttccccggagcagtgccgcttcgcgtccgttgcccctttggcgtgtctgaaatcatccaaaaataaacaaacaatttttttatttaaaattttattaaaatataataaatttgataaaaacttaaaataataattatacccgtccttggaaagtccttaaccctaagttgaggcaaggttaatgaattaacaatttctaatgaaaatctgttaaaaaaactttttgttggttaataaaaaatttttcaaaattttactggcaaataaacaatattgaacacgtaaggctaaactaatcaaatccaccaaaaatatttaattttggttggttgttactggaaaatagtgattcattatttcaaactgatttggcgctattgtcctccgccccgtccaaaacataccctccacagtgaaaaatgaattggtcggaactccgttcgcttcgcatttgtacttgccgctgtcatccgggtccgggttgttgatgatcagcgtgatggactgcttgtcgatcagaattttgtacttgagaccgtccgagaacagctccttgcggcccttataccagcgcactgaaaagaaatattttggcattaaatttaagaaatttttaaaatttattttttttaaaattaatatatttttattatcctaaaaatagatttgaagatatccttaattttatcatttattttttggtgttttattgaaattgaaaaaagtaattgattatgattttatcagtcgtttaaataatgaaaaatgatcaatttttcaaatttaattttaataatcacctttggcattggcgcgcgagtatttgcatttgagctcggcaaatttgttctcctgctgctgaaattgcaacttttctggcaatgggtccacccatcgttcttgaggcacttcggtgggcggctcggctgctttgggctgaaaaagtgtaaaatatttttttgttttttactaaaaattgcattttttttttgttgtaaagcataaaaaagactctaattcttaaattttgactccaagataagaccgccaactatcccaaggagggagaggggggggggggggagccatagctaaatgattgagccatttttaaaaaattgataaaattaaaattttattttttggacttatttgcaaaacttttttgagcaaacatttaatcaatttttttctaacaagggaatatttctgacagtaaattcaaatcacttttaaaccacttttattttgtggagataattctatcataaattctcgacctttttttgaccctcaccaacaaactgatcagaaaaatgtgatcaaagtttcaaaaaaagaattaattaaaaaatcaaaataaaaatcacatttttaaaatatttgatcaatttttcggattaatttgagtcaagacaatatatttttatacggcatcatgacccacctcttctggttcaggtgatgccgccgtaaagtcaatggtggtgcgaatcgatggccggcggacgggggaatgtgttgcaccactattcgaaataaattattattttttaaattaaaattaaaaatttatattatttaaaattgatttaatgctgatctacctatgcactcgttgcatatgggtagaaagtccacgaggcgtataaaaaggctcgtgactacattttgtgcatctccattcctggaattaatttggttaagtcacgatttttacattgatcgaaaaatcgttgggcaaaatgcatgacttgatcatcaaattattcttaaaagttttggaacgtttttgaaaaaagcttatatctaaaactttctaacaaataagtacaaaaaagaccgcttgtcttcatgacatttctttactaacatatggtccaaaagttactgtatttcatcgagaaagtggacccaaatcgatcagctcaatttttgtgacgcaaaaataatcacaaaaaatgaacaaacgccaaaaacccaattttagggagagaaaaatcatgaaggtttctggaaatctaatatggtgctgataagttttttaattgctcaaaataactttttttaaataatgaaattatgcagtgaaattagaaaataattagggctagcaagatcacttaatttgttggttcaaagaaagttttaaaatcagaatttttgatgatcaaacttgttttatttgtaattaaaatttcaaaaaggtatgaaatgttgttacatatttcgcacattaaaaaccaaaaattataattgacccaccagaggttttggtggggcctccggccttttgtcacgtcgggcggacaacgagcgggacctttgcgcgtctatttcattgtgccattctaccaacgtgttgtcctcggacttaaattcgggaaaattaatttaatatttatttcaaaatgaaattttttaacattttgccttttttggcattttgccgttttggtgccttttttggcgtttttacaaaaaaatccattaaaaaatcatttaaatgactcaaaattaagttatttggttacgttttcggtgttttgctccctaaaaaaaattcatcaagtaatttgttaaatcctcataaaatttattaattctttaaaaaaagttacctcccagaaaaggtggcccgtacttctgtgtgcatattcttttctccactttgcccgttgttggtcaggctagcatgaagaaaaaaatttaaaaaaattttaaataaattaaaaaagcaattaaattanaatttaattattatacccacagtaagtgttttgttgtccattgaaggaagcaaatattgtagaacaaatcaaagctaaaaaataaattttaatataaattttattcctaatcgattcactaataggggaagggaaggaaaaggaaaggaaaggaaaagggagaataaaatttagttgtgcataaatt

SEQ ID NO: 5183 - DNA, 5518 bp, Heterodera glycines
  unsure (1)..(5518): unsure at all n locations
aattaatttaagcctgttgaacggattttgaaatgcaatagttgttttccatacatgtttaattttaccaaaaattggcggtattttgaggcaattttgtgaataattttctacggtaaaaccgggtaaacggtaaataccggtttttacagtaacccaaaaattctataatacatcaattaaagaacagaacaaatgccatttcgcacctcaacaccacaggctttatcagcagcaaatcctgctttgagaagccatctttgtgcaaaatcctgaaaatttatttttaatttttttttcaataaatcgttttttcccgtttttgggcacctcatctgcttcaaaattgtgcttttgccgctttcgccagcgcctaaattaatttaaaaatttcttagtgaatttttaatgcattttcggcatgacaaaaaatgtcatgccgaaaaaagtttgaaaaattggtttatttattcgtttaattaattaaataaaaatacattttaattaattattatatttttacatttattaaattaattaattcaaataaattttaaataataattattatattttattcgcggaataacggacctaacagaagcaatttgatgatgcgcaaattcatcgattgctaaaataattggaaattaattaattaatttgtttccacaccatggcacctaattatatcatcacactgacattaatactgagtgccatcccaattgataaatggtacggtatttgtacggtatgcccacaggaggtcttttatgtcccattacggtgcgcgtgctctatcattacggtcagtgttcctccgggtacagtatgccattcaataatccctgctgcagcacagcgctacagttaacaaatcccaaccaacagtacagtatattttccggtctctccggaaatatacggtacaaattggcgtctcccatcactcttctgtctgacctccttgcgcaactgttcctcaatgcgccggttgtgccttttctggtccttctggtccttggaagcgcaatggcccattgttgtggcattcaaaaagggctgtaatttatggaggtattttcattgggagggctgagacaaaacgacaaacaattttggcacgaaaaaaccgggcaaaatgtcaaaaaaaattgtcatgaaaattctctggacaaaatatcaactagagatcgacattttgaaaaaagcctggacctggacctggattccatgttggacctggatttcctggacaaaaatccaggaaaatccaggtccaggaaaaatccaggttgccaaaaaatgacctggacctggatccaggaaaaatccaggcctggatccaggtccaggtcgatctctaatatcaacaaatttaatacaaaggactcatcctttcgaacaagatagcgaaaatttgattcaaaagccgtgaaggataataaagtcaacaattttgatattggaccaaataccgactaaatttgccaaaattggacaaaatatcgaaagttccgagacattttaacagatttgccgagccggaatggtcaactggaccaaaatttaatgtaaagttttttgaataaaaattgattattgtctcgactttttgacgaaatgtccgttatttttttggttcggttgacactttgtctcggattgaatttaaatttaaaacattaaaattaatttgataaccagtaattaatcacattgacataagctgttgtggagaaacacctgcaaacaaatgcgctgcttccgtcacctccggcgacgttttgccaattttaggagacagacggaaatgccgctttttttatggtgcgcgaaagaggggcggacggataaagaaataattaataataattgtttaataataggacgtcattttttaatttttttttcgtccgtccgtccaacaaacaagccaaaaaattcttaacaaaacacaatttaatcaggatattagcgccgtagccaaagtgatgtatttattgtatattatggtgtgataaaaatgatagcgccgcgggacggcactaattaacactaattagtgcctgaaaatttaatttgtttttgtgccgaccgccgtcgccgccaatttgatggacttttgattggattgcacttgtttcttctcgtcataattagggatgccagaggcatccgtgcccacgccacacacgagattgtgccattccgggatgggggtgggcacaggcaacaattgccaggggtcgccgaaagatacgcaagaaaatgccaaaaatgtgcccctaaggggagaatggagagaaatattgccaaacattgaggggtggtaataatgggatggaaaatgggcaaaattaacagagtgatttggcaatacatccaaaatggacaaaagtaggaacaaccaagaaaagaggtggccaaatgtgacgattaattttgattgggaagaatggccaaattatattaaaaaaatgccaaaagaaatggaaaattagcaaaggaatgtgccccaaaaatgccaaaattttcaaaatcgcaatttaaaatatttaacggcatttataaattatttaatttttattttaatccattttttatgtggcggtgtcttaataaattgctgctgctgctgctgcttggaacacacaccagcaggaagcagcagcccatgcagaaaatgggcacaaaaatgaaacaaaaaagtttttccattaagaaaatggcaaaaattgccgcatgatggatggcattagccgaaaaagcaaaaagcagggggggggggaaagcggacggacgggcgatgggctggacgacgacaaaacaacaacaatttttgtggccctttaaacattgtgccaacggcaggcacacatggcacggcacggcgggcggaagagcggcgatgatgatgggactggggagaggggggggggaacatttcggcacggccatttcggcgccagaaacttttaaaatgtttttgccgcttttttgctggtcagtaaatttaagacattcccggttatcaattatgctagaatcaaaatcatctctgttcaatggcagcgaaaaaaatgccagaaaaagtcaattttttgagtgttccgggaccttggtactcagttgtccgctaccaggtcccggtcccgtggcactctacttttttttaccgaaatggaattttttgaaattttgaggcgtaaaagaattggcagcctctttccattggcaccaattttataaaatttggtgaccaaatacaaaagattcagcgaataatggtgccgaaacgtcactgtacgaaggagggggggggggatggcatggcacccaggggagagggggaggagggacagcggcggccgctcttttatcccatgctaatgccattttctctgtctctcgcccccccccctttttcccgcccgtttttcgctctctctctctctctgtgtccatttatggcgcgtgggcgggacccgcgctccgggggacacagggacggcacttgtgccgtgcctgcccaacccccagccaatcgacccaccaaacggtgtcccccccccctgagaggataatcaattgagtttgtgttgtttttgttgcctccttacaccaacggcgctgctggcactcaacagagcaacccaccagccgcagacaatgtgccattcccgtccctccccattcatccatcgcttcgttctcctcgagagtgataacaacagggagggagggcgacggcaaaactgtcgagaatgggaagggcgagcaaaaattttggggtgggaaagagctttgtggcttttccacttatggcacatgccgtaaaaagggaggggggagcatcattaagcgttaaaggctttgtcaaatacatgatgatgcaggacactgaaagttcgaaatttgggagccgaaattcaaaatgggcgataaaaaatgttgaaaattccaaacaaaatgagcattaggatgaagatgattgagcgtatatatctctatattgaccttattgtcactacacagtgtaaaaaataaaaggtaacccgcccggtgggactcgaacccacggcacttccaatccgccgctgaggaatgccctccctacccaacccaactgaactacgggcacatctttcaccccttcctgggccgcaaaaaaatctaatacatacaacgcaacgaaaaatgagtgtatttagcgaaaaaatggtttttaagaacaattttcgaattaatttttggaatattttttctcggcgacattttgtctcggcgatgttttgtcccggcgacgctttgtctcggcgacgttttgtctcggtggcgttctgtcccggcgacgttttgtctcggcgacattttgtccggccatgtctcggcgacgacgtttcggcggcgatctgtcgtcagcgacggtttttcctgctccgaaaagcatcgcaccttaaaattttaaaaacacattaaaaaaggtctcattattcgaaaattgcacatatttcaagcaaaatcaaattaaaattacacaaaaattcgtcaaaaattagtttcatgcccgtgtccagacagagatttgagccccggatatttgtgcctttgtccaaatttggaatacgaattcggattcagacttgaattttttttaaagccttggtagcataattacgaaaacacgatcttttgattcattagaagcattaattctgttgtttgaaagattcattatttttttttcaaaaatttgctgactatcaaattatcgcatacaatcatatttatttaaagctgtttaggctttcagggattgaaaaaacttaagtttgaacttgatttttgacataggcgaaaaattagcattttccttgcatttcacttgaagacccctcacaaaaaaaaacaaaaattccgtccgtccgtgtccccaataccaatttgctgggccgcacttttgcgctgcagaatctgttccttgatgtctcgcatttcgaccattgtcttctccttgcgcgccttctccggctcaacaaccgctttttggtacaactgctccaaatggtccgaaacccatttcaaatttggtgcctgaaacaaattgaaaaaaatttgacaatttttagtgtcataaaaatgatcaattttggtgcacctttttgcgcgtgtacagctcccaaatggtctgtgaaatggcgcgcacatcgcggtcactggcatcgaacagttcaaacctggaaaaaagcacatttgacagcaaataaaagaattcggagggtggaacccaaacttttttttgttcttcgggtcaagaaaattttctccattgttatttttcaaaaaatttaaacgccaaagcgaaaaagcaggaatttgtagtggttatgcgacaaatcgacaattttgtcattttagggtcaaattttcgaataatatggggcgccgacgggaaaattttttcctgcaatgaaaatttcaatcaaaccccactcccccaaagatnaaacag

SEQ ID NO: 5184 - DNA, 1430 bp, Heterodera glycines
gaatttcgcttgcactgtactttttttgatcatttatcagctggtcaaggatgtgcagatagatgtagatgagtttgtgcgggtggtgaacctgtcagcaatttaagaatttcaaaatttttcaacggcatcattcattggcaccgccatggctcatgtccccattttttaaaataattttactcgaaaaggatgactttttgagggcaaaatcagcgtgtcattatctaaatatattgttccttatattgaaccaagtgccaggaacgaccaaatttaaaaaacccgaaaaaattttttcatccctctcctccaagccccgaagattccaaatcgtgggaccgtcgcaactccttcccctttcaaaaaatttttttttctatccgtcccccaacttacgtgcacaacaaatccgagcacattaagcagtcgacgttccgctttgatcacaatgttcttcaactcttggtaccttttgctgcacaactccaagtgctcaaacctgaacaatggacaaggggacggggcaattattcaaatggaatttaaatggcaaaaaaaaaaaattgtcagaggcgatttgggaggagttaaattagggtttgtcaggggtactgttgttaccatcacctctcctaatcataatgccatgagcagctccactctctctctctatctgattcctcaaagaaattttggggattaaaaaattacgcgaacggacaaattagtcgtcgtagaaaacaccattttttccctttacaaatgtgtgaaaggaacagcagcaaatgaacacacacaccaaccaaccaacaactgaccttgttcgtcttcttctccaccacttttatcttgtgtcaaccaaaaaaaaaaaaccgcacgaaaacccagcggcagcagcgcaaaatgtggggggggggggatttctttcgaaaattcgaattgaatgctaatgaaaaacagagaccggatcttttttataggaaaaatgccaaaaaattgttttaacggagaagggcggtgtccattagcagttttgttaaattttcaaagatttacgggcatttgcgctgcagaacaaaaatactttcttctcactttccaccctcccattgtttgctgtgctgcggccggggaattcgtgcggactgtcaattacagaaaatgattgaaatggcgcgaacattctctgaaatggtgacaaaaaaagagcagaataacggagacagaaaaatgcccttggggaggggtgcacctgagaaagaaacaaaagtggcggagtcgaaacgaacattcattctttggtccattgggcgggctacggttggtttgtgccaaacaacttgctgctgttgctttgctgtcggggtgttttgacaattcatacaaatgggcaattttcgaataaattttttgaacaattttttttt

SEQ ID NO: 5185 - DNA, 1386 bp, Heterodera glycines
  unsure (1)..(1386): unsure at all n locations
atcatccatccattcatttagtcattcatttgtggaggggggaaaattgggagggaatagctaaaaataaatatgaaaacaaatcagtggttataatgtgccaaacaaatgacaaaaaattggcgcttgagaattcaatcatttgcccattttgggcagaaaaagtgccgtaaatgaagagaatttaagattttttgaaaaatctaaatcactaccattttagaaccaacaaacaacacatcaatcacgatcatcatgagtgagagagagaggaaggagctgtggcattttacaatcattttttaaaagtttacctagagaaattttgaccaaaattttttaagtggctgttcaacggccaacaaatgcatgaatagttcaaaaaactgtcaattatccaaaaaaatttttgggtgtttcctctgaacaacaaattttcgcgcaaatccatgcctaattaagggaaaaaaattgtttactttttgctcagcttttgcaaatcttcgggttgttgtgatgcgaccgcatttctccgatgatggatttgcttaaggcgattgtacacattgagcacgtcacgctgaacgcgataattaaaggggaaaatgggaattataattggaagaaaaaaaaacgaaaatttgattccccccccccatttaaggttcatttgttaggaccaaatgggctggagtggtttcagaacctaaaaaaattcaggaacacagaattttgggcgctatatggaaagtcaccgattttgaaaaattttttcacttttttttaatcaaaatttttttttgtttaaaaagtcctgaaaccaagtacccgggggttttaaaggtcgctgatcacgactataacaattatttgggcctgttaagcaaatttggcgctagttataaagtgatagattttgtactttatcaaaaaccataggggggacccttttgttttgtaaaaaaatttttggataaaaatcgtgaaaatactttttattcaccataattgtgctattaatactcaattttcatcattatgtgtaaaaaaacaaaaaaaaaattttgaccaaaaaaaaaagtgaaaaaaattttcaaaatcggtgactttccatatagcgccgtttttttattccgatcaattaataaataaaaaaagcattcggaatttttgtcgaccatcaaaatcacagcaaaattttgtcatcgctcatcattttctgaaacactccaacacagtttgtttctgactggggtaagtgattgttgtgaacgggttggggcgcaaggagtcgcagcgacgagttgggcatctgctgggcttccgattgtattgcgagaaatgacaaggaagtctttgatggaanaaagtatatttattttattt

SEQ ID NO: 5186 - DNA, 4857 bp, Heterodera glycines
accgtttcttctccagaacgtgttccgcgcacttctgctccaatcgtttcttctccagaacgtgttccgcgcacttctgctccagacgtttcttctccagaacgtgttccgcgcacttctgctccaaccgtttcttctccagaacgtgttccgcgcacttctgctccaaccgtttcttctccagaacgtgttccgcgcacttctgctccaatcgtttcttctccagaacgtgttccgcacacttctgctccagacgtttcttctccagaacgtgttccgcacacttctgctccagccgtttcttctccagaacgtgttccgcacacttctgctccagacgtttcttctccagaacgtgttccgcgcacagctgctccaaccgtttcttctccagaacgtgttccgcgcacttctgctccagacgtttcttctccagaacgtgttccgcgcacttctgctccagccgtttcttctccagaacgtgttccgcgcacagctgctccaaccgtttcttctccagaacgtgttccgcgcacttctgctccagacgtttcttctccagaacgtgttccgcgcacagctgctccaaccgtttcttctccagaacgtgttccgcacacttctgctccagacgtttcttctccagaacgtgttccgcgcacttctgctccaaccgtttgggaattagtcataatggactggggagcacaattggaaggggaaaatagggctaaaaaaagaaaacggaaaatgcggaggaattggaaggggataggcaaaagagaagaaatttgtagaaatgaagtgatgcctaaaatttgtctatttatatattgctgaaatcacatttttgatgaagttggtttgatattcaatttgcatttgcatctctcaaaagctataaaaggttgaatattctacagtttccaacattcaaaattggtgaatataagcagcaatcgttggatttgcgaatgaaatttaatgattaaatttttttcggttttcagatgggtttgcaacgacctttggattggaaggacattttcccattttttggtcgtcctcaactcggcctcaaattgttcgacccgtttcaattattttgtccgtgaaatttgtcccattatttgtttaggcatttctgcgtgccaccatttctccttcctctgtcagttacaatattaaattcgttcgtttttcgtcttccaacagtgattggctgtgaagcgatgcccaattggagagacggcggcggcggttcagcggaaacccaaaaattcggcggacgatttgaacaaatgtcatcttttatttgtgtgatgccaataattaattgacttggcggtaatactgccgatggtgccccccttttttgaaaaaaaattttcaaaaatttttcagagataaaattgtctttagggtttttagggccgtagaattcgaatctgacatccgttttgacccatttcgaacctcgaacccggattcgaacaaaaattcgaaaatacaatttcctaataattcacatttattcactaaaatcggttcaattgcattaaaatagttgttttgcattgatttgtgtgttattagcatttaatataatatggctgcgttggaagaccttagaaattttacattgaaaaaactgcacgataattggcgttgaatgacattgagtttgatgcttggcttgaagatattggtctccttcacgcacgtcgtacgtgtccacgatgtggtggagacacatcgattaaggcaaaagaaggccgccgttatggaaactggcgatgcaaaacaaagaattgccgaaaagaaactggctatttggtcgggacatttttcgaaggttctcttgctattttgtacacagttagtggtgttctagggtcaaaattatcaaccaagcaaacttttgaattgacttatttttaggcgcgtaaatatgaaaccattgattacattcagcaggaaactttgtcgattggtttaacttttgccgtgacgtttgtgccgaattctttgtaagacgacccattgccatcggtggttaaggtcctagccaatttttttctggggatttttttgtgtgtaggaagattagtcgaaatagacaaaactctgatccagcaatacgtacttcctggtaaaacgattgtcagtgacgaatggcgatcgtaccgcggaattccgaatctcccgcagaactatgcccatttgaccgtgaatcattcagaaaactgtgaatcccggaaaccgtcttacacacacgcaaatatcgaatcattatggaagaaattgaaaaggaattttaaacaacagttcgggaacaaaactgaaacatatgatacgtattttcccgaatttatctgacgtcggcgttttggtgatcgtgatactgttttttataatttttggttgcatgtatctgagttttatccgtgccaataactgttgcaaggctcactaacacaattgaaccgattttattgaataaatgtgaatttttaggaaactgtattttcgaatttttgttcaagtccgggttcgaggttcgaaatgggtcgaaacggatgtcagattcgaattctacggcctaaaaaccctaaagacaattttatctctgaaaaaatttttgaaattttttttcaaaaaaggggggcaccatcggcagtattaccgacttggctaatgtgtcaaaaaattgcaacttaattaagcccattctcgtcaccagcagcagcagcagcagagaaaagccaaagcaaagaaaatccgactgatcatttcgttggaaaagaattatatttgagaaatggtcgatcagaaatgctctctcacattttcatttgttgattctttcgttttttttggtgttttacctttcacttcttaggtatttcagccgcagcgttatgccttgaccatttacgcacaagatttaccatttgaaatcgtaagtttgaggggggattggattgtaatgctaattggtcatcattttcagcaaagtgccgtctttctgagcatgaactatcgtggaacgccttctcgtactgcaaaacggagctgaccaacccggactacaggaaggacgactttctgattcggattgaaacaatgcacttgagtgaccgcggcaccaccaaaaacgtgactcatcatcatcactaattgattgttaattatgctacaattttcagttccgtctttcaggcactcggtctttcgaagggagtgctgaacgaacgcaaagtggtgtgcattgacatcgccaacgacaaaataagtgaatgccgagaaaagtgcccgccggtgattttcggcggttgccaatcacgaaattttgacatcatttgtctactaatttaacattactgaatttccctcgaccgctggtacggactgacgctggcgcaaattcgtctgatcgaagaggagacgcagcgggcattggatgagggatgaccgcctctgaacgctgatgatgaaacgcgagtgccgtggcgatgaagctgacctatttgcttgttaatgtatataattcactgcttgtcctttcatccccacgcatttttcgccacttattgtatactaaacacaccccaatttcctcttaatttaattggtttgtgttgtgcttatgtggcagcaaataaatgttcgattttaagatttaagcacagttaaagattgaaaaatgccggactcggagaaggacccgaatttgaaattcaaattgtgacttaaaaactgatgaaagtcacgaaaatgtcagaaaagtgcaaaaatgtcttacataaaatcccaaaagtaaaaaaacaaataaaactgcaaaatagagacttcaacttatgcagatgaacatatgttttatttacacaatacaagtacaggttatgcgagaaattaatacagacggattataagttaaatatggaacataaatgagggtgttagcacaggatataattacaggtagggattatggacagaacagcagtatatgatcaatgggcagcaaaagaacagatgatcaaagggacggcgccagagcactcatcggtggcacatcagtcggagcggcgcgaacggagaaattctcggagctcatcagttcgaagaaaagttggtgtgccgctggtccctggagcattgaaagaagccaattcccaaagcgttgaggtagcgaaacctgcaaaagtgaacaatcaaacttcacttttttaatgtcacgtctgttacctgctgggaccgtttcttctccagaacgagttccgcacacttctgctccaaccgtttcttctccagaacgtgttccgcgcacttctgctcgaaccgtttcttctccagaacgtgttccgcacacttctgctccagacgtttcttctccagaacgtgttccgcacacttctgctccagacgtttcttctccagaacgtgttccgcgcacagctgctccaaccgtttcttctccagaacgtgttccgcacacttctgctccagacgtttcttctccagaacgtgttccgcgcacagctgctccaaccgtttcttctccagaacgtgttccgcgcacttctgctccaaccgtttcttctccagaacgtgttccgcgcacagctgctccaaccgtttcttctccagaacgtgttccgcacacttctgctccagacgtttcttctccagaacgtgttccgcgcacagctgctccaaccgtttcttctccagaacgtgttccgcgcacagctgctccaaccgtttcttctccagaacgtgttccgcgcacttctgctccaaccgtttcttctccagaacgtgttccgcgcacagctgctccaaccgtttctt

SEQ ID NO: 5187 - DNA, 1557 bp, Heterodera glycines
ctgccgatgtgcccccctttttgaaaaaaaattttcaaaaattttcagagataaaattgtctttagggttttaggccgtagaattcgaatctgacatccgttttgacccatttcgaacctcgaacccggaatcgaacaaaaattcgaaaatacaatttcctaataattcacatttattcactaaaatcggttcaattgcattaaaatagttgttttgcattgatttgtgtgttattagcatttaatataatatggctgcgttggaagaccttagaaattttacattgaaaaaactgcacgataattggcgttgaatgacattgagtttgatgcttggcttgaagatattggtctccttcacgcacgtcgtacgtgtccacgatgtggtggagacacatcgattaaggcaaaagaaggccgccgttatggaaactggcgatgcaaaacaaagaattgccgaaaagaaactggctatttggtcgggacatttttcgaaggttctcttgctattttgtacacagttagtggtgttctagggtcaaaattatcaaccaagcaaacttttgaattgacttatttttaggcgcgtaaatatgaaaccattgattacattcagcaggaaactttgtcgatttgtaagacgacccattgccatcggtggttaaggtcctagccaatttttttctggggatttttttgtgtgtaggaagattagtcgaaatagacaaaactctgatccagcaatacgtacttcctggtaaaacgattgtcagtgacgaatggcgatcgtaccgcagaattccgaatctcccgcagaactatgcccatttgaccgtgaatcattcagaaaactgtgaatcccggaaaccgtcttacacacacgcaaaatatcgaatcattatggaagaaattgaaaaggaattttaaacaacagttcgggaacaaaactgaaacatatgatacgtattttcccgaatttatttgacgtcggcgttttggtgatcgtgatactgttttttataatttttggttgcatgtatctgagttttatccgtgccaataactgttgcaaggctcattaacacaattgaaccgattttattgaataaatgtgaatttttaggaaattgtattttcgaatttttgttcaagtccgggttcgaggttcgaaatgggtcgaaacggatgtcagattagtcggtcattaatttgaagctccaaatcccccacacgctatgccatgctcttcaatggattctacacattgtcaaacgcggagtccttctgcctatgattgatagggttctctttgtacctcataaaaatagtcgttcataaatttgaagctccaaatcccccacacgctatgccatgctcatcaatggattccacacattgtcaaacgcggagtccttctgcctttgattgctagggttctctttgtacctcataaaaatagtcggtcataaatttgaagctccaaatcccccacacgctatgccttgctcttcaatggattccacacattgtcaaacgcggagtccttctgcctatgat

SEQ ID NO: 5188 - DNA, 2222 bp, Heterodera glycines
  unsure (1)..(2222): unsure at all n locations
ataaagaagcacatgcgaatgaattattatattttcctatatagttcgaaaaggaatttgacaattcgttgttttctctctaaagggcnngnaanttgggngganannnannaannaaanaggagaannnannngannnnnnaaaantactccatagggaaaannngnnnngnttttttgttgaattttgaggtttttcttntgngaaatgnaaggnattanaaaatntacattnaanatttaaattttgtaaagtaaanatttntatgtnagtaaaattnattggttttttaaanaaatatncaatcgaaaaacggttgtctgtttgcccgtattgatgtaactgatcaatttcacgcacttcattaaggtcaatcatatccatgtttatatcttccaagtcaatcaaatccaaattaataacattttcttgttcagtgtcttgcaattttctttttttattcaaatgttcgttttcaaaagtttttaaccgctttttttctccggagctttgaaccggttcatccgcttttttgaacgggagctttgaacccgtttgatcatttgagggtcgtgaatcattatcatgcaatgatgatgaagaacactgatcctcggaaggaaaagattgcttaattcgtaccattataaatctaaataaagatacaaaataaaacaaaaaatttacactcaaaaaacaatatcaataaaataggacgattattatgtaagagaaatttctaatatggacaaaaaatggttcaatttcactttgtgcgtcgaatcatttttatgcgtccgatcggaattttttcgctgatcaatgattacgaatataacgatttattgatccaaatccattcaaaccaaattaaattttctatttatttttttcagcttagtttccaataataacgaagttaagtcagatttagcaacaaacggcatttattcgtgatcagcgacctgaaatcccattcgatatgttttatttgattgtttaaaaattaataaattaacgtaattaggtgcataagaaaatgatctggactctaaagtaaaactgaaaccaaaaaacatcaaaatacggacctaaaattcacaattagaacttaaaattttttgaatacccaaaaaggaaaaccaaaaaaaagagaaaagaatgcataaggaaaaaatatcgatatttttcggaaagaaactaatgaaaaagtatgtaaacaacggaggaccaaaatgatgaaacaaactaatctttgatgtgtaagagagacacaatcacaattttgctgaaaacaacccaccgacacaatctttcttgttttttgtttctttttcctattatgtacaacaaagcaccatttacccgctaattcaaaaaaagaggcggagcttcggctgacttagtatatagttaagggattgagttggtagcttggtagggcgtgggtaccacgggggaacccacgtcatgtgggagcagtgaggacgtgttggacaaagcgagtaagggagcggagaacaacaaaagcagtgcaggcaatcgctgtgttctgatggttagtggataaaattaaaggcgaaaaaagaaaaaatcatgggtttatcacgagggtcattggggcccaatcactccaatttcaaattgccaaaatgcttaagaatcaattcaaattaattaaaacaaccaagcacgggcagccttttcttcttgttttatgttaaattgttcagctgctgaataacattcatttcactttacgaacgagctgaaatagctgcatacggcagcggttagtgccaaaaatagaatttgtggctttaaaatgccttaggctatgattaaaacagacacaatcactataaattataaatattttggcgctatactaaaagtgggcctttttgaaacaaaaggggggacccttttgttttgcaaaatttttttaagataaaaaaccatgataattttttatccggggttttaaaggtcgctaatcacgaatctgacatgtattttgactaatttctaatccctaacccaaactcgaataaaaatcggaattttgaatttttcaaattatgattttttgttcaaatttagattaggaaatccgaattgatcaaaataattgaaggattcgtgatcggggaccccaaaaaccccagagaataaatttttatgactatcacaaaaaaaattttgcaaaacaaaagggtcc

SEQ ID NO: 5189 - DNA, 4061 bp, Heterodera glycines
  unsure (1)..(4061): unsure at all n locations
agctgaaatagctgcatacggcagcggttagtgccaaacatagaatttgtggctttaaaatgtcttaggctatgattaaaacagacacaatcactataagttataaatatttttaatgtgtgtaattgctttgtcgtattttcaggtgctttaccattactcgcagttgaaagactttataaaccaaacggaaccggcagaaggaggcccgtcaatttcaatattcaaagggacgcggatgaattgaaaatttggattttggaaaagttccaaacggcactggttagttgccaaaaatggaattagcttgaaaatttcgagttcggaattttgtaaatagggaacggggactgaactgattttggacagtgagaagaaacccagttttaccgggggccccgccgaaatcggggatttacaataatcaataacatggtcaaaattgaaccagcgttttttaagtgattgagaaaaacgaggaaataatacgatggtttttcttttttccgaaattaagttttttcaattggattttcaactttacaaagaataatttctcaggtagagttctttcgtcctttcgcgatccgaccaatttgcaagcgaatacccaaagcatgacgcatttggtgccgaagttaaggtcggaaactgccgaggattttgaacaaattcttctgttcctctgtcaggtgcgcttgaccattacgcagttcaaagattgcgatgacaagaagggaccgagtcgagcaggcctatctatttcagtacttcaaaagagatgccgaagagttggaaatttggattttggaaaagctacatacagcggttagtagccaaaaaataaaaattttagcttaaatctttcgcgaatttgttgcaaaagttcaggtcgaaaactgccgaggattttaatttttgtgttgaaattttcaagaaaatcttatgtaaaaatactttaaaaaactttcatttaaagatttctagtatttgaaaatcagctcgaaaattattttcttatcttggagaattttttattatttaaagttttctcattttaaatgaaagttccataaattttttaatttataaaaataatgttaacattttgcaggccgagaaatttttaaaagttcccctgcaaaaaattgcttccttggcattttgtccacctgctctttcaggcccacagctggacaagtcaggcaatgacatgattcagccaggtatgaaaaaagtttaaataattcaaaaatatgtaaatcaaaaagtcattttgaacagcgacattgctggccaccaacgacttttggcgcgatttgaacactgcactgacgcagcgaaagcataaggggcccgagcgcgatttggccgcattggagtcgaaggtggcacggcaaggggaaatttagcagtaaattattcagacacaaaatgtcctgctttcaaacaatcccttcacaaacaagatcatggctctgctcgataaagctctgccattgagtagttttcgtgtgacaagcacatagcttaattccgaccatagaattgttagtgctgttcgagagacgagaccgagaaaattggattatgaaagagagattgataaaaaatatgaaaaattttcaatatctctctttctgaactggtggttaaatgtaaaagtaagaacagaaccaagaccagttagatgagagctaaaaccacaaaaaagtcagacttttcgcatattttatttataacttttttacatgtcgatttatatttgtgatttttgggatgccaatagagattgtaaagctttcgaatgataccaagtttgttgaatttatgttatgggctaagttcattttttatttaaatataccttagttcgattaaagccacttaaatttaaatgaaaaatctgttaactgaaaatcttatatatttacgttcccctcccccaaggtggacaaactcggcacagagacgaaccaattcgtacaaacggcaccgcttcatgagcgacaaacacgacttggtcgagtgaccatgagcattcaggtgaatgagcacaagacaataaacaggcattgtaccgtgccaaaattgtactttagttttattataccgtaatatttggcatctaactagccattttatttagttaaaatgaacttaacccgcaacatagaaaaattaaattttttccaacttaagaaatcatacaataggatttattcgttaatgtgcacagatacaccacaaccaaaattagctaatcatgaccttgacattttttgctagatgattagtttttccaaacgctgattaatcatcccaaacagatgattcatgccttccgtcaattccatttgttttaaaatgtttgtgacttatacgacaagctacacatcgggaaaattgagcagccaataattgcggcagtcaaaaattttttaaatattaaaaaaaaaattgtttacattttttaaattaatctttttgttttttaaattctcctagtaaattttttgttggtggtcccgtatggcttgtcggaacagatctcggtccgcgttttaacgggatcccgaaacatgcattcgatgggagtaaattcaagacattatactttttctttgttgattaaaaatataattttgatataattcgaaagcacatatagacttctatggccaaatttatcaatgtatagaaattctgacttttttcacttttattcaactatggttcctccccatcctcaaaaatacagtaagtattattgtttgggagatttggctttgtgatataccaaagaaacgaggcaattaaaactaatgttcacatggattaattaaatatttcaatattttcattcttaacagataaagtctgcacccactcattcaatacactgtgccgaaaaagtcaacgattgttggacgaagagattaaaaagtcggtacgaaattttcagtgcattcagatgtggttattagctttgtttttaaaatcttaggatcattccataacactattataatttttgattacctaaattattttttataagcatcattattttaatcgatgaaataatttaaaaatttttaatgttgattcggtgtcgaattttaatttgtaagctttcccataatgtggggtttttaatgtttgaaaaataatttgagtcaatttaatgcgaaatattttcatgcatttctcacttttcgattttgtaagaaaagcgccaacacatcagatgacaaaaaaaaacttttttctaaatttcagtcaacgaaacaatttcccatttctgccacccatttcattttttggatttgcgaaattattccccataggaaagactcagatagttcaaggtcatggattccacccatccactgccatcaagtacataattgttaatgttgcaactgactatttttgctaaaaaactccattcagtttgaaaatctttgtcccagttttacaactgtaatcgtaggtcaatcgcacaatcagtcattgtgttttggcaccccattttcgtcatttttccttccaaattttcactcttcagtttttcatccattgcctataacaatttgttcacataaaaataaacttttcttttaaaacccgccatatttttcagtcatcatttgtcattacaaggcggaaagcgtggcccctctgctcacatttggctctcagtttggcattgtgttggctgttctctccgcctattttctcatttggaaaccctccgccgtttgctcactcgtcaaaaggtagtgagtgaccaactttatttataaattacctttcctatataaaattcaaaaacattttgtttagatatgaaaattttctatttatattaatttaattgcgttagcccanaagatggataatgaatagggattccttttttcgtaagaaaaatcgcgaaataagtacaaaaaagctcgaaatcgntattaaataggtacaaaatcccgaaataggtaaatttaantgaattcctttaaactaaaaatttcgaggtttaacccttttgttgcttacca

SEQ ID NO: 5190 - DNA, 2536 bp, Heterodera glycines
  unsure (1)..(2536): unsure at all n locations
tcaatttaagaagcttcaaattggataaaggaaagaataaaatccgctttaaaatgttttttttttgataatatacgttttaaataaaaaaaaaattactttttaaaataaaaaaagctttttggcttttttagttttgtagaatttgacaaaaatcttcagcagttattgcgtcccagtaatggatgttccaataatatatttcaattttattttttaaatcaaccaaaaaagcaaaatattttaaaattatatattaatttgagctaacaagggggctgaataagctaataaccaaaacaaatgtactacgtctattttatttagttgggaacggattttcagttgctaaaccccaaaataactaaaataattgcgaaaaatagaatagaaaatgcaaaaagttcaaactaaacatttttctctaaaaaagtactaaaatatgcttcaaaattattctcattataaatagatttgctaaatttttatatggaaaatcatttgaccttatcttaacatcttttacagaaaaaaaaaccgtattttgccccatttatgctctacataatttcaataatttcgataaatttcgataagattcataaaagttatgtccagaagaattcaaatatctcaaattttacaactttttttggctcgaactttttttgaacttgtcgagattttttggaattttgcaggctaatagagcatctaaagagctttcgaatgataccaacaatgttggatttggttggcaaagaaaaaagttatagtccaaaaacatgtgttcgtacgataacggcctgacccctttaattttactttattatgcttatgttcctaatttcaaattaaaaaactaatgatttttttgtaaaatgatgccaataattttatttcaatgaagtacaaattaaaataatgactaaaattttttgtatttagtacaaaaaacaattaataaactcttgtacttagtcaatggggagtattgatgcacctgaacacacctctccgtggactgttcttcttatcttcaccactcaatgtccaaccggagaaaaactacaagaccgctgcacgggctttatcgtctcacatgatctaatcctaaccgcgtcacattgcgcgttcatgagttacaatgaaatcgaattgagatgcagatacgaagcagaaactcataaacaatggtgagttctaactaagattgaaacttctcattatgcatgacaaaaattttaatgaatattttaattgttatgccggccgagggcaaacaataatattcaaatttatttgaagacaaaataagttaagaaatagcaaaaaaggggagggatatcattgtgaggaagcacaaatgaaaaatgaaaatacaaatgacagaatgggtaaaatggtagttctaaactcgctagcagtgactgaagtggagtctgtaaattatctgcaagaaaataaacagaaacacgaatactcggtgttcaattcgattcagttgactttctccgtcgaaaaaatttattcggagacaaaataaataacaaggagcaaaatcggagtgtcgattgggaggaagaaccgataaatgaaattaatacaactgatagaatgggtcaaagggcggactatttatgtggaggataatggagagagagagataacagatgagagacaaatacaaatgaatatgggagcggtcatattagtcccaaacctaacatttttgatatatactagggtcagacgggtccaggtaccagaccgggtccaggcctggataccctgctttttcaagacccgtacccggacccagttttttgaaaatccaatacccggtacccgacccggcaggtccgtttccaaccgggtccaaaaacacactgtaacaatcggggtcagagtcaaaatattagcaaagttgaagggaaaaaaaagtaaaaagaataatttaatttattgtaaaatagcaattaatttctcctgtggcctagtggttattctgtttgattcatttctttctttgctcaggttcaattccttcttatatcagttgggtttaacattttttttttaaatttttgtttaaaactgccattttatcattaagtgaataaagctcaaaatttttaaataaaataactatcttgttttaatagaatttacaaaaaaattcttaatttttacaatatcccataagaaattttgaaaattttatccctatatttcttgaaaatttgaacattttttgtgctaaaaccacaaagtttggtcattttattcactaaaatctgttaacaaatcaaagtaaattttcaaaatttttcccgacggcacctatcggcaccgccggacccacccctgttcgtngaaagtttttcggaaaaggctcgccgcaaaaatggtttgaatagcaaataaattggaaaaataaaagcatttatttgtaaaatattatattttcatgcttttttaatataagcttttattatgaaaaaatttaggaaaaatttggatttttatatttttc

SEQ ID NO: 5191 - DNA, 1382 bp, Heterodera glycines
aaatcggagtgtcgatgggaggaagaacgataaaatgaaattaatacaactgatagaatgggtcaaagggcggactatttatgtggaggataatggagagagagagataacagatgagagacaaatacaaatgaatatgggagcggtcatattagtcccaaacctaacatttttgatatatactagggtcagacgggtccaggtaccagaccgggtccaggcctggataccctgctttttcaagacccgtacccggacccagttttttgaaaatccagtacccgacccggcaggtccgtttccaaccgggtccaaaaacacactgtaacaatcggggtcagagtcaaaatattggcaaagttgaagggaaaaaaaagtaaaaagaataatttaatttattgtaaaatagcaattaatttctcctgtggcctagtggttattctgtttgattcatttctttctttgctcaggttcaattccttcttatatcagttgggtttaacatttttttttttttaatttttgtttaaaactgccattttatcattaagtgaataaagctcaaaatttttaaataaaataactatcttgttttaatagaatttacaaaaaaattcttaatttttacaatatcccataagaaattttgaaatttttatccctatatttcttgaaaatttgaacattttttgtgctaaaaccacaaagtttggtcattttattcactaaaatctgttaacaaatcaaagtaaattttcaaaatttttcccgacggcacctatcggcaccgccggacccacccctgttcgtgaaaagtttttcggaaaaggctcgccgcaaaaatggtttgaatagcaataaaattggaaaaattaaagcatttatttgtaaaatattatattttcatgcttttttaatataagcttttattatgaaaaaatttaggaaaatttgatttttatatttttcaggacccggttggacccagtaaccggatccagtttaaaaacttggacccggactctgtttttctggacccggaaatacccggacccggtttttacctaaatacctaagacttaccgcaaaatgaaatccttcaggttacaacacacaccagaagagttagccatttacataggatatttggacatcaacaatcccagcgaaaacgcacaactactacaaggagaagacatcaacaatatatttattccaattgaattttcgcctcaccaattgaaggatggcctcgcccttaaatttgactatgcggtaattaaggtatttatttgttgctttcattaaactgaaaattattgtcttttatctatttaaaaaaagtttacaaataaattgaaataaactttaatatgcttcgt

SEQ ID NO: 5192 - DNA, 5166 bp, Heterodera glycines
ttacggttccgtgagaatgttcaggccctgatgcgatcagatatgtgctagagcggggggacaggtctgatcagagaggatgataaggaaattgatcggagaatggaagagaaagaatattagctgatctgagaaataagacatgattggtcacccccaggcactgatcagagtagtagcaagggaattgattaccgcctcggataactccgatagttctccatgtttggctcattctatttgatcagcagcgtatgatcaatgtatgaaatccctgctcattttagctgcttcactgagtacatcggtcgcaatggcggcttccaggacattatcatcggctcggaatgtgccgaggtttcttgttggtgccaatggcaaaatttaatggttggcacttcctctgaccatgtaggaatatgtggtggcacacgaaacggggcacgccctgggctattggcacacgcagtgagttgatcagtgccgtaaaaaaccaaaatgataattgcttgtttggcacaattcagtcaacggcccgaccgggagaagtacattagcatcaattggaggttggcccggtggaaaagtagagaacggaagagagcggacattttgccaatattttatgaaatttttaatccgatttaagttttacaaggctttcttttttgaatttacccgaatcgaaattgcatttatcaatttataagtccactttggtttatcagcagtgcccgttatattttttaaaatatatttttcgaatattttaccgaatgaaaagcacaaaaaaagcttttaccagtttttcttttcaacagagcgagtttttatcacattaaaaaaatacaaattatatttttggatttttgaggtttttagcaaatatttggggtttttggcaaattacacatttagatatttggcatttttagcaaatataaaccgggccctgtttatcagatagtttaatcaaaactgtgttgtattcattaggctttacttgaccaacaatgccaccaccacaaaactaacctgagggcctttttggcattttttggaatgtcaaaatgtttaaaaattcaaatttcggcatttcgttttgtccgctctctgagaaaggggacggggaattctgtgggggcatgtacaacaacagcttatcaattaacacactctgctgaaggaatgtgctggaagaagcgaccgctgtaagtttttaagtttctccattttatgaattataaaaaataataaataaattgttgaaaacattaaaaaatatattcaatttttgatattgaattccaatttgataataaacatatgagattttgatcaaatattaacacaatttccattcagtccttcatgcccttccggtcaatgcttcaagtaaatatttattattttaaaatatttttcttttataaattaaaataattaaatcaattttgaaattgcattttcatttcaattcattttttgattttttgaattgttttatgatgcaaaatcaattcacaaataactgactcggaaatacatattccaattagctaagaccttatagtaaaataaaatgcttttcccgcatttgcaatttccctctcattagtatgattaattgcgtaattagcaacgctccgccccattcccccaattatcgctaattaattgccctcttccctttcccaggcgttcggcatcaaacaggtgggtggtgttggtgagtgacgcaactgattgtgttatgtgtacgtcctgcccatgcttcgcccattttttccatcatccgaaggtgtccactcgtcgagcaccgtcagtgcctaatgttttttccctttctcccgcggaggggtgcatattctaattaggctaattagtttgatcgcccccgaattttttttcagaattttaacacattttttacatttttccattgttcataacttttttgcattgttaaaattatttgatgttttttggaaaaccaagcttgtccagatgaacatttaaatgttaaattggtgtcatgacaactcgtacaattgcttaggttaagcctatgatttaggcttaggtctaagctttaggctatacctaggctcgtttggacctaggcttaggcttaagcttgggctttattttggaaaatacgaattgccttttgtacgaattgtcattgacccgcaaatgcttaaatgctacggattgcctttccgatcggttcacctgctttttgatcagatacgactacggttcgctgatgcactatcacgcggttgcacatgcgcgccaagtgtccgacttcaccattgtgcccaaggagctcaaatatgtgaccacaatgggcaccgaacggatggcatttttggacgccaaagtgatcaacggttgtttgtacaaacgaatgatgtgccctgggcatacggtaaccgtattttcctcccctttcagacatttactgtccaagtcagtctctcccgatgggatcgctacaaatgaaattatgtaatggcacttccccatcccattccccactgatcagatgcctgctccggtttgggcgagttgggaagacccgtaagtgacgtgggggaaaattgggaggaagattagtgggttttacgggaatttttcgagagtcgagactaaggcacaaagaaaatggcgagaatgatctccgatgacgtatgacaatttttggaacatttggttttaaaaaccgaaccaaatttactgagatttttcatacgaatagaacaatccgagagctaacgtatgatatcaagactgttttatttggctgtgtttgtgaaaatttatcatgagtttttcttgaaaaatctgtaaaattgagagtttttttatgaaacactctgacatcgactcataccaagcccaaaaaacattcttgactttggaatccgaagagttgggaacccaagcagtggacagagttggacatgcttatgctctgatattgatctcatttcgtgttgaaaatggggaacccctcaattttcctaattctccacccctccgttcagttgcgctgccaatcaggcggttacccggacccgaacaattgcaatgtgtgccgatgccctgaaggattgggcggcaccgaatgcgaacggcttcagccctcaagtgggtaattagggggacaaaaagccgggggaagggggggagggataaagccaatggaaaaggaggaaaagccgtggccaaaaagggggaagggaaaatggggacaaaaggaagtgcaaggaaactagggaattgtgttatgccatctcagactgtggtgccgaactgcaggcctccgaccaatggcaaacattgcgaagtccgaacggcaaagacattcagtgctattggaggattacggtgagtgggcactttcattttggtccagacattgtttgccaaatattagtgattctcgagatcgaaaatttcccaagactcgagaccggggcttttttcaaaaaatattcttatgcacttaaaaatcgaaacaaagtctagaacacaatccatttgactaaatatgtggtaatgtatgtatataatccatgaaaaaggttaccaaattatgtatttttttaatgaaataattttttaagtttgaaaagccaaattaagggtgtttgtctggtctcgagatcgagactatcgggcttcactaataattatgccaatttcagtccgaagaaggaagccgagtccgtttccgcctaagcgacggcgaagtgagtctcggcaattagtcgacccttgtaaaaatgctttttttagtttccatgctcctacggctgtcaggtaaaatgacgcttttccgaccactccttaattagcacaccgtttgccccacttttccctccttttcagtcctatgtcgagataaagcacaaattggacgttcggctgaccggctttcggaggtcggtttatatattggccaatctttccgacacacatttcgcagttgttgctatcggcccaaggaggacaccgtgtcggatgggaaccaaatttttgtgatttttcggcccaacgggcgcaccgcgcgcttctcattgcgcttcatccgtcaggcgccctgagacggcggcgacggcaccgccgacggtgtgcgcatgccaattccatacgcgaccaaaaccgttgttttgtgtgttgtgatccggtaacaaaaaagtgctgccaaaagatctctccctagcccactcttttttttgctctgcttcttttcttcctttcaaggtcggtctcgggggcgaaggcccaccacgaggccgcgaagaggccagagtgagtaccttcggtgcaggaaaattattaaattttaaaattttttaattgctttttaaatatgccaaaaaatgtaggcttaacttttctagtgaaaattcgatcactcatattttttgctaattgagcagaagcgtaccaaactttgcagggatactccccggtaaaggactaacttacactgaaatgagcgccgagctagctggctcaaaaaaatttttcgaaaatctgagtctttcgtttttatttatttgcaaaattaattcataaatattttttcagaaagggttctgaaacgcaccaaattttatttacatgttagtttaggcactctgatgctttttctatcaataatggaggtgaataaaattttaattgctttttaactttgggaaaaagtttaggcttaactttttagtgaaagtttgatcactcatatttttttagtctaatctactcaaaacggttcagaattcaataaaaataacattcacggtgcgaaaaatggggtttgacaagtttattggggaaaaaaagactttacaaaataatacccctgggagaagggagtgggaaacatgatttcaaaattttcaattttttctagtctaatctactcaaaccggttcagaattcaataaaaataacattcacggtgcgaaaaatggggtttgaaaagtttattttgaaaaaaagactttacaaaataatacccctgggagaagggagtgggaaacatgatttcaaaattttcaattttttctagtctaatctactcaaaacggttcagaattcaataaaaagaaagtcacggtgcgaaaaatggggtttgaaaagtttatt

SEQ ID NO: 5193 - DNA, 1999 bp, Heterodera glycines
catccaccatccccatcaaatcttctacacataatttgagacgggtgccccccccctccttgcctctccctcaaaaaattccaattcattccttcccatcaaaatgttggaaaaaatttatgaaagaataaattttgtatttccagcagaaaaatatgtatttcgaatcatgaaaagacaattattaataagcatttgttagagtaagagctgcgggcctcccagcagcaaacatgggagacaattaatgtgacatggtaacagaaaagcgaccattttaaccagttcatgtgtcaaaaaaaacacatcaaaacattttttgcagcattttttacgctttttttctaaaaaaaggggggaggtgaccagcagctcccggacaattcaccaaaaaaaaaatccgtcagtaaattttcttttataaatctcaagatttaaaataattaatttaaatgaaaaagaataatttgttaaaattagctgacggattgtccggacctcgagggaggttatcggcggtggaattggctggaaatttttggtttttttaatgaaagcacccatccatgtctgctgttgtgtgtaatttgcacaatatccaaataatatcaatgtaatgaaaaaaacgacaaaaaagcactgggaaaggggtgaaaaaagcgacacaacaaaaaacaacgatttgaatacactaaaccaaatatgaggacggcaaaaaatgctgaagagtttgaagtgaaatgttgacaaataaagctaaatttggcgaagagagagagacaatgggaaaggcgcgcatttaaattatagggtaaagaatatcggacaaatgagatcctccaaaagcattggaaaagctcgttctttaatttatgtggcagattggcggcttctcctccgggtctttttgcaggtcggcaagaagtcgtccacctcggagtccgactcagaaatgtcaatccgtttcagtcccgacgcgaacagccggtcaccgtctgacaaaagaatgtggcaatttcttttttccatgttcattatcattagcgcgcgagttgcgttctctctctctctctctgttttttcacattatctcatttgtcaacaactttctctctctcacactcttatatctgtttctctttttctctactcttttcatcctcccccctctttctttaatcgttctatcaacttctttctctctctccccttttggtgtcatattatcacattatctctctctctctgtttctcttcttcctctccccactatgggtcaactccactgtgcagagaaaagcctgtactatctcgtcgtttttctttttctttgtaatttctctcactttggcgtagtatctcttccattttatgatgtaaaaaacaacattcacttcgctctatagaacttttttatcgccttatagattttctttaaattctgcatatcgatagagaaaaaaattctgcatcggttaataggtcaagttaatattaaaataggtcgaattagaaagttatggagtgattaaaatttttgcattactttttctctctttttggcgtactattttcacatctctaacacacaaaaaacatcaaattcgtaaatgctaacaattttggttataaggataaaaaatcactttggacatttagaatcaatagagaaattaatagttttagcatttttgctgaaaacagcagtttaggacttgagttataacgtgataaaaatttgaaagtatcacaacttttttctgggatgtcaaattgcttagcattcgcttagaaaaagattctccttttcaaaaactttttgttgataccaaatttgttcagtttagttgggaatgaagcgagttatggcagatcaaaataaaaaatacaaaaaaggcattttcagtgtaaattttgaaatagcgggcaaaaatttacgccaaatgcgctatttggcgttatgagcaattttgtctgacactgggcttgacccatagtg

SEQ ID NO: 5194 - DNA, 1144 bp, Heterodera glycines
tttgtagcgccggtagcaaatggcaaacagagggtggatgaccaagtggaaaagccagacggacaactgttcaacgcggtcggcgcagatgatgagcagcgggcagagcacatgctcgtagaggagggcggccgacgcgtaggaagcgcggccgaacatacgcaaagcgaactgggcaaagttgaggcaggccctgggcatggagaaaaggggtgatacagtgataaacaaatggttggtcaatgttttgcatgaatcaattatttttgggataaaaccgggatattttttggggcttattttcgagactgaaaaatacttgtgacctttttaggagctcaggagagcttagcgttttctgactcttcaccaggggaactttgcaacgcacttttttgtataaaaattggatcccaaaagggaaaaaatactcaaaaaagttctttggatattacttaatgatgaagcctttgcgaaaaatacgcgaaaagtaatcgctttagctgtgagaatcctttaggcacttcagcccaacaaatggacagaggtgaaaaattgacaattgatggcttagtggacagccgggagaagagcagcaaaaggaacacaaacagaaggaaaggacaaatcgccggaggggacaacaaatggcgaatattggggaaaatgacaaagatcaaagggaaaggggaaaggccgcgggggacgacaccgaacagaaagggaaagtcaaaaggaaaatgtacgaaatttgaaaaggatggacgcaaaattcaggacaaaaaaaggagaaagaaatgatttcaaatgatgctggtgggttgtttaattgttaatatctttttatagcagctaattgtaaatgctctctattagcctttaaaattttaaaatttttttgttcattttcaaaaaagtttgtcctgaggactcgaaaagcaggttttcgtgcatttttggccatatttttgtcgaaacttatcgaaaatttttgaaattttacaggtgcttagaaaatgtgtaggaatatcgaatgatagcaaaacttaaacatttgtttactcctgagcaaagtatgggcagcgtagttttgagtaacgaacgaaatgacataatgaaacgaaatgaaatggaaggggaattt

SEQ ID NO: 5195 - DNA, 1531 bp, Heterodera glycines
  unsure (1)..(1531): unsure at all n locations
ttgcatgcnnnctgcaggtnnccgaatttgaaaatatacaaaataatggggcaaaaagaacttcccatcataggaaaatagggaaaagagagaaatatttcggtagaaaacccaaaagatttttggtaaagccccaaaagaatggcaaaaattgaaactgtgccttatttggagggtccgaatttaaaaaaattcaagcgtaggacaaactcggaaatttttaacagcactatcagacctcaaaaaggacagaaattgacaccattccggtttttgggacatacctaacttatttcactgttttatcaatcaaaccaatttgttatcattcgatagcccaaagagttcccattcttttgagaaaattaaaaaaactattaccataaatatttagaaaaaaaaattttttttgtgttgttttttggctaaagattgaaattttgcggggcaatagaaaaatgtttgcgctatcgaataattatcaaaaattcattcattcaattcattccgggctagcacccatttgctcgtagccgaacggacactaacccctaaaaaagttaagatttttgatgaaaaaacggggcgaaaaaaatcgtagccggaaaaaacgcatagcttttgtgcaatcataaaaaaagatgggaatgaacctgcaaaaagtgagccaaaaaaggccctcctctcgcggccctcgtgcaattcgttgacggaaaaggcgcacaaagcgaccgcaaaagactgaaaaaggggcaacaaattggtaaattgcattgtaaatttttggatttttaaatttattcaatcaaaaatgaaacaaacattgagaaagtcggcgaacacccagcggaccaaacccaacaaaaggttgcagctgcgatggtcgaccagcaaaaaatcgacgacaatgacaaaagcgatcagtgcgcacagcgcacggagttgcacttcccgggaagtgtgaagggcgacaaaactgacaaaaggggggggggtgaaagtatggacggagaattggtgaacaacattcgatttttaaggcgtattctgttcattggaacggcctaagttcagaaacccaccgggcctggatttttgtgcaaatgacaaaaaaaaatttttacaaacgccgcctattggcatcctttgacagcaaaaaataaagtctaatggcagtatttgcttacattcccgagattttaagttttgtttgatagcatgaaggccttgattggatataaattgtatgagttatcattttagatggttttttcctttgttgaaactgaccaaaaaatggaattgatggccatcaaataggggatggacaacgggtgccgaagacggaccaaatcgagcgcaaaagaacggagcgaactccgccaacggcgaagcatttccatgcgtttgtctgtcttctgcctgttctgttcgttcgtaattcttccgttcgttcctctgaaaagaaaatgcgaaaatttgaaaggaaacgaaagaaaaaatcaaaaaatgagaagggcaaaggaaaaac

SEQ ID NO: 5196 - DNA, 4566 bp, Heterodera glycines
aattcgtcagtgccatgatcggtggcatttcactgcctctcaaagctcctcagaatttccattccttcccaaatgttggcactttttccccgctcatttttcggcaattccgctgatgacgacggatcggatgggtccccattgttttgggaattagcagaagcgaagctgccacactgttggtcctggcggatgtcgaacagatcgaagccccgtcggatagcatttgaaattgtgctaattgtccgttgttcgtattcctcttggctgacctacattttaattggctaatagttacgtatttctgtaaattccgacgaacatgattaaaatcatgtgccctaaattacaatagttatataagtagaggaagaacacaggtggccgaaaaggggcggtattttctgttttagggcccggatgaaaaaccaacaaatggcgcaaaggactgcagataacttttgtttcatttaaaatgtataaattaacgaatgggcagaaatcttagcacaaattatgacatttatgtcaataaaataattttagcgtgtatttttaagtcaatgccgtaccaagtcttcaaacaagcagaaaatattttcgaatcctaatttcttggactttttcaaaataaattcatttggattcttaaagccaaatttaaaaagtaaaataaatcaagtaaaaaactgtaaaatttcgaaaaaacattaagagcaaaaacgaaatttacccacctctttcgttaaattttctctattcgctttcttgggccgtccgcgtaacaaatccactgggatttcgtcaacctgcttaaaatataaaaagcagctaatttaattgaatttgacatttttattgaaaaaacctctttcacgagacgttccatttttaaacacccaattcgattgtgaatattttcaaagcggcactcaaataattccatttccgactccaaagcattcgctgccgtttcaaaattccgaattgtgtctaacaacccggaaactgtgtcttgcaaagcatcttttagctgaaagtcgaaaattgaccaaaaataacgcaaaaggacattttaaaacaaaatataagacaaatacctctttgtcttgtttaagcgtccaacatttggcgtaattcgcaaattccctgaatttatcgctttttttctgccgaagttgaactcgacccatccataaaggaacagctaaaaatttagttggtcacgcgaagctaaaagaaaagcaacattattttttaagtgatttaaaatattttttgtcattttggttgcccgatttttaaattttgaatttgattttttaagatttgttttcttttgtgaaatttttattatcaaattaactaatctttcgttgtctccgcctcatttaccatctaaaatgatagggataacaaacagtttaataacaacaactttagataatcgttattaaataatcattactagagttttgaaaaatggaatctctgaatatggatgcaggcctcagtcttaatagctccggtttggcactcacttcagtgcattcaatttatgttttgtttttaggtcactcgactttcgcattagctgagaaggaaaaccaaattgaacagatgcgacgcaaattgcgtgttttggaaagcgacaacgccgaacttcgcaccactttgcctcgactcaaagacgcgcagggcaaagactgcactggcgaggtttgtgctgctttctcaatcctggaatcagttttgtgaattttattcctcattatcagatgatcaaaatgaataaggaattgctttcggcaaaggaacagtgcgagcgatggcgaaccgattacatggagttgaccaagaagtacgacatgtttgagaagtcgaccatcacgcagcttgaccagaaagacaaacagatgacacagcttcgacaccaagccatggaaatggaagaggaaaacggaaaggtacgaattccgtccattcattttgatgagccctcaaaaggatgcaataattcaaatttagttgcgcgaaaagcttgaaaatgagaagtctcgagtgtggcatttgcagcgcggagagtttgaagaccaattggccacgccaaaggccgttcagaacgaaggggcagacgatcagttgtcaacaccaaaggtattctcattattttttcaaatttgccatttctcttttttttaatttaattctgtttttaggctcacaatcagatgctggccaacattatgtcgaaaataccacaaaatgttgacgttgtcgaagacacttacctgtgcaatgtcgatgatgccgaacagctcgctgcacatctgctgatgatcctcgagactttggacaagaatttccataatgcaaacgaacttcaaaatgacatattcacttttctggcatcgcacagcatttgctccaacaatcctgaaaagtttgccttgctcaactcggtttacaagaaagtggtcagtgttttttttgaaactttcaatcacttaatttaaatttcattttttcaaaatgttttagactgacaatcgtttggcgcaaattcgtgccggaaatgagcagtttcgttccaacatgtcggtgggcgacaaagacttcgatgcctgcatgaaacacttggcggtccatgactccatcaccctttcgtccataccttcgtttgccggcttctccaaggaaattgcatttcaacttgaagtggagttgcacttttagaatcaacgcctctctttcattttttagacatcaaccccggaaatggacaacgaccagaatttgacttctggctcatttttcgccggcaatgtgacttgtcgcacctcaactcttctcgaggtgtgcgttcggatgttcgagaaactgcgcgggaccgtcgagtttttccaaaaccttctcaaaattcttggagtgagcgccgaagagttgggcgaggacattgccaagaagttggaagcaatgaagctggatttggacgtttccgtcggagaggcccagtcgatgctttctgaaggaggaggcctggctgcgattgaggattcatttgcacaatgccgagtcgagagggagcagcaggtgaaaagtcggattcatgggaggacaagaacgggaatcccatgataagcaaatcagctttttgtattcaagataaatgacatgaaggtcgagattgagaccatgcgcaaaagtcaacaggacgtggagcagaagcagttcaaacttgagcaatcgttggcggaggaacgcgatcgaatgctgaaagtgacggcggaacgagacgctttcgcgcgcgaattgcgcgatcgggagacggaagttgagcggttgaacagcgaaatgaaggaattgcagaagcagacggaggagttggaccgaatgaagcaaatgctgcagtcggaggtggagaaaatggtgggtcattgccaaaactcaagccaaaagcatattcataattgcacattttttaaagaccaactcggaactgaaggagaaagtgctggtgcacagtcgggaggagttggccaaaattttcgacacgatgtcagtgtgttaaatgcttactaatataaatggaggcattttaattttgaactttgacatttctttttttatacaatcaccgttaagggaatacaccaagtcaagttgcaactctgtggtttcgtcgctccgcaaaaagaagccaaatattgggaagaagcagccgacgcaggacactcaaaaacagtgagccgacgatagccatttgtgatccattttatagaaagacgtgccgatgcctggcgataatctcctgacacatcatttaatttaatcgttttgctgactttaattctttatatttcttccattgttttccttgcactgtgcctactctgatttgtccctcgcttcaatgctttcatttgactcaaaattattgtgcggtaaatttggtgctgactaacttgcgatgggtttcgtttgatctctctgtttacctcgccttcgtttacccttttctctctctctccgttttctttcaactttctctcctcttcatcccattgatctgatcaatagagcaatgcagaaattgcctcaagcaaacttccgctaataatgccaaaaagcagtcactttcccccacaatccttgacggctgtcaatttggtgtcaattatttgctgcagctgtaattgatgctttaattaaataaattttgcagcattattttgtttattataaataaattgaaaagttagaaagaaacagttatagttgttccatcgttttatacaacagaaaagcttcgcccaaaattgtcgaattgaaaaaaacaaacaaattgtttttccatgtaaccaatatgagccggcattccgcacgactctcgattaattcgggagtagctagcagtgacaacttccccctccccttggaattttagcaattggtccttcccattaaaatgcctctgaggttgggctccagcttcgaattggcattccgtcgtgcaatcttctccattgtgctgctgctgcttttccttctgttcaatgccctcct

SEQ ID NO: 5197 - DNA, 2712 bp, Heterodera glycines
  unsure (1)..(2712): unsure at all n locations
tcccttctgctgctgctgcttttccttctgttcatgccctccttttgtctttgcttggccaattcgaatgggcccagcggacggcgcgcgtcggccgccagtcgcacgcgttgaagcgcagccgtcgcatggattttgagcggcacgaactgatcagcacactttgggccgagtcggtggccgcccgatcgggtacggtaatagctgggggatgaggtacggtactactgttcattaccgtaatggaagttgcggtggcatatccatttttatgtaactctgtttgtcaagagtccgattggtcactcgcggccaatgccaaattggacgcgtacgagcgaatgttggcatccgaagcggcacactttgatggcacgcatgccgcggcggttgtgtccccttctccgtcgtataatccgtggacatttgtcgagacggtgcgcactttgctcacggccgtcaccacaatgggcaaattttacgattcatctaattattttatttatgtgcgccataattttgtaaaattttttatcaatttaaaaacagcaataaaaattaatttgtcaattttaaaataattttaaggaatgaatttaatttggcgtcttttattaatgtttcccctcaggcggcggcgctttgtccgaaattggcccttctcttctcggccccgccaccaaattgctgtccgcccttttccttctgttcggcatccctctgactttgattcacatcggccattgtgtgaagacggccaatgcgctgatcgaagcaaattttgggcaaattttagccaacaaattctttaatttggcaatttgttctcttaaaatggcagaaagtcgtctaatttgggcctttttgtggtcgccggcggcacccttttgatcgctgcgattgtcgtggacatcgcaaccgttgggacggaggaggtggaaagagaggtgatcggagcaaaaaggcagcacaaaagggggacaaccaaaacaaatatggaaattgataaacaattaaaatttgtaatttaatttttgtcgaaaattttccaatattttggtgatttcattttggcattcttcgataattcttctctcctccgcctttagacctctttcttcgactctctcttctccgtttttctcgcttttggcacaatttcttctccccattccctgcggcacttttcccctttccttctcctccccttttcaattgttctgctcactgtcgctggccttgtctttggcgctttacaacggtaaaattttcaaactttttgttgttgttgttttttgtttttttttgcaatatttgccacagttccatcgaactttgggttgcgccgcatgagttcgcttttgccaatggaatttgtggccaaattggccgagcagtcagtgccgttcggctaaatgtggaggaggacgaggaggaggagggcgacgagttggagacgaagcagcaccaccagcagacgcacacccaacagggggcaagcgaaacggacaattgtcaaatgcatgtccaaaatgtttgattcagctgctgtttcggactgcacagttcgaattcggcgactgttcacaggcgaatgatccgtcgacgacgacgccattcggcacggggaggagaagcattgtgggacaaaccatccacgaggatgacgaagagcagcagcagcagcactcgccagccaactttaggggcgaaagagtaaattctaatgattggaaatgagtggcggcgatcagttccatcacagtgatcagtcggaggggggggggctgacaaatgatcaaaaatgccaatgattcgatttctcttttctcagcaatggccgccatttcattttatttgtttgtttttgtttacattnttcgattagaatctgccattttctgcttccttttctcatataaattttctttgtgattctctctttttttgcgacatttgaaaacaaaaacaaaaggtcagcgaatcctttcactttttgtcgcaatttcctcaaattttatagccgattaatttgctgacagacaaagaaatgccaaaaaaattggatcgttttaaacaatttccattttcggcattttatgccatcctttcgactaagccacaaatatagagacacgcaaaattaacggtctcgatgccaacatttgctaatgagatcagatcatttatcacggttcctctctctctctctctctctctctctctctctgcctccatctgtttcttgctcgctctctcacttctcccattctctcaccacatttgccaccctggccgcagtgcgttcaaacgcattgtccgtcgcgtgccgccaccgccaccccgtggcacgtcgtcactttgtggcatttcgtcctcaatggtcccccgccgaggtgccactgacgaccgcttgcccagcgattggccggccaacgagtcgaagtaacgcttggccggactcagcggcggacggacgaacgccgcgggacgaaaggagcgaacggtgccagcggaagagagcaattggtcggcgaggagcgcatcgggcagaaagaagcgctaaatgaattttaaactgctaattgagtgccaacgaacggttgggtcggcgtaaatgtcgcgcaattgtccggcggggagagaatttgccgaggagaaaaatgaaaggtagacagcaaattggagcagcacaaagacagcggtcgaaga

SEQ ID NO: 5198 - DNA, 2447 bp, Heterodera glycines
tattccaaatcctattattttttaataattaaccaatttgatgtacattctgatttggacatttttcagaaatggctaaccaattgcaaccaaaaaacaaaaagtaaaattgtcttacgaacgccacctttacaccttcgctaaaatgagttctgatgggatgacaaaattttggagatgcgagttcaaaaaatcaatttcacattattttggagtttctccggggaatttctcgcaactatcgaatgaacccgtgattttttgtttattttacatttttatgctgaaattttaaaagttgtttttactgtgtgttttttcatttttctgtgcttggggcccaaaaactggggcccaaacgcccccgactcccatttggggcagaataattgaaattttaaaatatatgtgaaattttgccaacattttttaaaaattatttctcagtcacgaaatgatcagtgacgaaacgatcagtgacaaaatgataggtagccgttaacaactgttgcattggcatcgaaacgtggcgctaacaaatggtttttagatgttggcattgtatcagtgtatcaactttcaaaatttaggacctgatttttttgaaaaggatgagaaaaaatttgttaagcaaaggctcctgaagaattgcaaacccgtctaaagtgctcatttacactcgtattctaccagatcaaatgtgtggtaaattttgaatggactgaggtgagaaaaaattactatatatgcgcaaataagaaaagccaatcaaatattcaacaaagaaacaatttgggcggtcgatgtagaaaatctgtgccgtcaaaacttaaaaatacgcatccctgaatgcttcaggcaattcgatggtttgcgcgccaacaagaagttgacgagcaagcggcagttcctgccgtttgcatcctcgaagggatgaatttttgcctaaaaaggggtctcaaaattaattttggattttctaattcatgggatttgatacgatttaacaacgtatagaggtgtagttttaacctctgatgctttaccaggtggtggtgtgcctcggcgacgaactgccgcaagtcccgaatcatcggatgccttcccatccatttccattctgatcttgcaaattgtatcattaggtgttttgggcttataattagaaaggaaaccaatatggatcattccacaattgaaatctttaaggaaaaaataatatttttgaaaaatgcaccgcaaacgatgtgaacagcaaaaaaaggtctcgtttcccaagggcggtgtccctatcccagccgaaatcctttaaccgtcccctaattacaccaatcgaaagcactcattgatgaaagatcatagatttagcaacctttagttcagttcttgcttttctcttatttttcattacatcacaaacttgacaaatgtacctgctccgttattttcttacaataagtgaattgtgcgttgtccaatattgcaagataaattttgtcgtttttgaaaagcggcattgacgcgatccggtcccgaatcattgcgcgtcctttttggtttggcttgcacggcacgcattttagccgcgtgcatgtgctctcctggtgtgtcaaatacgtcgggcggcggcagtggtgtgtccgtttcggcgttttcttcggattggtcagccggtcgggaatttccatcatgtcagacaaagttagaggtcttgctggacctattcacagaattttatattgcatattagtcggaaccaggattttgaaaagctggaaaccgttcttcccgatattttttcgaaaatgaggggtaccatcaatagtattaccctcacctcttttcttttcattaaagtaaacaaaaatagtaaaatgtcatgccttttcgtaaatggtttctcgcttcttcgtttggagtgcgtttaagccatgcttctgcagagtccttcttgaaggcaatttgcaactgaatgcacaaaaataacaaatttggagaattgcttcccgcttgcactgacttcgttgtattcggatgagttttcctccgccattccctttccttcctctgtgtcgctgaaatcactgccgttctcctcggcctgttccataaaaaccaaagcatctaacggatgggaccaaagttttgtttttattacgaaagtaccgggaccagagcgtttgggcccccgtttttgggcccccgcgtttgggcccccgtttttgggccccggggtcgtttgggcccccgtttttgggccccggggtcgcttgggccccaacccaaaaatcgaaaaatgtgcttttttaaaaattaagattctaaaaactaagcctgagggatccctcgtcacttgtcataagttaggttcaattaacattcgctcatgttttacaattctacttattccaaatcctattattttttaatagttaaccaatttgatg

SEQ ID NO: 5199 - DNA, 3425 bp, Heterodera glycines
aaaacaaaaagtaaaattgtcttacgaacgccacctttacaccttcgctggaagcttgcttcggtgacgggaccttttcattggcgccgccacttttttatcaaatttatacaattttggctaggttagttagtttttagaaatttttaatctctctttttatagtatttaagaaaggtaacgtagaaaaacctacatttcgtgttggattttgcaatgtttagacgaggcaaatggatcataccagtgtgccattttctgctcacatcgaagtcgcaggcgtcatacattcgtatgtttgagctcctacatcaggcatggccaacatttgctcctacatcattcagattgatttcaaattggccgtgagcaatgcggtcacaactgtatttggagggtgtcaaatcaatttttgtttcttccattttgtgcgaaatttgcaaaagaaattgaaggaacaaaatttgtggcaggttttaataatttttttttaaattattgcggcgccgaagtgcccccgacccgtttcagcgctactgcaccgattctgtgtttgccgagaacgctcgaatgatcacgtctgttgcgttcgtgcccttgtgtgacattagaatggcggtagcggcacttgatacggagttcggaaatttggcggttttccaaccgctgattgactggtgtgtgaactttttttaaatttaaaccccactgaaattacaggctattaatcaattacgttggacagcccaggcccaatggcacatggtctcaaccaacttttcgccctgaacaatggaacgtctacacacgcacgcttaatgccgatgcacggaccaacaaccactccgaggcggagcatcatcgtctacagggcgccttcaattgccgacacccgtcgatttttcacttcattgacgtgctacgtcgtgagcagaagacaacagacgtcaaatacgcgtcattcattgccggagaggagccaccaccaaaaaagcgaaagtttttggcgacagatgaacgaattcttaatttggtgcgcctttacgtcccgatgaatgcaggcaacatcaaccatgatcacaattaccacaatcgcaatcaatttcacattattttggagtttctccggggaatttctcgcaactatcgaatgaacccgtgaatttctgttaatttttacattttttattgttaaaattattgttgaatttatttttaaactgtttattttacatttttatgctgaaatttaaaaagttgtttttactgtgatttttcatttttctgtacttggggcccaaacgaccctggggcccaaaaacgagggcccaaaaacgggggcccaaacgcgggggcccaaaaactggggcccaaacgcccccgactcgaaagtaccgtataacagattttatctattttttattaaaaatctctagagcaaataaattaactaattaagtgttttgtacataacaattcagcgattgtgaccataagtggaaaatgtccgggtctctaaattactcccctcaaaaaattaaaatatactgtatggaaaaaatcggtctctgtgtgtgtcaaataactttttccattgtcaaccaaatccaacattttggcacacttcgaaagctcttcacgtgcccccgactctgaatgaattccaaatatttccggttcccgcaggaaagactgatcccgacaattaccatcgccttcacttcgatgaaaattccattgcccaatcgtacttttttggactttgatcatttcgcaattgtgtgactttccatttttaaagacacacaaaacgcaatttgtgtactttttgcattggaaaattccgctcatatttttcaaggggtgtgacttgtgagtaaaacataacttattgttaggtatgtataaatacatatgcaaaagtgccaaaaatagttaaaataaatgttagtgaaaaacccccaaaagtaaaaagaatttaatctctattattttaatttaaattaatttgaaacaaatattaaaataaataaataataacaaaaaataaaatattttggtttaatttatttaaagtttaatagagctttaattaatattgtaattcgtttatatttattttcctaaaatggctttttctcccgttgactttgcttcacaacaaatgaatgagtacaaaagcacaaaaaaggtgccgtttctcattttgttttccgctcttaagcctttcctttcctccgttagaaaatggaagtgctaacgatgtccaacggctcacccattccattcacaataaaaatgccgttttgtccgttggtccccatggtccgatgctaatgcaagacgtcggtgtgttccgtccttttattaatacgttttttaattgtccctattaaattgagtttcattgtttgcatgggattttgggaaatttattttcgaatgattaattagcttcaaaaaaagataaactcaaattgccatcggttcagaatgcattcaattaggccttttgaaaggagggatgttttatttctataattagtaagggaaatgaccgaaagggcaaggcaaaatgaaaagcgaatcctttgccaaagtttccatgagcgggatttgtttccaaagtttatttggacgaaattgcgcacttcgatcgcgagcgcattccggaacgcgttccggaacgcgttgttcatgccaaaggcgccagagcacacggctacttcgaggtgacaagcaaagacatggccgagcactgcaaggccgccatgttcagcgagatctgaaaacggacgccgcttttcatccgtttttcgcgtgtcggtcggtgctttcgttctccttttttaattggtttgacaattatttcaggtggagataaaggtttgttgtgcatgttgtttgtgaattccaccaattcactgctggaaagtcgttttcttttttaaaagacatttttttgtttttggcataatgtaaaatggtggcattcgagtggggggggggtcttacaaagcaaaggcaaatgctgaccgaactctcgaacataaaaggtggagaatcggggagcgcggacaccgcgcgcgacccacgcggttttgccatcaaattttacacggaggagggcaattgggaatttggttgcaaacaacacaccggcaagtcaaattccgtaccaagcaaatgacacccaaaacaatgccttggtattttgtagattttcttcatccgcgacccttttctctttccaaatttcattcattcgcaaaagcggaaccccgccacccatctcaaagacccggaaatggtcagttggaataaccagtggagcaagtggcagagaagggcataatggggatgggttatatgttatggcaagaacccccaaaggaaggactacgacggagtgggcatgagggggg

SEQ ID NO: 5200 - DNA, 1775 bp, Heterodera glycines
  unsure (1)..(1775): unsure at all n locations
cgaacgatggaatgccttccattcggnaaacaattctccgggcttcctatttagcttatgactctcgaagaagcgtcccatttccgttggaatccgttcgatgtgaccaaagtttggccccaccgtctcttccctttgcttcccggttcgttcgttctccgtttctttcttcattcttcttcgctgtttgtttcagttggtcgaattgtgctcaaccgaaaccctcaaaattattttgccgaagttgaacagtcggcgtttgccccttcgcgaattgcattgacttttcgtccgataaaatgttgttaggtgtgccgtccgttgcgttgcctttgcattaattgccttttcttgcgccgcagggcgtctcttctcctaccccgacactcagttccatcggctgggcccaaatttcatgaaacttcccattaactgcccgttcagaagccgagtgagcaacacacaaatagatggtttggcatgcccagacgacaacggaggtggcacttttcaatttaagtcatttttgctctttttttccgatggtgcccccgtttatcacccaaattcctacggaaggccgaaggaattggccactgctaatgaaagtgcgttttctgtctccggcgatgtcgcccgattcaattcgggggacgaggacaattattcacagcccaaaatgttctgggagaaagtgagaggggtgaggaagaggggaccaattctcgagatggcttaaggttctcgacgaagatcatcgcaaacggcttgttgccaatatcagtgcctcgttgaaatcgacttctcggccggtccaagaacgcgcggtagcgaattcggcaaagtcagtgccgactttggcagtgccctacaggcggagttggagaaagggtgtcagtcaaggctgacagcacaattaatgaggaacaatgagagagtgatgaggagacgaattgtgaattaaaaataattaattggcataaatgacatcatgcaatcaaaccacccgaaccaattaaataaaattaattgcctatgcaaattacgcatgactgtcaaataaaaaattgtaactgaatttgatggtttatttcttgatttattatcttttaaaagatttaaattataaaattctcaaaatatttgagatcacaattatgtcaattcaaaaatgaataaaaatttgtgctgtctgaggtaataaatattttgaattcgaaaatgaattaaaatataaatgtgtctggtcatcttttctgctcctcacaatcagtgctttgtttattcatgcaaatactccaaaaaccatttccttgaagaaaaaaaaagaaattattaagccaaacaaattgttttacaaactttgcaaggcgtacaacttcttccattgtgccaggctcttcgaaaagatgggctaaatgagtttgaagctgacaatgagtaaaatatattgtctcttaattaattatgtttgctatctgagagaatgaaaaatttaaattaagaaatgatttagggtcatcagaagcaaatgcaattgtacgagccagggatgggagccaacgctctcaaaaaaattcggcgattggaaatcggaattccgacggctaaaaaaaatttcggcaatcaaaattcaagcataaaaatgtcggaaaccaaaaatttttaaattgacaattagagctcggcattaaaaataaagccgaaatttgcatattacttaacaaatgtgtacaagtgttaacaagaatgttttctacatttctcaataagct

SEQ ID NO: 5201 - DNA, 2328 bp, Heterodera glycines
ctaaattgaccaaaaaactaatttagtcacaaaccattgcaccagtaaaaaaatggttattttatacaggtacgaacataaaagtgaattttcgacttttgttcgaattcaggtccgggattcgaaataatgtcaaaatgggtgtcagattcgggatcagcgatcctgaaaacccccgtaaacatatttccacaacgttttagaacaaaaaaatgttcttttaaaaaaagggggagggcaccatcgatagtattaccatttttcaatcaaagaggctataaacagcattaaagttaagaaaaaacggtcttttatctgggattgaacaaattggacgaaggcgcaaatatccgaggcgcaaatgtcacttaaccatttggacaatgagacgggtaaattttttgaatgaaattccgcggaagggaatttgtccgaaatataaagacccaaaaggaacactcacatgctctatcactgtgtccacttcaaaacggtgctgttgccggtctccaaactttttgtcgaaaaacagtgcccctaatggcgttttgaaggcaaggaaaggcgtcttcgcaatgggttggttaatcgcaacttgatataagagccatctaaaaaagcgtccactaactcacaattaacagattgactcgcctgtcaggaatcctactgtcaaagcgtcgctccaagtgatgacactccgccgaatttgactggccaattcgtccgtcccgtcttccctttgttcccatctctttccccgacatttctccccttttatctccatttttcgctgacttttcttgccttggtccacttaaataaaattttgaattttaatgaacacattcatccaaaatatcatggggagttggctttaaataagacagaccctagctgattgttcgccctgttttttcgctccaccaatttttcggccactgtgacgcgcttcctccgcttctgtgcttttattggagagtcctttctggcttctaattttttaggctgctcttccattctaaccgaaatttatatatatatatatatatgcatttataaataaaacgtaaagaaccaaaaaaagtatgtgtccaatccgtaaatgaaaatataagtgataaaataatttgtagagagtaataaataagtttataaataaaaaataattcaacgcacaaaaaagatcttttagaccagagaaataaccattgtttttgcagccaaatcataaatagcacgattatgattgaacagataaaaggcggtactgagagggaacaaaaaagtggtcagcatgtttttgatcacagcgcgagttagtgagctaaaaaaaaaattaaacaacagaaaaaaacgttttgcgatccaattgtttaaaattttggtgagtctttggacacgaacggcaggttaaacaaaatgagaatcggagccaaagaaaaagtggagggatttttgtaggaacagaccaaacaaaagcccaccttctgaaaccaacactcggcatgcaggtgaccatcacacgatccgaagagccaactattggttgaacatcaagacatgaaatcacacgaagccccaacaaatattttccaggggtacagccaataggaaacccggagagaccaaaggttataaaaatggcctaaaaataaaccttgttaaaatttttaacaaaataacaaataaatagtaacctcaatcaacgcagaaaagagtttgcacaccaattcaatgtaaaacaattcctgtgtgatatcgataagagtctgaacatccgattcacttgaaagaattcgttcaaattgatccaattcgctggaattggaaaaaatgttaagagatcccttcttttggactaacattaattcgaactcaacaagcaaataaacgatgatcaacttgaaaaggaagagaatgcatgagtcaatagcctaaaaatggaaagagtgaagaaaaagtcgtgaaagtgcaaccaacttctgcaacaatacgtcgcataaaagaaggaattgtgtgctgttgaacaataattgtttgagggtcgccgttggcggcggaacgaaacaatcgattcaaatttagacgaatcgttacaccgtttcgttgttgttgaaactgtcctgtctgagcttataaagaaattaaatgaatagttcaaatacaattgaacattgtgctgttgtgtggccataattgccgaagaatactgctgttgtgcatgaaatgcccacgaggcagcggcacactgttggtacgccttaatttatcagttgaggactatcagaaaagggcaccgaaccatccagcagcggacagattgag

SEQ ID NO: 5202 - DNA, 4594 bp, Heterodera glycines
aaggtcctaatttttttaattatttttcaattattagttggataattttaatattttatttaaatttagagtattaattggtttatgtcaaaaaaaagtttttttatcattatgatatttattttgaacttatgtatttctattacttcatcgttttatttcagatatttgttcaatctaatttagcccggataaagaaaagaaaaaaataaaaaataaatagactttaattcaaataaatttacttattctgatcagctaaatttatcattatttttatgtaatttttaaaaatactttttgttaacatggtatattgataatttgattattcgcattcgtatttatactcaactatcagataatactctcaaaaaatctgttaatgcatccatcgccgggaaaaaattttgaaaatttgattaaaatttgttgacagattttcactaaaaaatgatcaaattttgtgatttttatcatttttctaatgagaaataagagttttggcgcgccgctgagaacagtttttcatcaaattaccaaattttgcgattttgggccattttctaagaaaaaataggagttttgggggcgcggcggtgccgataggcgccgccggcgaaaaaattggaaattttgatcatttataaacagtttttcactgaaaattagccaatttataggtaaaattttgaaaaattttatgggaatttaatccaattcttaggggtgtaaaagtcgcatttcgcgccaaaaagcgaaatgcgaaaagcgaaacgccaaaaaatgcaaaggcgaaatgcgaaaagcgaaacctcggcccatccctgctatgtgtttagattgattgaaataaattattttttaacaagcgtaaaatcaatacggaaacatttcataaccaaaatttggtctttttatacgaattcgaaataaatgcgaattttaaaagacttattgacattttattcgaaatcgagtttgatccggagttcaaaattggcctaaatgatgaaacgccatcgcttttttccaagaacgcgggcttcttcacgccaagcgcacgtgtacaaatggtcacccaatgaaattatagttgggacaaagtgaattttcgtggaaaaatggattttaatttttttgttcgaatccgggttcggggttcgaattgggtcaaaacagatgccagaatcggttttcccgactgcctttttttcaattttggtgcctattttagtgcctttttcgcgattttttggtgcctttttttgcgagctctattcattacatttaactttttttcctgacgttaaattgcataccgatagagaaaatatacctatgtgtaatgagtgtatacaggcatttattaacctaattaacatgcaatacttttaaggaatctcacccaatataatttgtaaacacttaaaactatcattctcctgagttagtatgcattatttattgccatcaaaagaacagtacatatttacaatacacgaaaattggttgtgagaaagcagtaaatgaacaattgcaaatgggaatctgtacatggacattaaattggaagtgagtcatacatatatatgccaagggatcatcaatatatggacatgggcgagaacgagggcacaaatgggaatctgagcatcaaattgcatcgcgtcctcaatttggcgggaagaatgtgacgtcgtggctcaggtcctccgcgattgttagtgctgctccggtgttcatttgattgtggtagcgcggcaccgagaacacagtgacaagacgttcgtcggcaaaatattcaatgccctcatgcaccagctgaaaaaatgggaaacttttgaagaaaataaatctgtccaccctgcctacctcatgcgcccgaattatgtagttgaggttgagcagctcgcagatccggaagaccacgtcctcgccaaagacgacgccggccccgcgcgggctcggctccacaccgcggatgtcgagcattggatcggcccacagaagatccatctccaacgacgggctcggcagggtgagcagcgggcggcgtaattcgttgagctgctgcaagctggtgatcctgtcagaaatgccgccatgcatgcctgaaatgaagagaaaaattaatttgagcaaaatgaaacaacaagtcgatctcacacagaatcctgtccccgatcaggcccacgtacggcatccaggcaaaagtttggttgaacatgtcgaagagccgtcgagtgtccgcttggtggtagcgctgctcgatctccgagtagaagccatatctaaaacaaggttgaattagtgccatccgttgccaattaaacgttgctcgactcacactctgttgatgttactgcactcgtggttcccgcgcaacagcgtcacactctccggatatttgaccttaaaaaatgagattactgccccgtaattcttttgcctttccaaattcaccttataacagaagaggagcaccaccgtttccagcgattgggggcctctgtccacgtagtcaccgaggaagaggtattttttctccggcggggggcccagcgtcgagaagatccgcagcaggtccgtgaattggccatggatgtcgccgcagacgttgacgggcggttgaatcctgacgagtgtctgctgctgccggaagacgtccatcgtggcatcgcaaagctggcgtaagtcgtgctccgtcacctgtaaaaagggaagggaagaataatgacgattttgaaaagcaaaaaacaattacatctaagggaaattgcccgtaagtggagtttctgactctgtagataaggccgtccacttgaaggctgaagggcactgccatcgcgcgttgctagcagccgtccgtccgttatgaaatgtgtccttaacgttgaaaagaccgccttatatactcaattttcggcttattattttctattttttcggtcgcataaatttcgttataaatagcagcaaaaaacaaactcacagagccatttttgcaactttgccatttcatcagcccttccgtcgcttcccttatcttcgacactgctcatcgacatacgcaattgctcaatgtccctgctcaaaaaaacaccgttgttctgcgtagccgaatgcgcaatattcctggacatgttacgacatcagaagtcacgcgaatcgcaggtgcacttcgccagtgtttcttccttttttttcaatcctccaaccttttacatatagccgcttcacgggtgaactttagtgaacgccccgtgaaaaaaaagggcaaatgatataccgatcgattcgtctcaaggagctaagcattgaaaaatatgtctcgagttgcggaaatgccaaaaaaccggtttttgaaccggttcaaaactcgaaaaattgagagatttcgcactctacctttttttaaaccatcgaatccccacaaatttggtatcatttgaaagctcttgacgagcttaatctaaaaatcaggaaatgaagtcgaaccagtatgtatgtatttattgtgtatagtgttgcgcatattccatattgtccatttaatcatttatgtatacctatgtgtttagattgattgaaataaattattttttaacaagcgtaaaatcaatacggaaacatttcataaccaaaatttggtctttttatacgaattcgaaataatgcgaattttaaaagacttattgacattttattcgaaatcgagtttgatccggagttcaaaattggcctaaatgatgaaacgccatcgtttttttccaagaacgcgggcttcttcacgccaagcgcacgtgtacaaatggtcacccaatgaagtatacaggcatttattaacctaattaacatgcaatacttttaaggaatctcacccaatataatttgtaaacacttaaaactatcattctcctgagttagtatgtattatttattgccatcaaaagaacagtacatatttacaatacacgaaaattggttgtgagaaagcagtaaatgaacaattgcaaatgggaatctgtacatggacattaaattggaagtgagtcatacatatatatgccaagggatcatcaatatatggacatgggcgagaacgagggcacaaatgggaatctgagcatcaaattgcatcgcgtcctcaatttggcgggaagaatgtgacgtcgtggctcaggtcctccgcgattgttagtgctgctccggtgttcatttgattgtggtagcgcggcaccgagaacacagtgacaagacgttcgtcggcgaaatattcaatgccctcatgcaccagctgaaaaaatgggaaacttttgaagaaaataaatctgtccaccctgcctacctcatgcgcccgaattatgtagttgaggttgagcagctcgcagatccggaagaccacgtcctcgccaaagacgacgccggccccgcgcgggctcggctccacaccgcggatgtcgaaatttaaacgtaggaaaaaagttaattgtaatgatagagctcgcaaaaaaggcacaaaaaatcgcgaaaaggcactaaataggcaccaaattgaaaaaggcacgaaaatcccgaaaaggcatgaaaa

SEQ ID NO: 5203 - DNA, 1271 bp, Heterodera glycines
  unsure (1)..(1271): unsure at all n locations
taattacaaataattctgggcttcaaatattttccattatacccaaattttgtttgttatttttctaactatctgtatgcaaaatttggtgtagatttaacatagggaacaaaagctacacatagaaaagtaaatgttgttctttacattattaagaatgaagagacagtacataaaactgagagaaataaagataaaaagtaaaggtgacagaacgccaaattttttttataattgtccataaaatttatttatcgccgttttttttcttttttaccatccatgaagtttattaaaaaaaaattttttttgaaatctgtacacagataatacataagtaccaaaaattttaaatgccttttttcatgcctttttcgggattttcgtgcctttttttcaattttggtgcctattttagtgcctttttcgcgattttttggtgcctttttttgcgagctctattcattacatttaactttttttcctaacgttaaatttcgacatccgcggtgtggagccgagcccgcgcggggccggcgtcgtctttggcgaggacgtggtcttccggatctgcgagctgctcaacctcaactacataattcgggcgcatgaggtaggcagggtggacagatttattttcttcaaaagtttcccattttttcagctggtgcatgagggcattgaatatttcgccgacgaacgtcttgtcactgtgttctcggtgccgcgctaccacaatcaaatgaacaccggagcagcactaacaatcgcggaggacctgagccacgacgtcacattcttcccgccaaattgaggacgcgatgcaatttgatgctcagattcccatttgtgccctcgttctcgcccatgtccatatattgatgatcccttggcatatatatgtatgactcacttccaatttaatgtccatgtacagattcccatttgcaattgttcatttactgctttctcacaaccaattttcgtgtattgtaaatatgtactgttcttttgatggcaataaataatacatactaactcaggagaatgatagttttaagtgtttacaaattatattgggtgagattccttaaaagtattgcatgttaattaggttaataaatgcctgtatacactcattacacataggtatattttctctatcggtatgcaatttaacgttaggaaaaaaagttaacgtttaatcatttagagctcgcaaaaaaaggctccaaaaaatcgcgaaaaaggcactaaaataggcaccanaa

SEQ ID NO: 5204 - DNA, 1163 bp, Heterodera glycines
  unsure (1)..(1163): unsure at all n locations
taaaaaatgtctttnttcggaaattggtnnttcggtctctaccgggtcaaaaaggccaatttacctgatagggtcgttcttctaatagggttattttgaaaaaatgcccaaatatgcacataaaatatgcacgaaatgccaaaatatgcacaaatattcatataaatcgcgaaatatgcataaatatgtgaagcatatggaagtacggcctagaagcttcaaaccaagctaagtggatttcaagcctcccacattccaggaaaaaatatgcatatgcatataattaattctatgccctagttatctctttcatttgattttttacctcctaatatttttctgtcctcttctcgcagaagatcgatttcaattgttttctcagggcattcgacgtgctttaaatgtttagttttttagtaaattgaaagaatacactcgtaatattagtcaaaataaaacaaaagattaatagatatgaagctcgatttatttatttattttttaaataaagttaaaaaatccagatccaggcacggatccggtccttgacattgggtttttcctgaacctggatttcctgggttttgtccagaaaatccaggtcccacataaaaatcccgacttaggtccagctgtaggcttttttgcaaaatatcgaaccctactacatatatataaggattttttgttggtcgttggtatttgaatttaccaaacgttgaatttgtcaaacgcccaatacgactcgaaacccccggttttttgacccacgaataatcggggatgagaatccaactttcaataattacccaataattttgttgctcattttcaaatctattgaaaatgttttttatgtcgtgttgcaggtcacttattttgattgaagaagccgtttgatccgctttttcgcttgaatattccgcctttgcctttccctcgtcttctttccctttttcttcctctccctcttcttcctttccctttcctttctcttctattcctctcactcctcctttttgtcttccctcctcctcttcttcttcgtccgccttcttctcctctcctcttttttgccatttttcaccatttgcattttttgattgcttctcttttaggagatgtccctcccattgctctatattttccaccatgtgcacttt

SEQ ID NO: 5205 - DNA, 2627 bp, Heterodera glycines
catgatcgatctactcggcaccgttccctcatcctctcttcatctctttctctgttcgtccgtgtacttctttcctcctcctctttcatcatgccaaactctccgtattcgtcactgttctctaattgccatttaatatcaaatgaattacggatgtcaccagttgcctcactaatatttttgaaatcgaattcctcaaaaactgattccacagcattcgtatcaaataaattcaacagtttttgtcgtatattcgccgtgcctttactttgcaggactaaaataattcaaatgtcttctgattaatcctcaaccttttcatttttataatgttattaatagagaccgacttttgaggcatatgccttttttctgcgaagtagtttcgatatattaagcataaataacacattttccacgtggtttgagccttctccgttgacttttattttgccttttttggcttttttaacttttcatacttttttggcgttttgtcgttttggtgccttttggcatttttttccgaaaaattccatcaaaaatgcaataaatcggaaaaacacacccctaagaaatgacccgaaaaaaaatccagaaaatacactactaagaattgaaatttttttttcaaaatatatcggcaaaatttcattttttttaaaattttaaatgccttttttcatgcttttttcgggattttcgtgccttttcatgccttttttcaatttttttggtgcctattttagtgcctttttcgcgattttttggtgcctttttagtcggtctctagttattaagtaaaaaattttttcttcgatttcaatttatcgagcggttaattatagttatatgaaatgccttattagttattttgactcactatttttcagtgtcttccaattattatttcgtcttatcagctgggtaaactttgcccgatgcaattggccaatccattcccctatttttttcatttctttcccattttccgttcctttttttgctacttttttcacaattacttcccattttttgaattggattgatgcctttacattgtcatctttgctaattttttccaccattttctttgtctccaaaaacattttctccctcaaaaatttttcaatttcgtttagttcatcttcgtcgctatcaaaaattggatcataaatttggtcggaaatataatcgctgatcagccgaaaaagttttctcatgtgccttccggcattaaatgtttggccaagaaagtgcataaataccaccaagtcggcgccaattttgtggctttgcagttcaattttgttattagttagcatgacaaataaataatgagtccaaaggagttcgtcatttttgggctctaaataaattgttaacttatttcaaaaacaaattatccccaccattttccgcaaatttttgtgtcaaaccaattttgttgtctaattcttcaattcgttccctcgaaccaaccaaccgcagaagccgggtttttgtgccgggaaagctaaaaagccgtctgaacttagttaagtcggcactggctatttcggcgattatcacagtgatctttgcgcctagttctgcggccatctcctttttcaatatttgcgcctgcactattccgttttcacattcgtctgttcgcaattttttcaccattttttccgttatcgcatcaatagaattattgtgcttaggtgcataagcgaagttggcaatttttatcaacacacaaagttggaatggcgaaccaaagttgcgcaaagcgtctgctgcggctgtattcgctttagcgatcagcaacttaaagccacgcggcgattggagacgagcggataaacccgcttcatccgccgcctggccttttctctcgctgatttggctttgcaagttgtccggcaacattcgcatttccatgagcatttgaacagtcataaagcgcaacaactcttttttgtgccgttcggtgccgcttctatgcgccatcagtcgcttaatgcgcattaggccagtggtgttcatgagcacatctgtacagtgttaatatagtaggagggcgataaagggcgaagaaggagggatgcaaatgtgccaatgtattgtagttcaatggtaaagctgtccactgtttaaaaagagacttcggttcaatttccacccgggcaaaacatttgaaaagagaacaactaatgaatatcgttaggggctagtttttattggtttcatttttttggtttttggttttttggcacataaaaaacatatcgcacgtgtttgggctattttggaatttttagcacatattttggtatttttgagaaaatttataaaaaaatacatgaaaattaaaaaatatacccccctaaaaaaatcattttttttacaatactcttaaatttttttttcgaaaatgaaagatgctaaatcgaaatttttcattaattcgtcgttccaaaacattcactattatgcgggcgaaaaaaataaagaaacatttttcttgggttttatgcataaacacacttgatttttccaattttgagaacataatttctcacatattttggcatttttttttgtttttaacagatattttaaaattttcagcacatatt

SEQ ID NO: 5206 - DNA, 5418 bp, Heterodera glycines
ctagaacatcttttcactttttgttagattaacagatagattcgctttttagttaagaaaaatctcgaaatagttaactaaaatagaaggaaaaatgccaaaatagggataaaaggacgaattagtgacgaatagtgccataattttcagcctttatgcacttagcaaatgaggtacatttccaaatttagaggaaaatctcatccgatcagaatcaaaaattcatgtcaaaaaaataaataatattttgaagataatttttttgaaacaaaaaaattcatttcttagggtgtatatttaaaaatttggctgtagtattgaattgggctcgctaaaaaaccggctaaaacgagtaccaatcaatctcatttctctcactgagaggaaccgattgatatataattcacatgcaaaatcaaagttggcaagtatttttcacagttctcttttttattaataattaaggcattattaaacactaacttttataaattcaattttcaacgaaatgttttttgcgcttttttaaattttaatggttttaatatttttcttaaattgatcccgcttgtgagaaaagtttttgtccatgtttttgattgtttgtccataaaaacccggtccataaatataataattgctaaacaaactctctcacctgcgcgcataatctccggaaattcgtcgtccaaaagtgtcaaatatttcctaccgatcatttcgcccagcactattttaatttccgcataatttgcaattttattgcacatgcacataaaatggcgaagctctgcgctattttccaacaactcgtaaaaattttgcccaattatatgccattgtaatggctcgttaagcaaacacatgctaattcgcgcattaatttcagtgtcagcgcagtcaactggatcaattatcttaattggctatgcgattgcaatattttaaaatttatcatttattattctatatagactattttttaacatatagtttttatataatattattaagacgtgccgagaaatgtcagcaaattagtttaaatttggtaatttttaagccctccgtgttacgattgtttgtttaccatgtttttggcttgtaagactcggcctacctcaatgatgtccaacactctgtgtttgtccaaatattccttccatttctcacgtattccctcatcattttcaatatatgttaacatcattttgagaatttgggcaccgttttggtaaattaaacaaagcattttgttgttttcttcctcgcctttctcttccaattccgtaatttcgtcccaatcgctttttagcctttctatttcatccaaaagcccatttttattcagttttgtgcccaattccgtgagaaatgccaacattccctcaatttttcgcgccaaattccatttggccgaatttatttgaaatttttgatgggtttccagcggagcttcaaccatttgcagaatgtaagatttgaaaaagttgatcagttcagtcgctttatcatcttaaaacactttaacttttatttatttttgtctttcttttatacctaaattttctgccattgcattctgaggcgaattttcgtccattttttccttttttgggcattgatgcgttaattttgccgcattttcaatgctttggcttcgctcttttgccactattttttgttttgttattttttcaggttgcttcaccttatcgttgctcactttatttacccttttgtttttcccacaaaaaacgaaatttgaagaaattaaaacaattaaaaataaaagaaaaaatagagagaggctttttcgttttgcttctttcattgtcatttgtcagaaaatgataataaaaataataataataaagatgtaaaataaatgtatcgtttgcacaattattttgctggcaaaacaataattacacgttgccaataattaatattgttttatgttttgcaaaaaatatttttaaaaaagaatattaatgtgtgtgcagtataatttcctgttttctgtgcaaatgtataaatttcattagttattttgcaacatttttcgtttgataaatttatttaagtatcaaattaaaaaaaatattttacaaatcgaaaaacaaatgggaaaaactcataactgtgagatgtaattaagaactataattaattgtctatcgagtgataccacaaatgttaacaccaattgaattttgataatttgtgattttaattcctttgcacttacaattctgagaatggggaaaatgtttgaaaaattcataggtggtaggggcgggaaaacctaccgaatagcctttgaaaagtgggcctacaatcagggcttcgatcgaaaatttttcaaaatcagaaaatcgggctcaaaaaatcagattttgggttgcgaataaaatcagataaatattgacattatgccataaaatttcaaaattagacattttttaaaattcatctcaagcaataattaaccaaaattaacagcaagaaagaaattataatgccaaaattgaaaaaattttgcttaaacatagtacgccaatccaaatttaggaagaaatttgaaaaatttttcggagaatcgataaatcagaacaaattgggtcacaacctccaacaaatcaggacattcattcctgaccaattaggacattttcattttatcagatttggacccttcgaatcagaacatttgtgataattcaggacagatcgcacccctgccgataatacgctttattactgaaaaattggcaaaatttgaataaatgctttaatataatatttgctcatctcttcttcatttcaaatctgtcttttccctttggcgtctgtttttgaaccaattggcaatctgtgaaaagaaaatattttttcccagcattttcggttgtttgttattaaaaagaaaattcggtttttatgtgtgaattttagacttttgtgcttatttttcgattttttgtgcttaattatcttttcttgcttagaaatccgtccctgctcatcagtagggctcggatttgtagttttttcactattttttcctgagctccccgtagcctgaaatgcacgaaaaacatgtttttttcggctgtttttaagctacttttcgagttattagcaactattttctagttttttatttttagcaactaaaaaactataaaatttttgaaaaaaaactattttcaactattttggcgttttgccaaaatttgttaacaaaaatgcaatacaaacgaaaaatacacccttaagaatcaacttaaaatttttttcaaaaaatacaccactaagaatcgacccggaaatttcaaaaatacacccctgattttgttacctttttgaagaaaattttcgattttaccgcccctaaattcggaactttttagcaactatttacccatttttagcaactattttgggggttttttagaaactaaaaattaattattttggcactttttagcaactataaatcgtatccctaatcatgactagggtttgtaattatatggatataaaatctcgaaatatggccataaaatatggaccaaaaatcgcgaaatatggacataaaatggcaaaaatatggacataaattttccgaatttatgggtaaattttcaaaaaaattttcaaattcattaaattctagtaaaatacatctaaaatggctaaatacggtataagaactcgtttttagaagaaaacaagcaatttctagagaaaaacgaccaaaaaagcgaaattttgctttttcggttatttttgacataaatttattaatttttaagaaaatttaaatttattcaatattctcgagaaaattttgcaaaaattgttttttttgaaaattttttcggtttttggggtcaaacaggccaatttatctgttcgggccgttctaatagaggttttttggaaaaatgccaaaatatggacacaaaatatggacttaaatgccaaaatatggaaaaatatggacataaatcgcgaaatatggaaaaatatggaaaatatggatatagaactctttcctagaggcttcaaaccaagctaaaaacatgtttttaatgcgtttcaggcctccaacagtccagaaaaaatatggatttccatataattacaaaccctaatcatgactttttctagaattacccaaattaaatattcttggtatcattcgatagccaaatagaagacaccgccgtaaagtttattatttgaagcgattaggcaattacactttatgcgaaaccaatacatacatacatcatataaaacgagagaaagggaagttggtgtgggcccgaaaaataggaatacgaaaattgcctcatctcgtcgggagtggtggggagggatcgggtggtgataaggactatggcatcagattcttgagcctggaaggaatcaactgtcaagaccgtgacatttaagggggtaagggatctaatagcttttgcctgtgccgagtacagacagagacaagtaattgatgcagatggaggtaaaatgagagagagaagggagagaattgaatgggcaatgtggttttgggccgaatttaatcgtgaaaaggaggttaattctctataatcaggatttgggagatcaacaagaagaagaggggcagtttgattgggtagcggaaagttggaagaggtaatcatggagcgttgttcggccgttacaccggcaacaatatctccatgataaagagaatcagcaagacattgggtgagaattgggtgtcctcggtaggaaattgtgagttttgtgttgggaatgttaggaataaaaattaaatgagaaagaaatgaattaaatccatattggagcaattcctcaggaagttcagaagagcgaacttgtagctgttttgggtcaccagcagcaaggattttttccaaatttggggccagagagagaatatgaataatttgattggtaggtgcctgacctgcctcgtcaatgaatatgatatttacaagctttaaaatagagggaatatcttctaacatactaagggtgacaaagatgatggggatttcagtcccaacgtctctgataaagatttccgcagaagaacgttcatctgctttctgggggtttttcagagcattgattttatatttattaatgattttggcttcttttcgtgttaatttttgcacattaagtcagctaaagttttgattagaagatttttcatgaaaggttcaaaaagggaaaaatatttttcttttgcggaggcagagagaatgagaagggctttggagttttggtctaaattaggaagaatatcagaggctaaacgacaaagagccacattactgtgggtggtgataaggatatttttttctaattctaagaatttttggatggaca

SEQ ID NO: 5207 - DNA, 1900 bp, Heterodera glycines
  unsure (1)..(1900): unsure at all n locations
aagatgaagcggacggattgaaatttgaaaagaatgccatcgacaaaatgaaaatgatttagaatcctagaatcgaagttttaaaaagcataagttttcaatataattatggtactttttgtgtagatatgtttttgaagttaaaaataaagtttactttatttcttacgtgaaaagtaaagactgtacaattgctggggtagaaagaatcgcaagattttggaaaaacgaccagcaggaggattcccgagtcgggttcgcgtccaactcttgaccccgataaatcccgaggctttttttcgggatcacggaggattatcgggattagctaaaactcaatttttttttttttttgcaaagatttattcaaacgcatttattatttataattgatcaactcgattgagaaataatagcatttcaacctttaacttttttttgcggcgcgctttttcgaaaaatttccgggggaaaggagaggtcaagtggtgccgttaagatctgccagggtaattttgaaaatttagttgggatttgtttaaagaattttaaaaaaatggccaacttttgggtaaatttgaaaatttttgtggtggggaagttatttaaaaaatagtaaataataaatgatttttttaactttaattttttgtgtttaattgttgcaagtcctttatacgaaaatggaaattattcgaaaaagttattgggattccaatcccgcaggatctcgcgggatggcgaaatagtcgggaaggattcccgatgaaatcctgatccagctcaatcgcgataaaatgctcagaatggatccttatgtcgggctcctgaatttaatcccgcgggatcccaatcctgtccgttctcaagtggaaagtaactttaatctttacttatttttatataactgcttttttaattcttctttccggacgcttttaaggcaataaatatctgacaaaaaaattaatgaaatttttatcaacttttagaattttccaaaaattacaaaaatgcaatcaaactagcaaatgatattttataaaaatatatcgcccaaaaatgggaaaatttaaaatttcttatcaaaacataagcacgaatttcaaaatttccaaataaaacacatgcaaaaattattttatatgtttacctcctctgcagagaatgtttcacagatatatccagatgatgaagtggccaaatgaggcgcattaattgtcgtcgattgatcgcccattaattaattgattcgcttttttcataagaaaaattattaattattattaatatttagttgttaaaagttataacaaaaacaaaatgttataatatgactccatnnttcttcaaattngcatattttggatgcacattcatccaaatgcgccttcttccgcctcgttgggcggatttgcgcaccccacccaaaataaagaattgaagaaaatgtgtggtggcaaaaaaaaagagagaggaatggatgaaagaatgaataaattcttggaaatgaatacggtagccaaaaaggaatggtaacggtatttatttgaaaatacaacagtatgattcgttcctttaagcacagtttgaaggtgtagtcaatgctgaattcaaaggtagaagaaccgaaaatcaaattttataaactcaaccaatttggatatgtttttggtgattatcgaattttcaaagatttttgaaatttgaataaatttcaatgaaattaggtcttaaatgtgtcccccttttttcattgaaaataagtgcggtctcaattttcactaaatccaatttttatttttattttaccacacttaaacaaaaaaataaaaaatatagcttttatgtatataattataataaaaatagacgtgaattgcgaatttcaaatttctct

SEQ ID NO: 5208 - DNA, 1327 bp, Heterodera glycines
tgcaacgagggtattgcccctcttttccgtctcttttctttcatgagaaactggtcggacagaaaatcgctgctgcactttatctcactcttaaattctttatctacacaaaaatcccaagaaattcctttcattttgaatattttatgcattttgctgcatataaatcagttaagttttcagcgattttacatttttggcacaagcgcaaattggcaacagattcagcagcataaataaaagatgagctgtaggttttgctgttcgtttgtgtccaattgtcatttgctaaatcttttccgccattgggcgttaattaatttccttaattatttgcttgtctaatttggattctctctcctctcaatctcgtgaccagaaaattcaattgagatacaaatttttgaaagagagatatggaatatgatcatttgaaacgttaattggtacggagaaaaaatacagaatcccattacagtatatttacattttacaaatttcgataaattttcagatttttattaaaatttttgaaactcgaaaaaactctctcttatttcagaacagcttcctatacatattttgatttattatattacaaaatataattatattgaatattattttaagaggattgtactgtaacactgatggatttctaatgattcattttccgggtccacggcacctccccattctccaaaaattcaccaaaaaaataaatttaaaaaaactgaataatattttcatggcaatcgaaaatatttttgaaaaaaaccagataaactaataatcacgcaaatgatggacaaagaaagtcccgacgtggttaagcaaacaaatgggggggggggaataagcttaactggggaggaaaaagtgaaactaaaatagacacgtcgggggctaattttggcaatttggggaacaaatcggagagagtaaacagataaaagggatggggggagagaggatagagaggggggggggggggtaatgcaagcaaacgaaaaactggacaaacaagggcctattacaggattaattcccattcgggcacttattatggcctccacagaaacttgttgtcttcaatagcgaaaaatcagtgacggaagacgaagtttcggtgtcctcaccagcagcacgagaatgggcaacatggagagggctggcaccgtgacgaatgatcacaaattcgcgaaaaaccgagggcaactgtaaaggccaactaaaacaggtcaaaagagcaaacttaatttccattaagcgaatcaaaaaatggtcgcctttacttttgtatgcacagcagccaaaaaagtgggga

SEQ ID NO: 5209 - DNA, 2251 bp, Heterodera glycines
tttactttttgaaaaagaattaagttttaaatgtgtaatactttttgataaagatttgtttaaaatttggcaaatttcaaattctctgtcgcgtgttttctttgttcggaaaacgcgaaaacaaaacaattgtagaaaattggcgcgtccaattcccatcaaatctcacatcggcttgtcacttctgtgcccaacagcgcttttggccaatccaatggaatcgcatccaatgctttgggggcgtcggcgtcggcttcttcgtttctgttgcgcaactccaaagcgaactgtttcctttgtgaccttccgcgaatgccgtgggcaattgttcttgattatgcggaacccgtgtgcagaggctgtgtgaactatgaaggagcagagaagtgattttgccgattatgcaggccgatcggatcagaaacacccccccccccccgcaggatcgaagcggtgatcgaaagcgcacgtcggatgaagcaggtccatgcgactctctccgccggcatttgtccgtccgtcatttccaattccgtgccaatgggccctttggaccttctgaacggcacttcttcacagttgaggtcgcatctgttttccgctcagcctgcacaacaaatctctgtgaacggaaatggcattggcttggccaatgccgcggcgtccgctcatcaccccgcgactccgtccgttcccaacaatcgcttcagcccgcgttcgacagcagcgaacggtattaactgtccaccgtcatcgtctgccataaatgggacaactgtgaacggatcaccgctgaatttggccactcaaataggaaatcagacggtcggccttgtggagagcatccaccagcagcaacaaagggcgatggccgcagcactgaacagtcgcggagggacagtgaacggaagcggaaacaatgcgctggacgaattaaatcagttgaaccaattgcgcgccatgctgccctttttcaacccgcaccaactgctgccgatgggctcgctcaatgggttggctgcttcgttaatcgggccacaagcactgatcaatgcggtgggcgccaacgccggagggaatgtcgcgggaatgaatggtggaggaagcgggcggaagagggaattggagggaggcggcagcggggacacgagggagtcattgaacaacaaagtgcagagaggtgggggagagaagtgccgaagaaaggcggcggcgaaacgcagcggctaatctgttcgtttaaggggacgcccagacgacgtccacgtcgcccacctccaccaacagccctgaccagtccctgcagcacaacggcttccaccacccgtcctcccatccgccgcctcatcacagctccgaccgtcgtcggtcgctattcctttccaacgccaattccgtgccaacgccttcctcaacggtcgcttcaacaacggcattcgcaatggccgcggctgcccaacacgcggcagcagtggcagcccaacagcgagaaaacaacggcgaacggacgctgaagtgcacggggtgtcaggaacggctggaggatacgcattttgtgcagtgcccttccgtcagcggacacaaattctgcttcccatgttcacgaaaatcgatcctaaaacagtggaaatcgcatgtgagaatcgagaggagaataataagagcataatgccacccacaacaattaaacagatcattagaaaacttaaaggattaattaatcaattaaggaagtgcactgtccctccggggaaaaatgtccattgatcaattccagccaaccgtggacattcatgccgcaggagattcagactgtaagaacaaatttaggagaagagagcgaaaaagtaacaaaagggagagactgagaaaagagagaaaaggggaaagaagagagagagggagagaaagaaagaaggagaaagaggatgagagaagagaaagagggaggaaaggaaaaggagagagaaagagggacaaggataaagaggatgagagatacaaagaaaggaaaagagaaagaggatgagagagaaagaaaagggaaaatatccatcttatgtcccagattcaaaattgcatacagttttataagttttcttaggtgctgaaaacgcctaaaccatcaaaaagactgcgcggcaaagcatttaaaccggtttaaatcgcgaaaaattgcctcaaaaattagccaaaaactcattttaaataaaactttttgagcaaatttggtatcattcgagagctctta

SEQ ID NO: 5210 - DNA, 2634 bp, Heterodera glycines
  unsure (1)..(2634): unsure at all n locations
tcttcgcatgctccttntttgcgaaaatttacttatcaaattattctgttcatccattatttctttggtacttaagtgtacattttcactaggactcagtagtcaaagtgctcaaatgacgtcggttcgacttcattccctgatttttagacttagctcgtcacgagctttcgaatgataccaaattttctcaaaacgttttatttaaatgatgtttttggctaatttttgaggcactttttcgtgatttaaaccggttcaaaacccagtttaaacgctttgccgcgcagtctttttgatggtttaggcgttttcagcacctaagaaaacctatgtgtttttatgcaattttgagtctgggacataagatggatatttaccaagaaaagaacgagagaggaaaagaaaaagcaacagtttgtgagacaatgctaaattttaataagaaaatcgtggataattaattcgggatgagtaatttacgttttaagattttgggtgtggacgacttcgagcagtttcagcgtgatcgggagcgaatcggcttgtttctgtctaacagtttggtcggaccgaacccaacggcagtggtgagggagaaaaaacccataagacaacaatttgtcactttagccaaacggagcaatgaatgggcggggaaggaccccaacaaatggggagacgaacggcggcgcaccgatcggaagcgaaacggcggtgagtcacttcaaccaaacagaagggcacaacggatgccaataccaaactgttcattgtcagatgtgcactcttttgaacagcacaaaatgtgtcaaggaatcgttggaccaccccaacagatctcccggaaccgtaagcggcgactcatccggcggagaaaacgctgtggcactgaacggacaatcgccgtaacaaaactgcgaaacggacctttattacagacttttcctctttccatacacctccattttcgtatctctaatttctgctgtttgactcggctaaattttaaaatgacaaatttacgccatttgcatttaatttcaaaaagtcaaaatttttgttgccattgcgagcaaacattgatgatgcatttaccctcttatttaatatatggatagggatcggatttttaagggcgaaaaaaacgcgaattaaagccgaaaataaattcgctttttgaatatatttttccaaaataaaaaaatttcaaaaatcaaaatttgatcaagaaaaaaaacatttatttgttaatggaaaaatttttgaacaagtcgccaaaaaatgtgatcgcgtcaaaaaaatatatttcttttttgttaaagaatttgtgaatttcacatgaaaaaatttaaaaatcgcgaaataaagacaaaagtaaaattgtagaatactagtacctcaccaaattcgacgaatgatataccattcgacgcctctcggtctgtaatgcacgaatccgaaagaatttggcggaaaccactttgggcaaagttatggaccagggactgacgtaaaatcactaaggttctgaactacacaaaaaggagcatgcgaagacggagcaagccgccgtagtcgagtgtgcgctggtttttagcgcaataggcgaaattcaatttttaaatttgacggttttaccatttttctgactcaacattttaaataacgtttttgaggaccagaactctaagtaaaaacttaaaaatccgatccctatatatgaaactataaaattagttctcttgttcaaacaatcaatgttttatggctttcacgaaggcaatgtcctccaaaagttcggattcatttgtaatttcctctggaagttgttaaaccaatccgtaatcgattttgctggcacatattccgccatttccgttgcagttgatgccatcatttgaccagactttggaagagagacggaaaatgattgaacataattgacgaaattgcgcaacattttttgggagaaatcgttaattgcagcaatcttaacaaaaccaaaatgcgtcaaccaccaggaaaagcggtaacagcagcgcacacccgtcccgaataagatgtttttctccatggatgaatgctgccgacaaatatatattcaaaaaaactcactttttgattttgaaccggttgaaaaactggttttttgtttccgaacttcgcgaaggttttggatgatttttaacggcccaattctattttttttcgtgcttttgtggtggaattcaattggctgtactcaaacaacttctgatctatttcactaccctaagatcaattttatcatcctatgtttttgttttatttgttgacgtgattcatccacggtagaaaaaacattgagtcgttacccccccccccccaccgctttttttacctgtccattttccgcggaaaattgatcattggtttgacctttgttttgtatttgacttaaaggctcaagcaaaattccttaagctttcgttaagaaataaagaaattacttttgtggaaaatcaaaaatttcgttttcaaattcttaccaattaaggcatttttggtcccttcggtgtttaagaattgagagccagtgaaaatattatgcgtctggagagaatttatatacttaaaaggaatgttgtgaaa

SEQ ID NO: 5211 - DNA, 1816 bp, Heterodera glycines
attatttattaatttatttcgccgattggttttaaatgaattagcaaggtaaaaaaaacactgaaaagagcaaaaggcaaacaatcagaattaaattttatacgttctctgtaaagtccaaattatgaatgttcgatttcgttaggattaaggaggtaattacttaattaaaattgactaattcgttatccaatgacccggaatgctcaatacgaaaagaaaaagatgagttattaatctaaaggattacctgcccaactcggaaaattgcgcttggcttttcattgctaatgaatcccaaattactccattccatcgaacccattcccttttccatcgaaggccaactgataaatactttaaaaatgattagattgacaatgcgttttccgataggtcacttgatgcgccaatgtccggtggtaatggttgaagaccggtcagaaaaacaacgatgtgatttatgctgaaaaatacatttacagaccaaaagccagtcatttttaataataagtaattcgacgtgcattacaacctcccaacacatttagaagtttatttttctttcaataaatattagattcaaatctttttaatgaaaataaatcgtctgtattttgctagtaaaaaacaataactgtcacgtcaaaatcttccaaaaaattatagtaatagaccaaataaaaccaattccatttgatgaatgacaaatattctatttacccataattctataaaacccacttggcaatatcaaaaagctctgttgtatattcgccttctttatgtgttgtgaaatcagtcttgaccattcgtcctgcaactatgacgccgaaaatattcattgtttgaattgatattgaaacaaatattagctaaaagattggagaatatggacacctcgaattttgtatatagagaccggattttgaaacaaacggactggaacttgacgatggatgggaccaatgggactaaaactaccatttttccggttagatatttcatttgaggaccggaaatgggctatcattagcagggctgcaaaaaatatgcaaatgcatatttttttcttggcttctccaagctctaaatagtaggaaaaacactttcttttttgtgtttgcgtataaaaatcgggacttatttgcatattttgagtttttctttatatttaatgcatattttaccattttctatacatattttcagattttttttgcatattttgccatttttcgtcaaatttttcagatttgattgaaaatgcctaaaattaaatccaaatctgaattgatgcgcaagtgggtcaacagtgagtttcactgctgaaaaccttgagaaacttttgatttacaattacaaaaacatccgatataatttatgagttgggctataaattatatgcttttgcatattttttctgcgcatactatgaagaaggggctcaaaaatagcatttatacgttaaaattttttgatatgattaaagttttagtgcatataaaagcatatttttggagttttcgagaataaatgcatattttgccattttttgcgtttttacagcatatttcggtcatttttggcaaatttctataagaaaaatgcaataataacaaaaaaatacacccctaaggatcgactttttgggaattaaaaaaatatacgcttggaaatcgaaaaattttgaactttttgcaagaaattttgaaaaaaatttttgatactaaagatataaaaaagggattttgtttgagtataaaataaaaattcacaatgtgagagggtaaattttgaaattcaacaatttttt

SEQ ID NO: 5212 - DNA, 3116 bp, Heterodera glycines
tcagtggcctccccaactttttcataagcgtgtttcatctgagaggaaagaattgaaatgttcatatattttaagcaaattgctcaaagacttcgttgtaatccacggaagagtcgttgcacagtgaacaaatggtggctaattctgtcaatgctttgtgttggtcggttgcacagtttatttggactccgttgtacatgatttgcccagtcggctcataggtggagccagagattgtgaattcgctgaaatgaaaaaaacaaataaaaaccaaccgttttaaagggaattgcaaaatgtatattatcattacccgaaagtgatttggtcgccgtgcgcatgttcaacaacaaacattttggacacagacatttgattggtggttaatgttcctaaatgtaatttaattgagcattaaagatttccacattttgtggtggggccattggaattgattcaccagtcttgtccgaacaaatcaccgaagtgcagcccaatgtctcaacggaaggcaacgagcggacaatggcattctttttggccatccgacgggtgcccaatgccaaacaagtggtgatcacggccggcaaaccctcgggaatggctgccacggcaagggcaaccgcaattttgaagtagtaaatggcaccctttagccacgagccgccatgggccgggtcgttgaagtggcctggggtcaaataaggggtgaaaaggcactaatattaattaatcgaaatttgaaatcctaccgatgttgatggcccacaccgcgacacaaattatggaaatgactttggacaactgctcgctgaactcgtccaacttctgttgcagcggcgttttgtccgactcggtttccgccatttccgtgcggattttgccaatttccgtacttagtccggtgccaaaaacaattccccgggctttgcctgacgcaacatttgtgccctaaggccaaagggaagggaaaataaaaaaaaaataaaggaaacacacagagaaaaggcagttcttcttgtcctggttgaccgccctcgggtcgggcaccacgtccaaattcttaatgaccgacacagactctcccgtcagaatggattggtcaatgcgaatggtcgtcgaataaattttgacaagtcgcaaatcggccggaattttatctccaactgaacggaatttaaatgtacgaaatctcttgagaaaatctgtatatcttcaaattattgtatcataacaattaatcagaaaattgaaatttggcacaatttgcttctctttccaaatgcccacccgaaacttcgacgagatcgcccgggacgagttcctttgcacggatcatctgaatgccgtgtttgcccgctcggatgacttttgccatttccggttcgtattccttcagcgcttcaattgcactttccgcatttctctcctttaattgcaaattccctttttctattcgtatattaaacaaatgataaaaaagtgatgacctgccaaactccgaccgtggcattcgcaatgagaattaggagaataacaaaaggttccacaaacgcagtgactgcactcgtctggtcatcgtgctcctcaaacaaggcaaggacctgagagggaagtgaagcgaagccaaaatatacaaataaaaaaaggaaaaacttacaaaagaaattattgcggctaggagtaaaatttttacaaggagatcatcgaactgctcgagaatcaattcccacagctttttcccctcctccgcgggcatttcttaattaaatatgtaataattttaacaattacctaaattgtccccaattcataccattatagccatatttatcccgcaattcgtctgcttgttcctctgtcagtccgtctggccctgtgccgaaaaaccgaaacaattcgtcttcacttttcgtatgagcgttctccatctcgctgtttgtgcgagtatgaacaacctgaagaacatggaaggaaagggaaaattaaataaaaggcgaggaaaacaaaaaggaatatgacatttggttcaatatttctatcaaatttccaaaggatgtacaaaagaaaaatgaaaatgacgtaaaaaaaacgtcggaatttgtctgtggccaatttaggaattatatgcatcataacgaattgcacagcgcttatcattatcaacgaattacgattaattaactcatgttgattgtgagataggcaccggcaattaaggaggccaaatggaagtttcagggaaaaccaaaaaatcacattttcgagggtctgccaatcaattggcaaagacaattaaacaatgccaaaggcaagagaaagaaagaagcagaaagtcgtttcaaaaataagaaggacaaaatgacacgtcaatgtaaaaatacaaaagcaaaaaacaaatcaaattgaacgttatgattatgaattgaggaaaggaaatgggacggacattgtcactatgacatgacttggcctggtttaatgttaatggattggatttgatttatgatgattaaaaatgagttgattatcattaaataaaataaaagggaatttatttaattatttcacattaaaattatttatatgtatacctatttaaaattaaattattaaaaactcatttcttcaatttgttataatttccaaatcatcggtttgagaatttatttctgcacaaattcttttttaaataagttttcccgcacttaaaattgacttgaaaattcttgaaataaactgaagacttgtcgagaaactgaattattgtgtaggaggaggagaaggaaaaatgaaaaccaaaggaactgagaaaagaaagaaacccaaacggaaatgacgcaaaggataaacacagaaaagagaagggaagggaagggaaggaggacaaaagtaattatgattaattaattaataattacaaaattttaaaaaaagaatattaattgaagcaatttgtacaaatgtgaattggacaaaaattaggtaacgaaacgaaaaggcatttaaagaaaaagcgattgaacaaagtgcaattttcgattggctagaattttttgcacaaagcgactgttggctttgggctttgtttccctttggcttcggggggggggggg

SEQ ID NO: 5213 - DNA, 3251 bp, Heterodera glycines
cccgggtcgcttcttcttcagacaaatgggtcgacggatcagcaaaaggggcagcggacggcggagagtgaaaatcgccgcgtcgtccgtccggcgccgttccttccgccgtcaaatgtttggcccttccgccaaacactcattgcccaaccgaaagctgctctttcccctcattgacgcatgtattaccattcgataatgatgatgggtttaagcagtttgaagaggcattttccacccgtcctcaagtgggcccaaacggagggcgccctttccctttcgcccgtcaaaaacccatcccttccccccccccccaccctccgcaagaaattccgctgtttcgcacgggaacatcaaagcgaagacggagaaagaaaagggatatgtatttgaacgatgagaatgaatgggaaaaggtgaagaaaattgagaaaaaaggcatgattgggcagaggaaaaagacggcaccgaccgaaagagacaaaggaaaagccgaagggagtgggggggggggggggaacatgacgatgaccggtgaaagtgcaaaagataatttatatatatttatcagccatcactttttgacaatcatttaaattataataatattgcagtatttaaaaatggaaatattgggaaacaataaaattgactgactatgtcagttaagtgccaatgcttttttggttttccttgcttaatccaaccacttcattaaagagaagtgattcaaattaagattatatgactaaagctttgtttttctctttatgggttttggactgaatcgttggctcaaccgacccgcgtacccataaataataatataataaaaataagtaaataaagtatgaaaatcattgcgcaattaggcatgtgctgccttcttcagcaatgtgtccgtgattttcttcacttcctcccaattggcagaagatggcgccagtcggcatttgatgctctgtaacatttgcaagtcttccctttcaactgccaatgtcgctgcctttttcacttctctgaattgtgttggcgatgtgtcgtaaaaagggcaaatttcaaaaactgacccgaggatgagataagccttcacttgctcctcgtacgcattcagtcggtccatgaggcgaaaagccaaatttttgttgccgtaagtgacacaaagttggatgacagactaaaagccaaaaatgaaaatttaaacaaaccgtaacgttttgccaatcactcaccaaatagcccgtggggctcttcttcgactttgcgtattgttcgaattgttgccattttccgccgcgtgcaaagccttcggctgtccataggaaaacccttcagaaaaagatgaaacaatgaagttgccaaaaacccactgtttctcgttgagtctgtgctgctttcgcaactgttccatcagtgccatttcctcccgtgccgccgcccaaataaacgattcgcggacggtcaaatgagccatcggcgtattgtactgaaagagaagaacatatggaaggggtctaatccaatgtcttgacagatccgtaatgagaataaaaggtccttttaccgtgacaaaaaaaacgttggagtagcgggagttatgtgataaaatcgggaccaaacccagcaaaagtgccgtgccttttcctcccgttttgtgttgtccacgatcatttgtgcacattcggccactaattgtgcgctcgtcggctcccgcatttgccgcaatgctttctccgcccttcccaattgttccgccactttcgacgtgtcgaaaaagtcctccgcttggttttgctccgctctgcccaagtggaaaatcgcctgccgcacaaagtcgtcgttttgctcgtaaagtgccaacaatcgttcgggcgcttcgtcacggatttcactctgtgaaattgccaatgttgaaatttacaaccaaattaaaaggggaacttggtaaatgctcagcgcttgtggcactttgcgcagtaacaattccatgtcgcggttggtcaaagagttgcgcaagtggcgaatcaccaaaagaactgatcaaaaatggaactaaaatggtcaccgttcgttcgacttacgcaagtcgggccgctgactctgtgcggctttgtgcagcgctttgtccaactgttgcagcttaagcatcgccgtcacctgccgggccgtgtccgtctccaactcgagcaaaatgccggccaaggagggcaactgcttgcgagaggccatctcggcaatatcttagatgtttctgactgtgaggctaacaaatccacaaaaaaacagtggcaacctgcgtagctaatggccgggtactcggccaacttggccaccatccgttgtgccaatccttcctccgtcggtttatccgtgtgccgttgttcgtcctccgcttctttttgcctttccttgtgccgttccatcattgctaaacaccagtggccgagcaccttgaaaacgccgttctttggtgccaaatccaaaaagttgcagaatttaatggccaaaggccaatggttgagagaggtgagacgatcgataactgaaaaaggcatttgaaacaattgggcaaaatcagaatgtaagtgactcgaaggaagggaaagttcgttcaactgttggtgggtcaaagggatgcccatcggtcggagggcattcagcgcacggaggacacggcaaatttggacgaaacggtcggagtcataaggccgatcacaacggcgaatgccaatggaagcggactaaatgaaaagatttataaaaaggaaagaaaggacggcactcgaaggagtcgcttttgcatttgggggtcgaaatggtcggcggccgcctccaaacattggtcaacagcctcaggcatttgcaaagcactaatcgagcgaacatacctaatgggaaaaggaatattcaatggcacgggagaatgaaaatgaaacaattgggccatttttaattaaaccaaagtcggaaattttgaggggggggggattgccaaataaaaagttttattcgatgtttcattgccaatccgttaactactcgtaagcttggtgcgacttttgctccattttgcgctccgcaccgaaaagcaaagagcccggctcattgctggtcagccccaaaacggcgttggtggaggcggacacgggcagcaaaaggtgggcggagaagcgggaaaagacgcggacgcaatcggactcagcggaagaaaaaacgggcgaattagacgaagcggaaaaggaaaaactgaa

SEQ ID NO: 5214 - DNA, 1480 bp, Heterodera glycines
atcaatattttgtttcacaaaatgaaaaagaaacgaccattttaaattttaaaaccgaaaaaacgaattgaaattttttttgacgaacaaaaccaacatactaaattgaaaaataaaatttttttcttacagccatgaccgatttcctggcatagctaagtttttttttgaaatgttttattaactaaattatattttcatattcattttctagaattttatcatgtaatattgattctatcaccggattaataaatatttctaaaaatcaatgagaatttaatgttccacataatattaatgtaaaaaatatacaattgtatacatataagatattacatatatttcttataaaatgctgctgttaaaatatattatttttgtggtatttttgtttgcgttttgtaactgtgtcataaaaaggaagcccatttcacgaagggtaattaaattaaaattaatttttaaatctgtgtcatcattaaaaggaagtccgttttacgaggagaattaaaaatagttttaatttttgaacttcagtttaatttttaaattttaattatttctagttgaatccgcctcgtcaaccaaacgagcaaatgtcgactggaaacagcccaaatgctgaacccatcggaacaggaactaaacggttagcaaaaaatagttttaagcaaatattttttggatttattaattttgtccctcaatatttaaaaggaacatagttcgctctccacagatgaaaggtgttcaaattaacgaaccaattcattcggctaatgatgaacttgatgagccaattaaaaagtgggccaaaacaaagaaattaagcaaaccaaagtggaaaatgccggtaattactagtaatgagaaattacaaattgtgctaaaagattttataataactgtagcacagataagaatggggcttattgtcaatgtgaaaaattattataaaatacttacggaatcaaattaatcaaattttttttattatttttagattgaaactatggctaatcatgatgatgaagcttatgccgacctttatgtttataatgcaggaaactatactaatgcaggcgaagaatgtcaaaattgtttgaatttctcaaaaattgatggcttaattggccaattaacggaatctttgaacgcaaccgaaacaatcattaatgagctagtcaaaaaatttaaacttgtgccaattgatctcgatagcccaatgtcaagtgtcacaatgcttgaccaaagcacaaacagtgaaagaattcatttggcagggaatgtgattaacagcgcaattattggtaattagggtcagacgaattgtttatttgatacccaatggaaccaattttcattttgaattttaatttaataattagtcccagtttcgcgcagaattttaaccactataattattgtgtttaccaggcctttatctatcatttttgccgatgtctaaatgaaatga

SEQ ID NO: 5215 - DNA, 2600 bp, Heterodera glycines
  unsure (1)..(2600): unsure at all n locations
atttttggacaaattaattggttgccaaaaatgaaattttatccaaaaatatgaaaaatttaaccgatttgccatcatcctcaaaaagagggttaacacatcaaagcagttttgtgatcatggagatcagtgacaatgtcaaaatggatgaacaacattcagatgataaaaatggacaagaaaaaaaggaggccaaaaatttggaaaatgccgaaaaagcgatgaaagaatttaacattcggaaaaagaatgtgaagtgccaaaagtgtaatgagcgtgccaaaatcctcagaatggtccagcaaatccagaaaaacaacaaagaacaaataatcaaacttgtgcaaaattgtaaacattcgaatgaacaagaagagtttacagaacccaacataattggcacaacaatttacggtgaacaaaaataaataaaattaatatttaataaatttctaacaaacatgcccattcgctaaaaagcgaaaatgttaaattaaattaaaaaaataattatccggacaacaattcccaaagaaaatatttaaaaaactgacaaaaaattatactaattttttttttgtcaaccaaatccaacaatcttagtatcatttgaaagctctaagctcttttacatactctattagccttacaaaaccgaaaggattttaagcctggaaacaatttattaaaaaaacatcaaaaatatcgattttcaagtttacaggtaataatttatttgataattgtctaattgccaagcaatagcttagaaaaaacttctcaacatattaggcttgctatgaaaatcgtttgatttggttggcaataaaaaattatagtcaaaaaattggttggggccgaactgatcgagtccgtccgggccacaagcccaaaagaaaataaaaaaaaactgacaaaaattatagctagatgagatttttctagtaaaattatgcaaagatgttttgaataaatatattttacacatttaaaatcatagctttttgaattcgaaaaactacccattcgttaaaagcaaaaatattattgttgctttttctatactttttttttgaaaaatggcactttaggtatgcaattggcatttaccataatctctactcggactgaattcaacgagaattcgaaattagaagtaacattggctaatgcagatagaattggcaaagctttgcttggcatttctgaaccaattgagcacaaatttttagaatatttaaaaatttcaaaaatatttttgttggccgattcattgggtgctgatgaaacgacattgatcgaagctgaatgcaaaaatttggaggttttgcagttgatattagtaatgtggctgagaattttttaattctttttcaacaattgacctttttgcgcaaaattttaaacaaaaaaacgcacaaaatttcaaaaattttcataaaggctttacgaacataagcgctcataaagaccgacacatttagctttcttgcttagggtntatgaagcgcaatgttctttttatatatatttattaaactaataaataaatttttgagaatattattattttttgatgaccttttacgtcaaaattttaagcataaaaaacgaacaaaatttcagaaattttctgttgggaggctcataaaaattcttttggcaaaaaatgaccgaaagaaaaatctaacaaatttttcttgcttggtattatttattcataatgctctttttaaattttgactgcaaatagagaacattaattcaagcaaatgttttttaatatatttttttaaaaacttgtaaataattttttttttttttgtgggttgcttagattaaattaattaggtttttatttaaatttaagaaattcattaccaattttggtgcaactcgtgcaccatcagccgaagaaaccaataaaattggcaaaaacaatttggaattttacatccatcttttcaaagaaatgcaacagttactggacagcattaagcgcacaatcaaaattgaaataagagaagtgtggaaagacctaattgcatttgtagaaaagtttgaggaaaaattggaaacatttgccaaattaacggaaaattgaaaaagaaaaaagttacgacgcgattgtttgtatttgacaatgatgaaacaatgggagnccttttanaaaaaaaaatttnanttttctnattttnaacattttaccactttntaaaacaatatttctctatnctaacacttttncaattatantaaattnataaaacnttctatcnatttanaaancataatttcnttattaattnnttttactntaaattttaaattatnaaaattttaattnttttttnttttanttttttntncctaaaattcccatccctattaatntaactttnatttnctctataaataaattacaaattctttttnntaatttacacatattttnattantnttttaattctncaatttatagaataaatttncattttttatttcntaacatttttataagttatntttttcctaattatttcacaaatccttccctgggggaccatggaatgctcaattaaccagaattaatctgtca

SEQ ID NO: 5216 - DNA, 3996 bp, Heterodera glycines
ctgattgtgtgtgaatccaattgacaacaaatgtttctaccctggatgtggtcattgttttaagaaaactaatgagcaaatttttaaaattattgataatgtaatttacaagaaaataaaaaataaataatcaaaaattcatttatttaatatttaaatattttaaattgaaagaaatattcataaataaaaactaaaaattaatttattttttattttaaaaatacacctaaatgattttttaaaggttccaaaaatttaacaaatttaagatttaaaatcgaagatttattttcgtattgttttttcccattccaaaattttttattttttttattttgcaaaaaatttttaatttttttaaattaaataattcattattttcagatgacatcgaaagccttgacaaatgccaaaaacaaacatatcgtggcatcaaaatttgcatttggaaatattggaatccaaaatgtgcgttggatttttgttcgggcggaggcggtggattatgtattcgacgaatgcatgttttacgatatgtttaaaattttcatactgtatttatgataataaaattatcataatattttttttcaaatatatgctttcatcattttgcgacttctttccgatatcccatgtgaaggctatgttggaaatcgtaaaccggcactttgattatatctttgttcattatattcatttttctgaattttttttttgacaaatataatattcaaaaagaaaatttttagaacttgagaattattgagtttctctaattaatttttaaaattattttccgtattggaaaatgaggaagatatgctttgagtcacagcaacctttattgaaaatgaactgaaaaatgtaattacaaaaattcttgaaacaaatggtcggcaggcactaaaaagatcaatttggtttttttggctagttttaaaaaggaaagaaatattctaattttttattattttgggtggtaggaaaggttacaagtaattactgttaattcacaaaaataaataatttattctaagaaatattttataaaaaataaataatgaataatatgtacattttattcatttttgaatcggaatttttgtgttgaatttatctttggtaaaaaatttttttttttaaacttcggcttcggctttgaaaaacttcgagcttcggcttcgaataaaaataggatttcgacttcggcttcgccttcgagtgctaagccgagcttggcccagccctgttctgaaggattttcgcaatccgaggcttgtacaacaacttcgtacgaaacggccatacgaaaatgaccctgacccgccaaaatttttttattttattttttttttgttgaaaattcataaacagggctgcaaaaaatatgcaaatgcatatttatttgctctaaactgacaaaaaattatgcattgcatacacaaaaaatcctttcatatacattttattttcctgccttatatttgacattttatttctttctcacttttgatagtcttttcaattgctatatattttctaatacattctagttgtcaaattgtattacatttcggtgcctataactttcattttttctttgtttctttctctattttttgtatggtaatacattattttgatatagtcaaagaaagtatacacatacccttattagtccgattattcatgggcatattaatctatgcatacattaatagtaggaaagaatatctttttttcttttctgtgtactatttcactcagctcgcccactcaagttggcagaaatttccaaatgtcataaattttatagaacactaattttagttcgtctgatagtccaagtatttcggtcagcatattttgaaagtttaatcaaagatgtaactctaaaggtccctccctcattaattattattttatttttcggtcaaaataaaattctttcaaagggcctcggagtggaacgccatgcaaatagagatcttgcaatgagggagcatgcatgtttctgttcaaactgcagtgaacaaactacccccattgcgcaaaaggcagcgctcaaagctccctgtgatgccaaaaggaagttaaattgaacaacatttcattagaggtctgtctgtgcagctcatccacatgcaactcatcaataatcacttcgtctataaggaaactcacgcacaggtaacttcatccccgtttttttctcaggaaaagttccgccgagtttatacaccggagaagatgctgtagggtaacatttcgcctattccaattaatgagcaaacaatggacgtctgcctggacttccaatccattcttttcaagtaatcccaaaaatacgccgtgacggggattgtgaatgaataataaactccgctgagacagagggagtcgaacttgaaattcccgtctttccattcccatcccgtacaaggaagcagattagattcagcactctccccacgtggtcaagcacaggctactcccgaacaaaattccgtggagcgcgagatcagtatgccgagagcacctaaaaaggtccgattcgccgacgaatagcagcatcatgaacagccagccgaagaagtgcaaattcgagagacaccgaatttgaggcgttcgacccgtattagaaaagcccaagagcgtttgggtctttaaaatggggagatgttgggtaatgtgtgaccaaagtccatttacatttccatttctcttattcactctctacccttcattattgatttaatgagtggactacatcccagtaacaaccacaactgaagtgtcaaattcgccaaagcacaggaaggggctaacatgtttataagggttcaaaccttgaatataaatacaggcttcaacagttgactatttttataacaacaagtttatccacaaaataacaaaagtaaagtgaataaaatgcgcatttgaaactttgctatcaccgtatctgatctaccataatcattaactgtttgccaatttcactcaatttctctctccatcagatgctacacaatgcgatgaaaaacacctgtgccaccagattttgttttggcattttgttcattaaaaatcattttcctaaagaattgcttttttgcttacatcttctttttacatgttaagaataatctatttaaaatgcattcttctcacccattttcgataaaattttagagtttgctataatgtaataaaaagttttaaattttcccaccacaggatttttttgaaaatttcaaaatttttaatggatttcagtggttttcagtttagtctgaaggactgatcaaaacttaattactcattcatatccataattttttttattattaataatacttgggttgtgccgtcagttttcactgatttttttgctttggtttttaccgtgaaatctttacaaaaaattttccatttcttaatctcagttccaatatcgttctcaattgggtttttcattgtgtcatatcccaaaaattcacaaatgtttttcagcacagcggaaatatgtatgcataaaattttgagttgaaattgcttggcattccgatcttaaatttgctatcatttgtttggacagaagaaaaattcacaaaacatttgcttaaattttctaaattaattccttccttatatttaaatagtgataaatataaatccatcgatgttctttgcttcaaagtgtgactaaatgtatcaatctgaaaatataaaaaatttaaaaaatctgtaaaactgatcttttgtaataatttcaaatggatgtatgaaaataaaaataattggtctatttaaatatatattttttccctttaacgaaaatcgaaaagaaagtttaaaaatttaaaaaacgtaaaatgaaacaaatttattgaaagacgaaaacataaaaacgaaacgaaaaagctaatattgaatattttttcacctttttatctacaaaataaatatatcgcaacattctttttt

SEQ ID NO: 5217 - DNA, 2614 bp, Heterodera glycines
ttttgtcgcttcgagcacactcatacttttgtcactttcgataatccacgcggaaataggggactgataagatccatataagaaagggcggatgtgcctcggtagattaatagtaaacctgccctcggaaagggtacttgaatggattccattcccacccgaggcttatcatttcatccatttcgtactgtagtgataaatagggatgtcaacaataagtacaaaaattggtcaaaatagattcataaaaacgtaaaaaagaatatccacatatgtataaaatcacaaaatatgtccgacaatatgctaaatacaatttttcaaaatggttattatatgaaaaaaaaatcttcgaaatcctgaaaatatgtaaaaaatacaacatatgtaccaaatatatataaactctaataaatacgtaaatataaatacataaaagtatcaacatacgggggaagagtgattcgctcgtcagaagtggattgtgtgtattacgtacaggtttagttactctgagatctcatagatatgcgctagagcactgtacaaaagaagctccacacgcaggggtacgacggtcaaagtaggctcaaaaaatgaactcccataaatattcacaaggggtccccatatggaaatgctaaaattaaattgattttatatttttcaattatataatatatttttattacaaattatatttttacgatttcgaaatgaaagaaaaaataattaactaattttttcagtaaccgagaaagagtttgaaaaagaattaatagtaattgtccatgaaagtgtgatgtttaatggacaatgctctttttttgattagagacaaatgccgtggatttggcattggaaaggcggagtgccaatctaaataaaatttaaaaatggctcaaattaaatttttacgttttgtaaatattttttgtaatttcttgtcaaatatttcctattttacatttaagacttcaacatcagcagcagaattttgatattatcagaatattttacgtcaatatctttttttcaaattatttttccttcaatcgcacggactcaattttaacgtttttcaaattttttcttggctttatgtctttttgtggtaatgcaggaatttttttgttcaaccaatttttcttttttaatttacgtataatgactcaaatttaaagttagtaattttatgattaaaaatacttaattcggtatattctaaattaattgcttcctttataaaatagttttaaatctttttgaaactccataacattttcatggtttattttcactttttaacgtctatcaagatgccgtcattgtatcatattttcttccaagaccccaaacggggagcagaagtaaattcataaaatagaaaaaaaattacccctaattttactgtatgcattgtcaaaaagcgcttgcgttttatttatgtatttaaatgtatttagctgttttgagccttcagcaagcttgtaaaaacaattttttatttcttaaggattaaaattatttaagtttttttgcttctttaaaatcctgctaaataatttaggtaaaaatttaacaaaaataaaataaaatttttataaaccgtactaatgcggcgcggtctctttgtttaaattgcacttttctcgaagtgcacatttttgcatttttcgcgaaatgacctagcacccatttttcgcgccagcccgagtttttgggttctgacttttttcattgtcgatcgaccaaatctaacaattttgtatcaaagtcaaaatttttgaaaatttttaacttttttacaggccagaaaatgtttttgttttctataaggttaatagagcatttgaagggctttcgaatgataccaagatgttagatttgactaacaaagaaaaaagttagagtccaaaaactcggactggcgcgaaaacgacctgcgcgaaaaagacttggtccgtttttataaatggcttagttgccaaatgttcatctttgcatttttgcatgactcactatatatttatattattaaaagaggttttttgaatttgtcagtataattataataattacaaattcataaaatttcaatttatgctttttgaacgaattgacattttttgtcgaaaaatgacaaagaagtatgattttgagaaaagccccacagaacgcttttaatcaatggaaagttttgactgaattttgaattggttgattatgattaatggattaaaattgaaattttagattaatcccagccctaagcataacataaactgctcactgcccaaacgtgtaatttgaatcgtaccgtaatttgactcgtttagtggtggagcttaattatttctatgagaaaaattgtgaaaaaaaatattagtattttaataaacgacagtgaaatctcatccatattgtcaatgcctgctgaggttgttaatatttacatgcataaacaattttgactctattttgaaatttgttcgagttcgggttctgtattcgaaataggtcggaatgtgtgttcggcacacatccgaccaatttcagtcctaaacaggcaccactactcacgcgtaaacgtaccccacgcgaaaatggccac

SEQ ID NO: 5218 - DNA, 5140 bp, Heterodera glycines
  unsure (1)..(5140): unsure at all n locations
tgcatgcattgttttccattatgcctccctccctcttcccatcatacaatggcccggggggtaagcgccgaataataatggtggcacacaantatgtataaattaattatttttttatgttttgtaanaatggcggtttgttnaaccantagtgataaaatgggaatgggaagaacactcagcagcagcgccaaaaaagaaaaaaaaagtaattggaatgaaaagaatcggaaatgaatgaattaattggaatcaattaattaattaattgggggcaattagtgatggcgcaaaaataaaggccgccaattgtttgtccgacccgagagttgtgtttgctgcaatgaaatggagagaaatttggcgaattttttgaagaaaaaaaaatattacaccgcaaaaatgggaggaaaaaaatattggcacaaacaaaaaaattgcagaaattttattgggacgacgacacttttgttgacacaaaataaaatgaaaaacaaagatggggatgagatatgaatattatgaattaaaataataataaatattattattttcaatatacaataataataaaatgatgtgcgtcaccaccgagactttttcgggggcgtaatgtctggaggttatgcccgaaaaaggctgaaaaaaacaatgatgaattgattttatgtaaaaaaattttttttggcaatttttaaacggccgaggctatctgataatgagagaaaattttataagatttatattgttatagtgaaatgcaaatgaaaagaattttcaaaaaatagcaaaaattttccattcccaacctcattcgaaacagtatgccaaaaattcaaaatccttttttttgccacctctgaagcggcaaactgaatcggaatccgacctttgaaatcttcaaaacgtggcacattctcactcaatattaattccaaaatagtaggaattagagaaccggacgggatcgggatcccacgggattaatttccaaatcccgcgacctcgagacctgccctgagttttttaattcttcagaattggttgggatcgggatttaatcaggatcacgaatcgggatccctccgagcccagttgtctgagctctactaggaatatgtaataaaaaaagaaattcttttaaaatgggtctatgggtgacaaaaggaaaaaaacgccaaaattttatattacattcaaaaaaagaaaagaaattattataccacttttcgcccatttgtttaaaccaaaaattccagaaatattattgtaaaaacaatttgaacaatgaaaaatgaacgcgctaaatacacacacacacaaatttcgatcacagatttctcagcaaacataacaaaaaaaaaggcaaaataaataaatttacgcctcggcgaatgatttttgatgattttattttattttccattttcttttttttgtttagagagaaaaaagacgaccaaaattgcacaaggctgaaaatgaatgcaacgaaagaatgaatgaatgaataataatgatgaatgaacaaatgtgactaacaacggcaaaataaattttttttttaaacgaataaataaaagaattctcgaaaaactatcaagaagttttaaaggatcaaaaaagctttgaattatatatgagtaagtttaaaataaagcggcaccttttgtaaggctttttacattttaacacaaacaaaaaagaaaaaaattattaatttattcaaaaatgccgttttttgtgtgttggttaattttgtgtgaagtttttgattatttttctagggttccgaggctaaatttgagaaaaatagaatggtgcttccatgggaatttagaaaacgaagtctgtaaaaaattttgccgtcgaaatattggagaaaaaagtgccaaccattgatcatgttggctttgtggtgggtctcattttgtttgttaaatgcacttaaatgcccactaattactttttttcaatgaacttcttatgcacattaaagaacacaaaaatttgaaatgtgaactcttaaaaaataattaaattgagacaagatttgtttttggggaaaaaaattaactgaaaatgagtaaaaatatttctcccaaaaaaggggacaaattggtgtaggaaagcgaaagtggtgaatgaatatggagaagttattatgttacttacccttttatgaaagataataatcacatctttgttctgctactgaccgatattttaagtgtgggaaaatgttcaaaatttgtacacaaatatttgggcaaaactgctgagcaacaggagggaaatggtttaaatttgaacataaatatgagtgtacattttgccaaaaacataaataaatttgccaaaaaaaagaaaatcggtacaaaaaaatggtgggaaaaaagtgtcaaaattcgtaccggaaatcctgaacaaattggggtgaaaacaaatggaaaatgggatttgattagtcatcggcaatgtaaatatggttaaaaaacactcccagtagcagaagggcaaaatgcacaacattaattggttcgaaaaaaatcaaaaaaaaaaaaattaaattaattataatttgccaaaattaacggattgtattttgtgcaaaaaataataaaattatgcaaaataaaaattttattaaaattataaaaaaaaacgattaagggcgaatcctaaaattttaaatataataagacaaaatgaaagaaaaggcaaatagtgttacataaacggcgccaccgttttcttttcaaaaaaagggattattttttaattgctcaatttgagtgggcccatcccaattttctcagcaagaagtaatttttgtggtgggtgctgctggtatagcaccccaaatttgacaatttgagttccgttcaccgccctccgccggtggtggccgattgtcgggtacaaaacgatgacacggcacaacaaacattttttttgttggatgtcgtcctaatcccttagatccctatatttgcggtgagggttcaaacaaaaaatccgggggaaaattgcgcgcgcattttgtcggaaaacaaatctttcttttttcgaaaattttcagtatgggaacggagacggacgggcggacaattttaggcggaaaatggacaaaaagggacgaacaaaaagtcactcatcagcagataaagtggactaattgtcctccccagatttcctcacatccgtcaattcatttcattcattttgtgagccgaccgacactaaacggaggactgaatgaatgacagagtctcccaaaacgatattgaacaaagataaaatttgttggttggccccccaggggagaaagcgggggaagcgcggattaaaaatatttttgggtgctatggtggccacatagaaaaaagattaatgatggtttgtggcacatcctcaacacagttttagagatagatgagtaaggaagtaagtggtggtggtctctcatcacttaaaagttgtttagccaaagaatgatgggacgaattgggccggccaaattgtgacgctgccctgtggccaatccgaaaatctcccaccccatcttactcaatcaaactctgccgaatttccaaggccaaccaaaatatatttattctttccatcgcacttgaatggaatttaattgaaagaaattaggaaaaattggtggcatttaattttttggtccttttgcttttgtcctggaattcaagtacgcctaagggcaaatgtcccatggcctttgtgggttttaaggattatcattttttggtaatgataaaaaagtgtaataccttgaaagtttttaatcattctgacggttttcctaatttatacctatttaaaaatcaaccaaactaaaatcttatttgtcagcaaatttttttgtgaaattaatcattcatttcagtattagaaaaagagtgatttttgatttttaatcggattactcttaattcaatagaagtgcataaatttggtgtgtgctgcttcagaaatttcatttatcggaaaattttacaataaacctatcaatcaaataaatagtaattatcattactagcataaaaatggaggattgcttctctgacgtaaatgaattgtgaaaatcatttgttataaccaaagagtttttttgttttaataatcatgcaatttttaaaaattattttaaacaaaatcattaagaagaaaataaaattatttcaaataacgaaacattgaataaaattaattaatttattattttgttaaataattttattttacctttaaaaatattttcttattaattaaatttaaaccgtgagtgttttgttagatgatttaatataaaaaagacaatcaaaaaccaaaacttctgtgatatataagcaataaaaaaggataaataaattatttttttagaaaaaataattgtaaattatgtactgtataaaatactaaaagatatacaacctcatacagtaaatgcatatattgtaaaactcacaaatcctacacagccacaaaattgtattaagagctaaaaatacaaccaattacagtatgacggtttaataagcctatcccactgaataaaagatcaaaaaaacattgtccaacagtcaataacaaatgccccattaatgacacccaatcccaccatacagtatgccgtaaaacattggctaatcccctacagtataccgaataaaatgaactgactttcgttgttatgaagaaaaatcaacaacacaacaaaaaatatgaacgaatgaattcaaaatggatgtgttattttgtgggatttgtgggatggttggtggcggtaattgtggaagttgtggtgatgtgatgttgatgatgatgatgatgatgatgataattgtgcatcgtttgtccgtttttgaactgactgtgtgagaaagaaagtgttgacagaatgaagaagaaagaagaaaccgttggaaattgggcggggtgaaaatttgggcgccgggggggggaggggagaaaatgcgattttcggcaccattcccaaggtatcatcatcgcccccccccgtccccccaggggcggcgacgacggcgcggtaggcattttattcatttgaattcaatggagaaaggaagaaagaaagaaggaacggacgatt

SEQ ID NO: 5219 - DNA, 3252 bp, Heterodera glycines
  unsure (1)..(3252): unsure at all n locations
tgtttattttacaggcattctccagctaccgtacaccaatgtttggtccatccttttcttctgtatggtcctctttttgggcatcgattcgcaggtgcatttttttgccactaaattctaccgtattatcactgtgtgtgtgtgtgtgtcggttgtttgattacagtatgccaaatacagaattttttgtccgcttttttaaattttccttgaatccatctcaaattttggttaaaatttccgagtaaatacttttccggaattccatcggtttttcgaactttttctctgtgttttccttactgtttcaccaattaattccagtatatcatcgtaccgtattttcgggtcggggacaagttgtttgggtgttcgaatttcaacaggtaagttagttgctagaacccatggctcctttgccgacgctgagtagattttaggtgacgggtggtgacaatgagtccgtgtcgagcgctgattttttcggcctttagagcgagatttatacaatagaatttggcatgagattggattgcttttagtcatcctcttatagcctaaagtctttgagtgactagatgacatatcatgtaagttgctgataggtttccagttttcccctcctaggtctgcatattgtacttttcctcttactcgacttaaaccagtaccaacccgagcttctcaacggatttataccatggcactttaaagccagcatcactgacaatgagcggtgtggtgttactcggtagaattctctcaaggtcgtttagaaattggtcatgagctttatttgaacattgctcgtaaagtgggaacgctttctcataaagagtatcagaacgaccgtgtagtgagactgaagctcgcaattccataagtcgtttttgctctcgaatatcataccagtcaacaagtacaatgggcatcgtattgaccgaacagataaagctagcatgccatcggtatacagcgagtcactattggtggaggtgacgcttacctaaccatccgttgatcagttcgacgttatgtctgctatggctctggttgcaaattcccccccccccccatcgcccctccttccaccaataaaagttttgcttttgtgtgatgcattttaagacggggcggcgattgcatttgaacaaagcacacataggagaaaaaaagccgcacaagaacaaagtaagcattgttaaggggaaaattgaacaaaaaagaaactttttataaaaagaaaaaatttgattcggcaaaaaaatgttataaaaatttgtttgaccaaagccgaaaaagcattaaaatgctctccctcaatcaatcagccagttgttggccaaattgatggcaaaatgatgctaaccctaacgggattcacgtgatcatgaataagtaagtcgttcgagattcccggtaccccgagtcagtctcactcgagaaaagagtcctgagttttttttaatcatgatctcggtttttgagcgcctcggggcaagtttcttggtcttgaaccccgaggaattttcggtcttgaacttcatagaaagtatgaggttgaattttcaggaatttaaagaagcattaaaatatttgaaaaaaggaaatagtcaggattttgttttagatataggctcagtttgtaggagcaaatcagattaaaagaaattaagattaaagcataattgcgcaaaattcaaatattgcttgaaaacaaatgtttttttttgaatgggtgtcgttttcgtagtgacaagtgaccacaaaaaaacgattaaaatatttctaatcatttaaagcattgttacgattgaatacaataaaagaaatttttctatttttcctaaacattcacacccacccgtttttacacaaaaatattatataattttttagcacgattgtgtgatttttagtctactaccatacgcgaatgtttggtgagaagaagaaaaagaacgagggaagaggagaggatgaaatttttaacattttaagaaatagaaaaaagaaaataaaaaaggacttaatgaaaaaaatttaaaaagaaaatacataaaaaacattaaaattttaaagaatttcaataaaagtttaatagaaaattttgtttcaaaaatattattgaaatttctcggaaaaaattaacattaaaaaaataattacaacaaatattggaaaatgtaagaatttttcttaaagatgagagggattaattgtgtagaagaattaagcgttttaatttttttaatagaagaaaactgggttatttttttttccattgttcttttttttaaagttttttttttataaattgagagcaaagattgtggggaggaaaagccttttcattcgttgcatttaactcatttgatcgtgtaaaagtggcgacaaatggaaaacgaaggagaagcaaatttttaattttttggtttaaaaaaatgtaaaagcatattaaagctaaaagcaaagcgtttttttcgttttttagttttttgtcaaaattagaggaaattcgtacaattttaaattaaaatttattttataaaagtgagcaaaaattggaaggaaattcattctcttttttcaaatttagatttttttggggtttaaaaaatttttttttaatataaaatcatatttaaagccttaaacaacagcgttttttttgccaaaatcagatgaaactttgtacaattttaaattgagaattaatttttgtaaaagtgagcaaagattgggcaggcgcattttcattcatttattcattcattctcattttggcccattgtttgattaagtgacgacggcagaagaagaagaggaagaattatataaataaagagaaagaagaattgaatgaatgaatttgaacaaatgattcgcccatttatttatttataaatttgaaattattgtgcaaatttgcggcgattttaggggggacgaggaggggaagggggacactttgtgtacacaaacaattgaaacgatgatgatgattattgtgatggacgaaggacaataatttgtgttgaggagggggagagctgcagtataatatttgaataattttgaaatgacgattagaaagagaagaatattttgaattcgttttanatagttaaactattggtgagtgctaattaatttttttttggtgtgtcaatcgattgatcatactaattaattaattagtgcaattagtatgtcttacccacagactancagtgaatgaatgcagtaatc

SEQ ID NO: 5220 - DNA, 1334 bp, Heterodera glycines
atgattgattttttgggatggtcggatcgattgatcatgttaattagcaattagccttttattgccaacaaggcttatatctgagtgcactagtgatccagaaaagcatttgaaactaattttcttaaaacattttgattatgttaagttgtaaagtgacaaaaaagaaaatgaaaaaattacagtaaatgagaaaagttttttaattgctgcctcatggtcatttgcttgaacccaattaaattaaggattcattaccagaggcagcaacgacagatgtttttatgtgtaaaaatgcggcagtggtaaagtgtcaattacagtacaaatatcgattaggttacattgcaccagactaattaagcattcattagtagcacaacaacaggtggccaaacaacattagaattccataataaatagatgtgccttcggcactttagtggtggggggcgggagagcaatgaattggaaaatttatttccaaaatattattgacgcgtattttcaaatgtgcggcggtgcgcccgccggtgcgcaaaagccaatttctctccattttttttgccattggcaatttgtttcccatttttgtgttctttttgtaattttccgacagcctaaatttgcagcaaaagcagcagcaacaattcttcccaacagcagagggcaagcaaaaaggacgacgacgacgcccgaggggtttttcctcctttctctttttttccttctcatttttgtccatttctttgttccacggcacattgtgtgcccccgggtgtccgcccaattcattccatccaattcattcattcccaccaattcttcttcacccacccgctcccctttttatgtattatgtattcatcccatcccattcattcatttattctttcattcttttcatcgcctcgtccattgtattttggcatccccattcatttattcattttgtgttttgccaaaagatacaataacaacacacaatgaatgaatggtgcagcagcagcagcattttgatgaatgaatggcatgatggtaaaggaaaattcgccttttgatggcactgtttgaggaagtgcccccccccaatgtccaaccctttgggggcagcgttttgccatgggttggaatgccttccggcgacgaaaaatgtctgggtggtgggtgagaaggacaagatccgtgtaagtatactggtgatgggtgtgaatgctgaatagtgaatgtccgaccattgtaggaagctttttcggagggcagcattgcttgctttgtatgaatgacattttggaggtgacaaaagccgtgatcggaatgtgccgttggaagga

SEQ ID NO: 5221 - DNA, 2167 bp, Heterodera glycines
  unsure (1)..(2167): unsure at all n locations
agtttagaacactttttaagccattatacggtcatttagagtcagaaaaaaaagtcattgacttaaattcccagccctaattattagggaaacggcggcggttcaatgggaaaatgacgaaaattgggacgccaatttgaacattgtccaatttgatctgtggtatggcaataattggattgggagaacagcgaaggtcgaggcctaggcttaggcttgcttgggcctaggcttaggcttgcttcggcctaggcttaggcttgcttgggcctaggcttaggcttgcttcggcctaggcttaggcttcagcttaaaggcgtgggcgggtggtgatttagtgatttgtgttcagcagacaaatctgtgcaaatggttgtgaaggagaagacgcaattgatgacattttgaagaaaaaatgttaaatttcaggacggattttttctcattttcacaccaatttttaagttacatattttataataaaaatttaccactattttgtttttatttcaagtaaaatataagcaattttgatgcttttgattgaatcaaaagtgattttaacttttttggaatttatttaattgcttttaaagaaaaaattaaaaaatgtagttttggcataatgctcattttgaaaccttttgaagaaaaaaaatgtacattttctggatgattttttttctcattttcataccattcaaaattttcccgccttctgaccacctattccctggattttcaaaattttgccaaaacttggtttgtcgaaatctgttataataacattttttgaaaataatattgcaaaaacatagtgaaaacaatgcataaataaagtgttttttagtttaattacctaatttctttttcgcaatcacaacttacgacaaaattgtttgcttctaattgccgcaaaatgaaccgacgtttgtggaaaatgtgaggaatttttaaatgatacgattttcggcacttttgcagtttattgggcccttacgaaaaaccacagggatgagagattttgaggtaaaatcattagtaaaaaccaactcgtactgtgaaaaaaaacaaggtaatactatagatggtggccccctttttgagaaaaatttttttttgttctaaaaactcgtgaaaacatgtttatggtggttttcgaggtcggagaacccgaatccaacattaattttgagcaatttcgaatcccggacccgaattcgaacaaaaagttgaaaaaatttgtctcaaatcgtagcacgagttgggtttccggcttttgattttgtaaattttcaaaatttgctcaccacttttgcgtactgtgaaaaaacagaaatttacctcaaatcgcagtacgagtttgcggtttcaggcttttgatttgtaattttttcaaaattacctactccatacttttgtttttcattgggcccttaaactataaaaagtgccaattttctctttttaagtaattttttacgtttgcatttcagttggatttgtggcgacgtttggatggacattctcccatcttttgaacgtgctgaacttggcctcaaaattgcattgctttcttaccgttacgatgctttgatggacaaacattttgacggaaaaaaagaattgacaatttggaggacaatcaaaatttgcgacggcattggcccagaaccgaaattgtctgtacagatcgaggacaaaagggtggaatttccatttcccgactgtccgttgcccaacaaaatccgctttaagcatctttggattacgtaataacatatataattgtgtgtttactaatgcattttatatttcttcaggtacattgaccgctccgtcattgaatttctccgtgccaacaaacaaatttgggacagatgtggcaccaaattggagttgtctattgataatgaccaactgatttgggatgttttttgccgtgaaatttggccgaattttgcgacaaacatccgccatttgagctttactaatgacaagcatttggacaatttgcgccatggcatttcactgacaattctcactgatcttgatcaattgaattcaatcgattctggacttctattacccgatggaattgctgacgacggnccaatgcaactgctgngcaagcattgttcaaatgggtgcacactccgagcaaaaa

SEQ ID NO: 5222 - DNA, 3675 bp, Heterodera glycines
aaaaatttgcttcacaactttttggggtcggtggaaaaaacagaaaatttacttcaaattcccagtacgagtttgcgggtttcaggcttttgatttgtaattttttcaaaattacctactccatacttttgtttttcattgggcccttaaactataaaaaaagtgccaattttttctttttaagtaaattttttacgtttgcatttcagttggatttgtggcgacgtttggatggatattctgccatcttttgaacgtgctgaacttggtctcaaaattgcattgctttcttaccgttacgatgctttggtggacaaacattttgacggaaaaaaagaattgacaatttggaggacaatcataatttgcgacggcattggcccagaaccgaaattgtctgtacagatcgaggacaaaagggtggcatttccgttgccggagcgtccgttgcccaacaaaatacgatttaagcttctttggattacgtaataacatatataattgtgtgtttactaatgcattttatatttcgtcaggtacattgaccattccgtcattgaatttctccgttccaacaagcacatttgggacagaaatggcaccaacttgctcattcaaatagaatcagacacaaatgttatcaagccgatttgggatgtttttaccagtgaaatttggccaatttttgctaccaacattcgccatttgagctttgccggtcactatttggacaatttgcgtcgtctcgtttcaccgacaattctcactgattttgatcaattgaattcaatcgattctggagttctattacccgatggaattgctgacgatggaccggatgcaactgctggccaagcattgttcaaatgggtgcacactccgagcaaaaatggccaaccgaagcaattggtttgtgcggattatgacgaagaagtgaacatcgactgggtcaacagtttcaaggaggtgtgtttgttcacattctcataaaatttgggtatataccgctggtaccactcacttttttgaaaaaattttcaaaatttttaatcagatgggtcaacaatttgaaagtggtgtgtatgtgtgtggtcggtcacataaacgattgactgattgattgcctttgattttcgcttccttttttaggcatttctctgtgccaccgcttcagtcagctataatatccgacttgaactttatgattcgtcgacgccaattgagccatttgaattgatgaacgaacggactaatgagaagctgacattattacttgttggagaagatggctatgaattcacagaaaaactgttgaagcgatgtccaattagtgaaaaggcggcgacggatcaatgggaaaatgaaaaaaattgggacgacaatttgaacaatgtccaattcagtttgttgggtggcaaaagtgggtaagtgaaagataattcacagttcacacctaatttgtgtttaattacaggccttatggccaccagcggatgaagaaaaagaagcgggtcaaagcatcgaaatatcgtcggactgcgcggaagtgaattaattatatttgagaaaagccgatctcacacaattggaatttgatttgatgccatcattttctctcagaaatgcttttgtaatacatttatttgcttgcttttaaatgaatgtttggttatatgacagacacagcaatatgtttcggattacaatgaagagattatccgcaaagtttgtattaagcgagccattcattttttaacgattaaaatagaaagtaaatgtttacctgtttttttctcaaaataagcaacagaaaaatgttaattctaagtagtgatgttcgagagtctcgactcgagaaaagtctcggttttttttggtctcgagtctcgggttttcagtctcggtctttgagactttcgagaccgagacttttttacacccctaatgatcggctttttgtttagaaataaatatacttttggtatatttttgcttcgttaccttaatagtgtgcgtggctcagtgggttgtgttcttggtcatgtcttcattttagcgttggatcagtacccctccaagtatttaatttttcttctaatttttcaaaattattccttttaaagtgaatctaatcaaattaaaatcataaaatattgtcatttttagtactaaatttgttcacaaattgcactcaaattttaataccctttatttttttaaattgacacaaaaactgcgaaaaaatcaaactaattttttgttttgtgcttttttgaaatgataaatattgtaccaaattgaatcaaaataaaaaaaaaccaaaaattagttaagaatagagtcaaaaaaaatttttaaacgatttttaagcgaataggaaaattttttgaaaaaagtctcgggtctcggggttttcagtctcggtctcggggtcgggtctcggggtcaagtctcggtctcgagtctcgggaaattttcggtctcgaacatcactaattctaagaaatgaacccaaactaaagggcattgtagccatttgaattgatgaacgaacgactaatgagaagctgacactgattaaggatgaatatggagacgggctgttgaagcgatgcccaattagtgaaaaggcggcgacggatcaatgggaaaatgaaaaaaattgggacgacaatttgaacaatgtccaatttaatttgtgtggtggcaaaagttcgattgggtaagtgtggtaaacgataattcaattcactcaattcaaatttcacttaattttaggccattggccaccagcggaagaagaaaaagcggatcaaagcatagaaaatgtcgtctaattgcgcggaagtgaattaattatatttgagaaatggccgatctcacaaaattggaatttattgcttttgttgattttttttctttaatacatttgtttacctgctttgttgctgtgcaatttctttagaatcaattgaaacgattgtctagagaatttggtaatatgtagttaggtaatatggttcattcccgcgtttagtaaaaaacaaaactcgaaatttccaaaaaaacggccagccgaaacttcgcctggacataacgtcaccgtaaaaaaatatttagaaattacaaaggcttttggtcggtccagtggtgctgttagttttcgacagtgattgatttcgacagtagaattttgtttttaaaaagtatattctatgtatgtatatggttatagtaacttgttagaatttaaaaatgtaaatgataagcgcaggctctcatgtactgcagagggtcgcgatttgcgaaatcggctacaagggcttgcagatttgcatcttgacgctgatacttcgactttcttttttcatacggcccccttattccatttgcgggagcaacttggaattcagcaagacgggttcgccacatatcttcttctgctacaatttttcggcaaaatggacttaagcgctgtgttccatttaaatgcgtgttccaaaccgaatgccatccctttaaattcacagaaatcccgaaaaatttttttttaaacctctaatgaattgttgcttctgctgagattttctgcaactcggtctacaatattccacaaattaattggaaaaagggcagcctgttgtctcaaattgagcacttcaatttgacccctaa

SEQ ID NO: 5223 - DNA, 990 bp, Heterodera glycines
aaaaaagtttaaaatgtatagctttataaatgatctctttaaaatacgtattatagttgaccgttgttgttatacccatgatgtatatatgttatatagaaaaattaaacaattttttcgcatcaaattaataatattagataatcaccaatttttgaataaatattatattaagcgagttctttctgtaaatatttttatcgttttgccagttttaccaaacgcgttagcacttccccgcttatattttgtgttaaaattaaaaaaggacggaggcagcagggatgggccaaattgaaaaataaaaagcgaaatgggaaaagcgaaatttgggaaactgaaaaatgcgaaatgaaaaaaggacggaggcaggtgtctaaaatacttttccgttatggttagggatgatatttataggcactaaaaaccgtcaaaataggtaggccttaggctctaaaaaacccccaaaataggccctaaaaatggaaaataggcactaaaaacctcgtttttaggggtgtaaaatgacaaaatgtattcaaaaaagtaaaaaaattaggccaaatcagtactgagatatataatttttaaagcacaaattattgtcaagaaaataaataaataaatttatgatatgaattttcaaaaagtttttcatttcttataagtgtatttttgaaaaaatttcgggtcgattcttaagggtgtattttttttttaaattttagtcgattcttaggggtgcatttttcgtttttattgcatttttgttaataattttgggcaaaatgccaaaataggcaaaaataggctctttcaaaattttttaggctttttaggcgctaaaaataaaagcctagaaaataggcactaataactcgaaaagtagcttaacaacagcccaaaaaaacatgttttttgtgcgtttcaggccacggagagctcaggaaaaaaataggcttttgcctaaaaatatcatccctagttatg

SEQ ID NO: 5224 - DNA, 2415 bp, Heterodera glycines
  unsure (1)..(2415): unsure at all n locations
gtgctggcgcgtttgttaaaactgccagtacgataaaaatataatttatatattttacattttaaaatattaattttaattaatattatatttaagactgacgtattataataaaagaatatgaaaatatttgccaacattaaattatacatttaaaacgattgataaatgaaaattttatctaaaacatatatcctatcctatctttaacaaaaaatattttagcaatttcttttaaaaatggatacaaatattttattgtgatattggtgtcgacttaagcttaaggactctggatagacatctttcaaaaataaggagtagaaaatcagaatgttcaagaagatatgtaaaaggcagaagtgtcccaatgttactcaaaatttgacaagttcctctttgtaattggccatggtaatgcgtatcgaacatttaaacagactaatgaaagggccggcaccagggatggcattccgaggccccaaaatttttcggaaatcggaattccgaggcccaaaaatttttcggaagtcggaaatcgcgaattccgacgaaaaagtacaatggcttagcctttaattaatatttggcactttattaatttcataaaatagaaaaaaagaatattggaccatgggagagtagcaaaaaataatttaaaaaattctaataaaatttaataatttaaaatcaattatctaaatttgctaagaatcaccttttattattttaaaaataaatttttgaaagcccatttttggaaaaaaccgcttttttatggttacatttacaaaaaaaatattttacattttcccccagaaatttgtatttttttaaatattcccaaatcgaggcggttcatttaaccaaagtggaccaaaaaccgaaaaactattggatttttgatgaatatgaatagaaaaatttatgaaattactgtaaaaaatttaatctataaggaatttaacaatgaaaatatttagttatttaataaattcaattaaagttttcaaattcattaaaaaagaaacaattaaatttattctataaaaattttcctataaaacaatcatttaagattaaaggaaaaatagtttaaaattttggtatttccaattgatatttaaaagtggccatatcgtggaataaatctaactgtgaaaaggagcaaaagattaattagaatgctaaatatttaattgattgtttgaaaaattaaaatattaaatggaaattaataagaattattaggatggaataaaaatattttaaatgaaaaatttaatttttgagtatttaaacgaatgtaaagagctcttgtaattattatttataaatattcattatttttagaattttattcaaataaatttatgtaaataaaagaagttatattaagcttttttaatatcttcaaaaatatttaaaaaagtgcttctaggttagattatatttaaaacaattctaatataatgagtttattaaaataatttgataaagaaaattgaaaaaattaaaatgtaactaaataaatcttgtcatatatcatatcgaagtgaatgaaaagtcaaaaattaataaaatatgaaaaaataaaaattaaaaatgatattcgaatcgataaaatttatttgttttacgaattaaaatagtttatgtgatattttccactttttaatacattattcattaaacattaaataaatatacgaaataaacttacacttaaatattgaaatgtttttagtaaataataaactataatgaaaaaacaatttaaaaataaaaataattgtcgataaaaatgggtgacggagtgacgacgaggaggaaagcgttggcgaggaagaggggatgaggaggaaaggaagacgagaaatgaagaggaagagagtgtgccgagaagggaaatgtgtgagtcgagggggggaggacagtggcggttagagccactaattgaaggtcaccggaggggcagcagatggaagcaaagcgacgggaaagagaaaataagggaccatatcttttttagcccaaaaattaacacattttccgagaaaaaatttaaaaattggtatggactaaattatataataacgagggctgggaatttggctctaggaaaatcggacactggaaaatcgacaccaactttaaattttaaaaataattttttgattctttgctttaatatttaaaatacatataaatttagcataaatacacatcacaaattacctataaaaatggacaatttanacaaatctcttgngatagggattatgctttctttacgtaaaaatagcaattggaaaatgcgccagtaatacagtattttgtaaaataatattctgtagcaatatgtaataaaggntannnctgtagtcgntactgtaagtctgtttcttactgatt

SEQ ID NO: 5225 - DNA, 2633 bp, Heterodera glycines
  unsure (1)..(2633): unsure at all n locations
cggcatntcatcggcgaaatgaatgtccagcgacacctttccataaaatgagaagtcaaaacccaagcaaaatgtgaatcgaattaacacatttgaaactgcgacatgtaaccggagggaagtgcgcacagcgtctcaagcaatttgcaagcggccaagaacagctgcatgcactgctcgtcacgcaccgatttctgttcatcaacggacgaagaagcgcctccggaactgcttgttggtgttgttgaagtgagttggtggtcaatttgtgccagcacatggacctggacaaaaaatttaaattaaaacaattttactatgaaattggcaaggcaataaattaggaattaattattaatatcacaccaattcggtgaccatcgacggccaaatggacacaaatgaactgggactcatgcggaccaacagcacgcggtagcacgtgaacacctgcgtgtggatcaccggcacttggcaaagacgtaaattttctgtcagccgttctgcaaattggcaattcagtaaaaacggtcatttgcaacgacaaaatgccatgctagataacatttttttcttaatatgccttggatttcgtttaattggcccgcatattggtccagctccgagctgagaatgacgaacgccagccgcttcaggtactgggcacgcatctcgtactcctgctccttgctggtgatcagtgttgacagagtggtcgacgtggaggtggtgatccgcgctgaatttttccgtttatttttacaattattaatcgttctgaatcaatttttttgaaacatggtaaactgcttatacgtcttgttggaaaatctgttcatgttttctttttttcggttcaaaaaccaaattttatttcattatgtttgctaaaaatgcaaaaaccgactaagcaattccttgaacgatgttttgtcgttggtcatcaaattgtcgattacgatcagccattggcgcaacgcgtggatgtccattttgaagaatgctgcagaaaaaaaggtaaatgatccgaattgtttttgaatttttcattattcccatacaattgtcccacagcaaatccatcgcatttttcttccacaccgaacgcatgtaattgtaggaactcatcgaagcgagaaattgtgaactggccaagaaaaagcgcacattcttagcactaaaaacagaaaatgaaattcaaaagcaaataaaagggactaaatttttcggaaaatgaccaaaacaatggcaaatttatcattttaggcaagtatctgcaaaatttgtaatttttcccgggtcaaatttttaagaataaaactttgggcaaaaaatccattcgaatgtccccgacaaaccgtaccttttgggagcaggtcgtcccccccccccccccccgtcgtttccaagaatttttttatgaaaaatttctaggtttgaaattttttttttaaaatttttcgggggggaaacgaccggggggggggggaaacgaagtgcacccgtaccttttcgctttcaaatagggcaatgtgttgttccaaactgcttgcagtgcgggcaacagtttttctttgtcctcacttttgcagaccgagtcgataagttcagccagattctggaagagtattaggtatcagatttaagtagccgttaatttgattagccggccggctaactactgacctcagccagcagaaacagcgcctgcgtcgagtcggacgggtcctttttgttggccgcaccgccgctgctgtctttgatgctcgaacgcaacacggaggcggaagacgaagcagcgccaccaccggcagaggttgtggaaggcaaagctgaagtgaaaaattaaataatttggcagagaaagcagttcaaaaaattaatgcacagaattttccaagagatttttgggaatttcttttgtggatacattccaaaacgtcgcctggacataaccgacgcaaaaaaaaaaaaaaaattttttcagatttttccctgctcccttcttttgtaaaaactgcaattttcggaataaattttcaatataacaatatgaaattccaaataggacaattcaccggcaaaattaaaatgttaaaacgatgaatttgtcgtcactcgcctcgtcctccacctgacgccgttccaacgccacaactgctcgccgtcaacgactgagtgtccagcggcgcagagagtcggctcggcggtgcgtgcgtcgaagtggcggcagtgccactgccagccccaccaagcccagcaccggtcaacgaaatggtggagccacgcattgaattggcctccgatgccaatgccgaggcggatgagaaaaactgcgccgtcgccgcagttgacgcgccgccaacggaagagacaccgccgagaacactgccgccggcgccgctccgctgctccaacacggggctcagatccgacgagggcagcgttttttgggctttaatgtaaaaatgggatttgaaaataacaaggagagaatgttaaattgagaccaaatttggattggtatgtttttctctatttgttcaagaaattccattcacgggcacccaatttacaattggttcccgttgtacaaattgaaaaataaagttataaaatggggtcattttttg

SEQ ID NO: 5226 - DNA, 4743 bp, Heterodera glycines
  unsure (1)..(4743): unsure at all n locations
cgatgatcgactgactgccgcaacggcgcacaaaatctattttaacagccnnnaaaaaaacaancacaannnnaaancccctctatttaaacaaaaataaactgacgcaaattccaaaaaggatgctcgggcgggcagttggacaagcggtgagtcgttgaagagaatggcaagcgcagcccacgactcgcgcagctcagtgaccgtcacttggcgagtgcattggtgcaacagctccaacagagcaacctccaaactgaacccgccgacgcccaacttcaaaagcaacaaatttataaagaaaaagtaaatgaaacgcatgccttttcactggagttagccgatgatgctgaagatgatgattttgtcgttttgttggccgactccttcagcgtgtcactgaccgagcaaatgatggaagtcagcgacagggcattcaaattaagcgccaaattggccacttcaatttgctgggcggagtaatcgaaggagcactgaaaatgcagaaatggttattggtagaagttcaaaaagaatggagacactttaaaaaatgccgaatttcttactcggcatgtgtccgccattttggcacctcctccgtaactgttgcggaacatccaaacgacgcccaacgaattgatcagcgcatttttgtgccgctttgctaccggattaagaatgtccaggatgagtgtgctcaacgactgaaaagacgttgtacagattgttctctgtttatttctgccccagcgtttcattggcaatttttataaaaataaaaattgtatatttataaaaaccaaaagctctctaaataggattaaataccctaaaattttgtccgtcctcctctccttactctgaatgtgccaacttttggcgtcgaagtgtttgttgaacaaaaactgcccaatgctgtggcgcctcccttccgctgctgttcagtgaacgcccatacgtcgatgagaattgccaacgcactgggaaagcgtttgatcagctcccgctgtgcttctaacatttcagccgatttgccactggcatcggtgcgcgacgcaatattcgatggattctgaaaggatttttttaatccagaattagcccgtttttgagattttgtgccatgcctcgcccgacgtgaacacacggccgaacaggttgttgatgagccctgtgcctggaatgacggaaatggcagtgccaaccatgctggtcatgttggaagacgaaaaggtgccgccgccaccaccaccgccggcacccatggcggatgccgcaagggcagacgaagaagaacgaagcggagtcatcgagccggccatgggtgctgttgaggatgtcgaggattgccggttgaaatttggtgttgcaaatgggtaggccaacgcggaaagcaccgagtgtttggtggaggccaaaaacggggagagcattgacgcgttgcgcacatccaacagacaaaagtgcatgatggacatcagcgattcgagcaactaaacagaaacattcatatttgatttactttataaaaactcatttagtttcaagcgataacaataattagtatcaatattgtctcatcattgccctttgattggttcaaattagggttgcgcggtaccgatactggtactgaaaaaacggacaactgagtacctaagtaccggttccgaccggcacttgtaccggtttttcaacccgaaaattaccggtaccgtcaaatataaaaaattgctctttggagaatgtggattttttggatcaatagcaatttatatttttacttgaacaaaataagaaaaacacgataacatttttattttctgaaaatttcagtagaaatttcttttttaaattattgtgattttaataaaaaagaagtgcaaaactaaagaactcttacattcaaaatgtaattggccgggtaaataacggttggcattgtgccatcgtcgccgactgttgttgccacgtcgttggtccgattgatgcggtagtccacaaattgaatgggatttttcggatgttccatcacggaggcacccattggctgttgactgttgctgaccaatgccaacgccgcactgttcaatcccgccacggaagcggtggagccgttgatgaacacacattcgtacagatttcgacaaatctgctcaaccgtatgcaccacaaaagtggccaaggctctgaaatattgttttcgataaacagaaagatgcgtataaaaaagatccaaaacctgtccaaatatggcaaaatcccgacaagaaaatggagccacagttcatgccttgccggacaccgtttcaacgcgttcaaaattacgccgaggaacaggcggagctcaacgacggagtagcgcgcctcacgaatggtggaccgattttgggaggagttgtagttgatctggttttcagtgatctgagaagatggagaagcgttgcgattgatcggaagggccaacaaatgggtctgaaaggccaaaatatattattctttgggagaaattttcatatctttataaaatgaatagaaaaaactttgatttgatggaatttcaaaaaaagaacccataaaaagccatggaaatatgatgtttcaacctgagaagagaagtgccgagtgccaacatgaagactgtactcgagcaccaccagcgcggaggccaaactgagcagcgaccgatggtaggcaaagatcagatcgcgaaaatgtttgctgtgtggtggtccgttgttgaactccgcaatgtccattgagagaggcatcctgggaaaaagcaattagttaattataatttgaaaaaataaaaacgaaatttatggggaatctggcaaaaataggcgacgtcaaatgccagacaaaaaatggggattttattaaaattaaaaggtttttacaaagaaattcgaaaaattttaaaatgggaaaaattcaaaaaatggaatatgccgctaaaaatgggagaaaatctgcatcccggaaccgaaccaaaccatcattacacacctccaccctttttggttcggtggtgtcggaatggcggccaacatcagagtgagaatgactttttgggtttttgtctgccgataaatttgctgcacaaatgtggccaattccttggagctggcctccctcacagtgtcgtcaagaatgtgcagcaattccgtgaaacagtcgagggcggcaatctgtgaacgatcgagggaaaatcagacttttaaagaaataatgctgttcattggttacagatttagaatcgttttgcatccattcgaacccatacccccaaaattcatcgaaattcatgtttctaaatttggcccgaaccctaattggatagaacaaattcagaatcggattcgtcagtcctgaactatttataatgacaaaaaacttggtttttctaaaaaaaaggaaaaaggttcaccatctaaaatattgacaaatttttttaatcgaaggctttgtaaacagcgcgaccttacacttccacgaaaggaccaagtcagtctcggaaacatggttgatgggcgagttcaagtagtaagagcggaagaaatacagcacaaccttataaggcaaataaatccaaatttcagcaaatataacccgaaaagataccgttgagaaaatttcgaacagagtcgagtgccgttgttgttgcccggatttgctttccgaacttgttgaagtgacagccgctgtcccaccactaccaccagcaatgccatcctctttcttctgtacactgaagttctgctgatcatgtgccgtttctgtacaccaaaagccgtcgccctggatgtgttggtagtggcgtgccatgaagtcgagcagttgctgagtggctgctgtggaagcgccgccaatggtggccatgctgttgttgaccgagttggtgccaatgtttgacaaattgccgcctccagtctttccgctgctggtggtgccggtccggttgaccagctcggacatgttggtgaacagcatgctgttcaccagatgacggcccaacccgttgccactgcgcaacagtgtgcccatggtgcggaacagcttctcggcacggcccaagtcaacaatggacggactctcggcatagaacagcatgtgagagaatgtttcgtccagcaacggctgcttgtggtcgccgggacatgtcgagttgggcaactcggtggggtcgaacaagcgcaactcctgtgtgccggtgctgaaaatggactcctgcagcgagtcctggcgccggtgccccgttcgaatccgtcggatggtgtccccgccagcgtaggaagtgatccggggcattgccgctgctgcgtcaccgggtccgagcagtgagccgaccaggcttgtctggtcatacgttgagtcgcgcgcagcggaggaagcaacacgtttccgtttgtcggcagacctaaaaagatgaaacttgtaatttacgaaaaaatttcgatcgagcaaattattcgtttttggcaaatttaaaaagcaggggaagggttgtgcttgtagggtgcactacgtttctcgcccctgctgccccccccccccctgtatcgttccctctaagattttttaaataaattttcaaacgtagaatttccagaaaaatcttaagaaaaagtttcataaaaatttctatcgtttgtcttaaattttattatgaattgtaaaccctttttcttcatccattttgttagattatttcggtattcccataccttgccgatc

SEQ ID NO: 5227 - DNA, 1341 bp, Heterodera glycines
  unsure (1)..(1341): unsure at all n locations
aagtcacaaatggacggactctcggcatagacnagcatgtgagagaatgttcgtccagcaacggctgcttgtgtcgccgggacatgtcgagtggggcaactcggtggggtcgaacaagcgcaactcctgtgtgccggtgctgaaaatggactcctgcagcgagtcctggcgccggtgccccgttcgaatccgtcggatggtgtccccgccagcgtaggaagtgatccggggcattgccgctgctgcgtcaccgggtccgagcagtgagccgaccaggcttgtctggtcatacgttgagtcgcgcgcagcggaggaagcaacacgtttccgtttgtcggcagacctaaaaagatgaaacttgtaatttacgaaaaaatttcgatcgagcaaatgtttaataagcaaattattcgtttttggcaaatttaaaaagcaggggaagggttgtgcttgtagggtgcactacgtttctcgcccctgctgcccccccccctgtatcgttccctctgattttttaaataaatttccaaacgtagaatttccagaaaaatcttaagaaaaaatttcataaaaatttctatcgtttgtcttaaattttattatgaattattatgtttttttcaaaaaattttctaaaaagtcgctgcttttttttgtaaggtttttgttttgaaaaatttcaataattagttagatttttttaattttctgggagggagatcgatacgtgggaatgggtggaaaagggggtggaaaacgaactgcttccgtttttgtaaaccccttttcttcatccattttgttagattatttcggtattcccataccttgccgatctcgcagtacgatgcactattaatttcatccgccttattcagaaaaaaattaaaatggcaattatcgacattactgatgccgtgtgggggaacattctcccatttattgaacgtcctcagctcggcctcaatttgtcgttggtttcccatcattttgatgtgctcgtcgacaatcaattcgattctaccgaattaatcaacctaacagaactcatggtctgccgtctttttccatgcactgttgcggggattgcgattatacaacacattaacatccgcaacaaaacaaaattccccatgccagagggaccgctgcgccaaaacattcgcttcaccacactctccatcaggtaaattttcatgttcctttacattcaaatgcaaaaaataacaatgtacacaattgcctagtttcctcgaccgagatgtcatcgcatttctcaattccanccagcaacacttttacggtggcattgctctgaggttgtgcggctgttaccctcgg

SEQ ID NO: 5228 - DNA, 4229 bp, Heterodera glycines
  unsure (1)..(4229): unsure at all n locations
tcgggtcgcttccgcacgacgcagcggtccatgtggtcagagacgtggacaaagtccacttgtnncagtgtgggtcgtcgaggagcgcgtggaatcagccggagtccgtgtgtagcgaatctccgtctggcccacacgctgcgcaagtttccccctgtaggtatcttttttttttcaaaattaaaagccaaaaatctttaccacaaggagtttgccaaggttttggcaatgaggcgcaggccggggttgacctccattttggacgagtccaaccggatgtcctcagtgcgctcaaagtcctccacaaaggcttgacgctgctcttccgtgacacacccctcgggccaaccagtcgcctgcactttgagaccgacgaacgtgttgacgtagctgctgaacagcgtgccgtcccactcgtcgtagtcccagacctaatttgtgttttcgtgcacaacatttttttttttttttaaatgagtgactacctcaaataggtcggtgaccacatagccgagctggagtgccttgttgagttcgacgtgcgtgtaggcggtcacccacgagcgcctgtcgtctccgtggcggcacttgccggcgcgctgtaaattcactacatttgtgttcagctcgccatagctataaataacgcgttcaatgggggtagagatcattttgtccacatttcgcaacagacgcattatccactctgacttcccactgcctgtgctcccagacacaatcattgtgaatggatgacgaaattgtccatcctcccttttaaattgttggaaggcgtccattttattttttttaatggaattttctttttatttatagttttacattttaatagatttaaaaaaatggatttaattcttgcaaccgattggataaacaacgcttatcccgaaatggatttacaggacaccaacaaagagaacaaagagccaacgaaaaagcaagaggaggaggcggatgatcccagttggatcagcctgattgacgaggagatgaagcgcgagccgctcgctccaattggtgaggaggcgccagcaacaagttttgcttttggttttcatttggacattacaattttaaattaggcactccaaaaaaatgtgcttgcgctgaacgccgtcgccccgtcccgctcgtggaccacctctgcaagcggttcaaatgcagcgcccacgagctgcatgtgcttttcaaaagcttagagaaacgccgggacattgtggagcatttgcgctccgtccaactgcgcaccgcccacctccgcccggccgtgcgcaattttccggtccgttgcaacgatctgtccatcctggacacccactccgccccagcttaccgaggctacctcggcataacggtttttttaaattgttttatttgtctgtaccacaaaatttaaaggttaggatgcactactacataaagcatggcatccgcttgcgccaccctaatttgccttgcgtagttgaatttggaggcggagatcacaaacttttttccctcttgaaattttgtccattgttttgtagatgtgttcaatttccaattgtactgtggtttttaaaataaatgttgaacccttaactcgagagcaatttttggcaattgcgcaacgtggcgcaaacacggagtacaacgcacggcgcttccacgctatcatcatgcgcatccgtacaacaacgggcaaaactgtggccgcactcgtcttccaatcggcgcgtgtggtcctcaccggagtaccccacccaaacagcgcaaataaaatggcggcacgcgttttgcgacgcatccaacacacacagagcatcacactgggcatccaccagctgcgcgtggtcaacattgacggcgttcaaaccttccccaagcgaatcagtgtggagcgacttcaaaacactctgggtggcacatatgaccccactatttttccagcccttcgttgtaaattgtcgaatggagtcacgtgcctaatttatatttcgggtaaggttattgtcactggggccaaaactttggatgtcatccaacattcatttaatgatttgtctagtattttaccaaattattatcgttgaataaatctattatttacaattatttgaatgaaatgaacaaaaaataaaaagacaacatcaaaaccacccggaatgccctggttgggcggggtcatgatcaacaaaatttctctttcgtcgctccgtccgttgtccatcgttcggtggtccatcatcctccacatagccaaagggacgcgtctgcattccgtggcgtacacgtcccttggcgtagtagggccggtaatctttgtgcgcctcgcgtgtgaagaggtcggcgtacacattgcggtcaatttgcgggaaattcacccggatggcacggtgttcgccgccgccgtacacgtaagggtcatcgttgtccaacacatcatcgctataaaaaaatttgactagcaaagataactttaattaatgaactcacatgggtccgtcgatgttgtaagtggatagcgtcaggtccttcatcgcctcaaaattgatcacccgctcggccgcgtaagataggcggaagctgcgtatcttgaggttggctcgttcatcggtgccgtcccgcgaagtgtgccggatgccgtagttcttcggcccacccgcaatgaattcgacgatgcggcggtcgctgtgctcacgcttcatttggccaagcgcttctccttccgctacgcacgggcctcccatcttgttgacgtagtaaatggagtccgtgtctaaaacatagtaatgtccacagaaagttttattttgtgacaaacataccgcagtagagcagctccgcaccgtcgatggccaaaacatgctccatatagctgtacagctgaagccggccgtacgatgtgacgaatgcagcgaccgggaggcagttcgtcagtggcgccttggcgaactcgggtcgcttccgcacgacgcagcggtccatgtggtcagagacgtggacaaagtccaacttgtccagtgttgggtcgtcgaggagcgcgtggaattcagccggagtccgtgtgtagcgaatctccgtctggcccacacgctgcgcaagtttccccctgtaggtatcttttttttttcaaaattaaaagccaaaaatctttaccacaaggagtttgccaaggttttggcaatgaggcgcaggccggggttgacctccattttggacgagtccaaccggatgtcctcagtgcgctcaaagtcctccacaaaggcttgacgctgctcttccgtgacacacccctcgggccaaccagtcgcctgcactttgagaccgacgaacgtgttgacgtagctgctgaacagcgtgccgtcccactcgtcgtagtcccagacctaatttgtgttttcgtgcacaacatttttttttttttttaaatgagtgactacctcaaataggtcggtgaccacatagccgagctggagtgccttgttgagttcgacgtgcgtgtaggcggtcacccacgagcgcctgtcgtctccgtgtcggcacggccgctgctgtcgtcgatcggcacaccagccacacaatggaaaggtgaagcgcccatcctttgtgcggtagccgagcagaggcacacggatgttgcgtggcgcaagcactcggacaagcagcaaccctcggaagctgttgttttccggagatgtccacggaagtggtgctgttggtggatggagcaatacttcacgcgtcacgacccgtgggttgcccacggggaagcggttggccttctgaattttttttatccgtaagaaatgaacaccttcacagaaaacccaccatgacgtgggggtaaaggctgacaatgtcgatgcacagaatctcttcgtcgtcgctgcacacgtggtggagcttgaacggctctgtgcggcctcccctgagtgcgtcgttgcgcgggtccagcgggcaggggacgaacacggcatcgtacctgcgcttcagctccgggtcgtgacgaagacgctccatccactgacagctccaaaccacgtgcagttcacatccgtgcaggttcgtcaactcaaaaaggcgttgctctgttcgttcgtacaagagtagtatagagtaccaaaagcgagcgggttccgagcgggtgtttcccgcacgaacccgtgcctatgggaggggtgcaaccctttgatgttgccgccaaacgagcccgtgcctatgggagg

SEQ ID NO: 5229 - DNA, 1640 bp, Heterodera glycines
caatgtgcgcctccccgacgggacccagctcgcgcatgccacttgcgccccggggtgctccagctcgaagaagcggatgtaccgctgagactcagccgatgcgcggcgcccacgcaggtagccgctttctggtgagtgaacgagatggttgccggcaggaagcaccgacgaagcgtggcaagcgcaagaccagccgccgttgatgccacaatgaatgggtcaaggccttgtgcatgctcttcgatcagatgacgaaaacggatgaacgactcgcgcagaatggcaacgtcgttggtgcagtacatgatcagctgctcacgaagctgaaatctgttgccgttgttgttgttttcgccgtgccaacgaagaagtttggcccttttctctgccttcatggtgtccggttgatagtagtcaagaccgggaagtccttccagccgctcaagcagatgttgtcgcttgatgaacatgtacgggaagaagggcttaaccgttgccaggtgttgtggcaggttgaagctcttcaccagcgcatccaattgacagacgaaaaagttgacggagtccttgaaggtgatccgcctttggttgtatccgcccagcttcatcgagtagatcttcaggccggttgtgcatagtcgtttgggcggcatacttcgacggtgaagggcctctagcacgaggtgaaaatcgtacttgccgccgttgtgcgcgatgcacaccgtatgcgcattttttggcccatgacgcgtcaggtagtccaaaaattgttccactgggtctgccgctgcgttgtcaaaggaatggaagaacagccgcctgaagttgtagagcggtgcacccgggggtgatggagtgttgtcccctggagcattggcgaacggaggcgacatccactgacgcatctgttgaccccttacagacccacacatacaacacaaccgagcgcacgttgtccatgaccgtcgtgaacgctgattcccaccttgatacaacgatcgcaaatcacctcagcgacgatgagcaacggaacatgcttttgggccacctggttgttgttgttgttgagctgaagtggccggtcttgtgatgtctcggcatcaaagaagcaaaaacggagtggttgttcgtcgtcatcttcatcggtgtcattctcatcatcatcttcagaagcaacgtcgatgttgatgctgttgttgttgactcgcgcagcgcgagatggtccagggccaagtggctgtatgaagcatggctgatcattcgtgtgaggtccggcacaaagacgacagtcttgcgctccctcatcggcttggccatgtggtggacactggtgaaggccaagataggcaacacggccacagtctcggcaaaatcgtcgccactgacaaagcgtacgacgctgtcgcaaaccacggccgtccaatgggtcaggtgcctggttgacaaggtggtagttgaagcagtcgtcgcaggggaagacgaagccacactcgttacaacgacgggcactgctttcaccgtttggcaactttttttttgttgaaaaaaataattacatgattgacaacaaattaatacttacttgttccgacttgcacgggtatccggcaccaaagcggagacagaggcgacacgcaact

SEQ ID NO: 5230 - DNA, 5314 bp, Heterodera glycines
ttcagaagcaaaggcaatcgaagcgacaagttcttcgaggccagtgaattcgattcaacaaaattcaaagccgaacaattcaacgaacaaatacgtcaaggaaagtccaaagccaaatcatttgccgaacaaattcaaagaaaggaccaacactgaggcaactacaatatgttggcgatgtggcttcggcgtgcatcgacctgacgaatgccgttacaaaacgagcaaatgccgcaagtgtgagtttgtcggccatttggacaaacaatgcgagcgtgtccaagagtggcgcaaacgccaaaatgccaaaaagaaaggcaacaaccgcgttggccaccttcgtattggaatgaccacgcatgccgtcaattccatttcgctgctaaaaacagcggttctgttcaacaagaagccagtcgaattccatctcgacacggggtcggacattgtcgtcattgatcaattgacgcacgaatatgttggacgaccaccgatcgaaaaatgcaacgaaattggcaaggctttcgacggcacaaaaatttcctttattggaaaaggattcggtacattcaaatttggcaaaattgaagtggagcaaacattttttgttgccaaagcaggctcactaaatttgttgagctgcaaaatgatggatttatttgggcttttagacgaattaaagctgaagatcagcaaccctgcagtaaatgcatgccacgcgaatggcaaaaaggctgagaattttatcccgaatgaagcaacgcagattgctgggacaggaaccgaaattcaagccctggaaaaagaatttcacgaaattttcagtgaagaattgggccattgcctaaaggagaaggctcatcttgccctaaaagatgacgcaaggccagtctatcgcaaagcccgaccagtaccctacaattcgttagaggtggttgagagcgaactgagccggttggaaaagatgaacgtcatcaacaaagtcgaacatttggagtgggccgcacctattttgattgttaaaaaggctgacggatccgcccgcctttgcattgattactctacgggcctaaacgatgcccttctcgactgccaatacccacttccaataccggaagacatttttgcgactctaaatggaggaaaaattttctcacaaattgatttgagagacgcctatttccaagtcgaattggacgaaaattctaaaaatttgtgtgggctggcaacccacaagggcaattaccggatggaaagattaccgttcggtgtaaaatcagcccccgccatatttcaatcaattatggataaaatgttggcaggattggaatttgccaccgcctatttggacgacattataatcgtcagcaaaagcattccggaacacaccaatcacttaaaagaagtttttggtcgaattcaggcatacggattccgcgtcaaattggcgaaatgcaaatttttccgtgatcaaatcaaatatctcggacagattatcgataaaaacggacgccgaccggatccagcaaaaatctatgcaattagccaaatgcctgcaccaaacgacattccatctctccgatcattccttggtatggtaaatcattaccaacaatacgtcaaaaacatgcggttcatccgaaaaccgctcgacgatttgcttaaaaaggaaattgattggagttggagtgaaggatgcgaaaatgcatttcgaaaaattaaggaaattttggcatcagatttgctgctaacacattatgatccaaatatggagatcattgttgcagctgacgcttccgaattgggcatcggagcggtcatttatcacaaatttcaggacggaaacatcaaagcaattgcccatgcttcaaaatcactcgcccctgcggaaaaaaattattcgcagattgaaaaagagggcttggcgttaatttttgcagtacaaaaattccataaaatgatttatggacggcatttcactctgcaaactgaccataaaccccttgtcagtatttttggcagcaaaaagggaattcggcagtgcagtgccaatcgtcttcttcgctggtctttaatccttttggcctacgattttacgatcgaatacatcaacacaaaggattttggccaagccgatgcgctctcgcgcctaatcgccaaaggaaatgagaccgaagacgagaaaatcatcgccatgatcaatgccgaaacggattttgaaacaaattttggccaaacaatttcaaaattgccattaaaattttcggacctagtcgctgcttctgagcgcgatgaaaatattattcaagtcaaaattttgtcaaaaatggctggccaaatgaaaaggccatggacaaagaaaaccaaatagtccgtgatttttgtcgaagaaaggaagaactttcaattgaaaaaggatgcctcatgtttggagaaagagtggtaatcccgaaagtcttccattcaaagattttaaaattgctgcacaaaggacatcccggaatgaagaggatgaagcagctggcacgccaatatgtgttctggccaaaaatcgatcaggacattgaagattttgtccgtgaatgtgtgccatgtcaggctgctgcaaaagcgccaattaagacaaatttacagtcatggccaaaaacatcaggcccgtggcaacgcgtgcacctggattttgccggaccgtttttcgggaagcactttctgattgtggtcgactctttttcgaaataccccgaggtattcgaaatgtcaacaatttcaacggcaatgacaattgaaaagctaagatatttggcttcacggcacggaattccagaaacattggtttctgacaacggcacacaattcaagagcacggaattcgccaaatttacagcggccaatggaatcaatcatttgttctcggctccatataatcccatgtccaatggacaagcggagagatttgttgacacgtttaaacgtgccttcagaaaattaaaaggggagggaatgtcatcagtgaaagaaataattgagacatttttggtcacatatcggaccacccccaatgattcgttgccggactcgaaaagtccagccgaaatgctcctgggacggaagccacgaacaactttggacctgctgaagccgcctccaattcagccgatcgaacgtgatcaggcaatggagaagaaattcaatcgccgatttggcacgcgtcctcaaattttcgcttcaaaggacgcagtttgggcccgacatcgcctttcacaaaattggaaagccggaacgatctgtgggtgttccggtgtcatctacaatgtccgatttgaagatggatccagcggtcgctatcatgcgaatcagctgaggttccgaaaggcgaccgaaattgttgaggacccattgaacattttgaatgaggaatttaaattgccaattcaaatggcaccaatggcaaatgggcaccaaaatgggcaggtcctagagaataggcctgaccccgtcaatgctgaagaaggagtggaagaaccgccgatcagagatgagcaacaggacgtcattcaagccgctcggtcgccgacacctgctgctcgatcgccgacgccacaacgacgctaccctgatcgccgacggcaaccacctgtgcggtattcgccccgttagatcatttaaaaggggaggtgttcgggtggtcaaccccgagagatgaaagttcacaattgcatttattttccctttgcatttgtctctttcttttcctcttattttccccactctctaattgttgtgtcttcctttattaatgtaagacactattgatttattttgtccaatgcatgtccattcccctcattcattcagttgctttttatgcacttatttctcttcgcctaaatttttgttctcctccaatttatttattccgcctccgacttcgcccatttttatttaaaattgtttaatttatttgttcatcaaataaacattttattgtgtcggcttgaagaccgaacaattacgtttatctcaaattatgcttttattcatttagagagaatttttcatttttttgtgaatttcaaaaagattatttatttatttattttgttttcctttaataaaacattgctaattaattttttaaatattaataattggagtataatttttggaattcatgatttctattttaggtcaatttttaaatttttatttgccttttttgaattttattttttataataaatattttttatataatattttgagttttgtattccgattgcaacgaaggcactcccaacgcagtcgaattgcatcgtgcgtcgcatcgatatttaataaattttgaaaaattaaaaaattttttttttgttattcttttgttaatcagatttttatgagggtttttccgaccatgtcaaaatttttttgggaaaaaatgaagaaaatataaaaatgaattaattaatgtttttacatttatttaacttttgcttttctaccaaattattttattggcaatatgtagagaaagaatctatttgtaggtaaattcgaaatagtaattttattttttataatttctgttttaaatttattctttctatgtaatttattttttgattgaaaataataaagaagtttaatttttttttaatatttaaatccatcatttcgtcgttaattaatatttatattttaaataaattattaatttatattaaacttttatatacaaaatttataatttttttaaatttcgctcttttttataattgcataggttaatattaggtaattgtaaatttaatttaaaaaactatttatttaattttcatgcgctttaaagatggtcttccttctgaaaagttgtccaaatttttatttaataattagagaccgagccggaccggatccggtaccggatttttctggatccggcaatccggtccggagactttgtagaaaaatccaaattgtccggaatagcggattgacacgaactttaagagactggattctgatttcccgatattttttaagatatgactaatgtcccctataaaataataaattgcccgattcaaataatatatttgtgatagcaagatggtgtacggtacgtataaattactttatcgtaaaggatgctactgcaatggcaatataaaggcacatccaaataataataatatttgacatgaatttgtaaatacttctgtatgtttgtttgatagtgaacaaagacgtgcaatacaaaattaccgcatttactttcattagagccaccccccccctgagttatagcctccctatg

SEQ ID NO: 5231 - DNA, 3632 bp, Heterodera glycines
  unsure (1)..(3632): unsure at all n locations
tcagctcccccattagcgaattaataacgctgtcgtatattnaggctttaacacaaaattcaaatgtctcaacagcaccggaacatgaaaggcgacttttgctacgattgccaaatccctataaacagcagacaaatcaaccacaaatgtaatttttgcaaaaatataatttttatttaataatgacaattaatttatagggttaatccagcgctttctgctgactcttccagtgcaatgtctcaaatagcttctgctccgcaaacacgccaagtctaataatgaggaagcttaccaatttctctctatccaagtaaatttaggtggctcaacaacgacaggatttggacgcgtttcatcctgtccagcaacaacaaatcccatctcgaccatcgcaaaaaaacccggtcttagttgaattaatggacgacgatgacgaggaagcggacaaggcaacaacaaaaaccctaccttctcaaagccacccgccaaatccgggctgttctcatatgttggattcgcatgaagaaaggcagctgatgaatcactcacaaatctctcgcctaaaggcacaaagtgcagctgccgattctaccgtaaatgctggaaatggctcttcaggttgttgtcatttattatgaatgttgatgctcgacttactgctgaatttatcaatcgttctgcagatgactcatcttctagtccatgtccgtcaacttcacttccaaaacgaccacctgctccgccagttgcagtgccagaaccctctcataagcgtcctgcaattgagaattctcacggcacaattggaatgaatcgaattgttcctgacaatgaggaggggtcaacacggtcaccgtcaattagcaccacaatgatcgaaggaaatgccaaaggaaccgggcacgaagtgaattctcaaggaacaaacgacaacattgctttggataatggttctgcaaatgatcaaactgaaatggcagcggaaccaaaacaaaaaacaaattgtgaaactggtgaccctgtccaccgaggaggaggaggtatttttggacatagaaattaacttaaatcaaatacgttgaaatggacgaagaacaatcgacaagcaaaatactagtatgtcacatcaccactatgaatgccacaaaatcaccgtccaaagactctgatgagaaggtgcacggagacgactggtgggacgactattgctacgtgtgctcccagggctgtgatgaaacgacgggctcattgggttgttgtgacacatgccctaaggtgtttcacgccaaatgccatgtgccgatgatcaaaaagactatggaggaattgccgtaattattgtctttcttgtttacatgggttgcacttttcttattttagtaatggttggcaatgcacactttgtttgccatgcgatcctctttcgcaaataagtcaatcgtttggagagcgtgaaaaattggtatacttttaagaatatgtaaataattttgactttgtaagtgcttcttgctcttttagctttgctccaaggtctatttggcatgttttgtggacttttctaatgtcgaacactttctgaacgccgtatcaactgccgaatccgattactattcggttatcaaagaaccgatttggttcaacaaaatagcgacgaaaatttcttcagacgaatacaaaatgatttctgaggtgctttttgaactttagagaatctgatttaacaacaatcaattacagtttgttgaagatatgaatcttttgttccgcaattgttcaacgtttaatctggtgattttttttctacgataattatttacttaaccaaaaaatattttcaaatgaattttataatttttccaacggcacctattgataatatggaaagttatctagttagataaaaacctttttgatggatttggaaattgcaatgaaatgccatttcagtgtgtatttaaactgggcattctcacttacaattagtattgaaacgggtgaccccatagggccctcgacaatgggaaatgagcgaaactgagttgttcgattggttaaaattggtgtggcttcaaatctgtccactgcctgtctgtgcaattatttttccaatccccccacccctgccgattagtcttaaaagcttttatttaagcccacaaatcctttgtcaaactctgggaagaaggtttacacattatatatgaaagcgatgcgcgaatttttgccggcttatgagaaacaaatttggatttatgtgtctttatataacggaagggtttctgttgcgagttcggtgagtctacaaaaattactattttcattcaacttttatgattatttcagaatgacgaagaatctgtgcgaaggcgtggcggcaaacgtggaggtcagaaagcaaagtcacaaacgccgtgttgatcttcagtttggcagagaaggacgaaaatctcctcatttttatttagccaattgaaaattattagggcttggaattatatgcaaatgcatttttcctggattagctaaattggatttttcgggattttgaatcattcattatacccatataattccggtccctaaatatgatgatgctattaaaaatttttgttctgtaatcttttacctacgcttttcaataaataattgctatgtgtcgaataattttgaattatatgtacaaataacttcgaaacagtatttttacgtatacctaattcctttttaaccacactgtctcggttcttataatttgttagtttgtttgcccttattgtcctcttttcccctccttttccctatttccgttgggcgaatgcttcatttcattcaatttagcagatggctttccatcaataatgttttaggaagatggggacaaactttgcttgggttttgcttatgctcggcgagggaaaaagaatgcatgggaagggagtggaagagcggcagagattgccttgggcatggcaatggaatggccagagggaataatgggcggctcttctcttttgttgggccgtgcctttttgagaatttggtaaaatgccgggaagaaaagagagtgtttaacggaggcaatgagagagttttcatctcaccataaaaacattctatgcccaaaaggatggaattttcatcttagatttctctcccatcaaaattaaatcagaaaaaatctgaaaaagtcgtagtttcttctgttcgaatggatcgtctctcgtggtatcagacgggcgagtcgatggaggaaattctctgccaagcgggcagtgttggcatttacgacggggacctcaaacaggtcgaagcaatggactaccatatgatttatttgaatttanaaacaattgtgcatttaagtcgtcgttcgaacagggcaccgcttcactgacttatcagcgaatcatttgggccgattcgactgatccggtgggaagagagagaccggttttgagtttcgacccccaaattanaggattgtcgccttgttcttcaccattcgatggtccacaaaatagaaaaacagcacaaaacaatgtttggacgtggcggcaaatcattgtgacggtaaacccgtgacgcctggccacgcgcaagggcccatcgcgcgagcggcacaaatt

SEQ ID NO: 5232 - DNA, 5341 bp, Heterodera glycines
  unsure (1)..(5341): unsure at all n locations
tggctgaacaacaccaacggacacatgaacacatcagcgtcgcgggcatggatcagggtgataagtaggggaattaacaaaaagttttgaaaacatatatttaacagcattgaatagagtttgcaaattctctattccgaaatggacatcttttaaggcttttgaagacatgagcaaactgatggagcaggccagggaaatggtcgtgttgtcgaagaatatcaccgaaagattgcgacaaaaaaagggcgaaataacggaggacgaggcaatcaatgcatttttacttattattatttttcaataatataaatttgacattgtcatctctttaggccgaataataggagcaaactcattaatacctaattgtttttcagactgtccaacttaagtcttatttgctctcgttgggtgttaatgaccccgtcacaaagtcatctttcggctggagttcagtgttcttcgacaaattggcagctgaactcacttccgttttattggagccgataaaagttcgcatttccaatgcaattcaacagtaacaacattaaaacccattcttaggaaagtgggggaacgatgacactccccgaagcattctgccgaatgaatcgggcacgcggaatggaaatgatttcacccgaagatttattgaatgcatgccaaaggctggacaaaatcaattctccgataaggtttttgccagaaaattcaaattgaaaatgtaccttgatgtaacatttctttcttccgttaagtctcttcaactttgacaatggcgtctccgttctccaacttcgctctctcaacgcccttcaaatttccgacgagattctccaaatggtcgagtccgccggtgcaatggatgcttcacaactgtccaaagcatcgggcgtccccttggttttggctgcagaaaggtgtggttgtcttttcaggttgaattggtaattgggttttcgttttatttaggctccgttatgccgaggaacagggaaagctgtgcagggatgacacaatcgaaggattgttcttctacccaaacaaatttcttgacattgatctgtccattgataattgatcattttaatcgtttcttcaaacgggttaaacattattattattattatttaattacacaatttttcattcggaaaaggaaaaagacaaaattaattttcatttagaaaaaaatttgaatcaaagaaaatctgacttttctacgtagggttacacgggcccagacccccggatacccggctttttcatacacagacccgacactttgaaaatcgaatatccgacacccgacccggtagatctggatccaaaatgcattggtaagaatggggatcttggtctaattaccgatcaaaattgcgcgaaattaaaagcgccggccccctgtccctcccccaaaaaaacgggagccctgtatttaaggtgtatttttaaagggcttttgtcattgattgtgtggttattatcttcggttatttccatttttgtttgggttcatttcgctcacataacaacgatgatgtttaactagagctcgcattttgaggcatatgcctttttttctgcgaagtagtttcgatatattaagcataaataacaccttttccgcttgctttgaggcttctacgttgacttttattatgccttttttgcttttttcgggattttcgtgccttaaatgcctttttttggcattttgccgttttagtgcccttttttgcgttttttccgaaaaattccactaaaaatggaataaatcggcaaaatacaccccctaagaaatgacccgaaaatttttagaaaatacacccctaagaattgaaaatttttctcaaaaattgatcaccaaaacttattttatttttttcttgtaaaaattttaggcttaaattttacttattcgaaaaacattataaagtatttcataatcatttaaaagacgaaaatatagttttttggttaatttttacgtgttttgctccctaaaaatccgtaataaaaaaattttaaatgccttttttcatgcctttttcgggattttcgtgccttttcatcccttttttgtgagctctagttacaacagttcttttttttgaaaaatgcatacagtcagattgcatactgtatgtttgacaccactagccgtttcgagaattggtcttctcaacattcatggaatttttttgccgtatttcaatttccttttcaacaatcgaacctttattttcggcatcttgctggaattcaaattttgtctttaaaatgaaaagtacgaaaagccataagcgtaaaaagccaaaaattcaaatctcaaaaagaagacaaaatagtcaaaccttgacccatgtagccgtatttaaattaaaaaactttgtttagtgaagtgatacgaaccttttagcttaaacttatttaactataaaagggctttataatgccgctacgacaagatgtttggactcatgattcctgtttggtctgttaatatttaataatttttggtaaataagccaatttaaaggtgtgccagtcagtgcattctacggaggaagacaaaaacaaacacgaattggatgcatcgcataagaaggcataaatctccaattttaaaatgaaaatccttttttatttgaagaaagttgtagtctacgattttctgtccagggagctttcttgcttgacggcaagcaaccaaagatcctttctttatgaacgatattatcgtgcgaatgcctccgttgcgggtcagtcggatttacgatttatggcactatctgatgataaacttcatgaatttaaataggtctcgactgcatttgtgagctcaacttcagctggtcggctgttcccctgtgggcgtgtacaatttgttacgtggccggtgaaacattggaatctgcggatgaccacatgcacagttcttatcacaaaagaaattacattgtaagcggcggaggtgggggtggttaatcgttaattgcattttaagtgtgaatatcaccccgaccgatacgcggaccttttgaaagtgcaagaaaaaagcgccaagaacaaacagtcgttgcttgagcaagaggccatcgttgacacgttgctggaggccaaaggattgctgtccccagatgtttatgtgctgaacggacgaagtcaagaatgggccttccaaaaactcggtctcagtagcgaaccgcgcaaagatccattcatcgcagaggaagtgacggacaatcacaaaatcgcactttgttatgtgagtggcattaaagttttaaatttttttaaaattccaaggtttgtggtgagacgttcatttcgttttcaaaagaggaggagttccgcgatgcgtggttttcccatttgtcaacgagcattcaccagcgctgcaaagcaatgcaaattttggttcatgaaggttctttttttgggactttattttgtattgtttgttattctcattgtgcagataatctggtggaatgcgaaggggtccccgctgaatgtgaacttcgaacaaactccgaatttcgacgcatcgacgactcgagcgacgatgaagcgaattatggacctacggtcggactcgactatttgatcatctacaacggttggccataatttcgcctataattctgcaacaattttattctcttcgaatgatggttcatcagtttatctccgactacgaaataaatttagtctgcaaaaaaattaatttttaattaaaaataccgctgtgtattgagaaatgcttttgtattattttttactctcatcggtccctttgctttttctattgccacatttgtaattgttaatttttatttgataatgtttttccatttcattgtcattcccttttctgcgtttgtttccccatttccattcgaaaatttaggcaccgattgcttttgcactctttgcttcaccattcttcccaagtcttcaataaccaatcatttctcatctgagtatcacatagagcgtttttttgtatgttttatttctttaattcattatatttcctgttttgattcagaaaagagatgacccgggcaaacttctgaatacgcaatacttaagtgtgtcggaacggcatggaattctcgaattttgctacggagagttaaaattgtcttcgcataaatatttccgctcgacttcacaaattccgattttgttgcaaaaatatgcgcttcaacaaaggaatgctttggtcaaatacaatttggaggaagttgacttcggccacaatttgaaagctgtttggtgtgaggttgtgttaatcaattgttggttcagtaagtgatccacatccaccattctcacaggagtgcaaagagtatgtgaatacggtgggcgatgagaacgcgtggagcattcacattttcgacgacgcgcacttcgagagagcagcgagaagagcactttatcactatggtcacttcgtttccaagcagtgttttctttttttgaaaatggttttgttttagaaaggtcggtcgtgacacggagttgtgatgtgctggacaatttcgcccattcgtaccctccaatttgggacgaacaattctccgtctcactcggcgtgctttccatccaaagtcgatgtgaatttggcttggagttcatcattcgggacacactcagctccaaattgtactgcacctgctgctttgtgcaatgcgatgacaacgacacgcaaatgttttccaaacacgcgcggtcgctcgaacacatcactcgcgcaatggttcttatttcctcttttgcgcttatttatgccttttaagctttttcattactatacttttttgaggcctttaaacgttgttttcattttcagcactcaatgaacaaaagaaatatgatcacattgagctggcgctttccgaatgcaaatgaccgaaaaccgttggtcatggactacttggtgaactgccggaagaaactgcggcaggaaaaacatggcatttctgtgtacaatccagcattggtctacaaaatgaactgctcgtcagccttgccgaaacgattgtttaagttggctaaaatagcgccgaacgaccggatcactttcattgcggaacacaaaaaaaagagacagcctcgcataggtaagtgggatatttagcaacaaatgccgaatattgactcaaatttacagtccctttaaataatgctttgaatgaattctgcagaattgaggtgaagctggagaagaaagaagtgattgtctgccattgtgaggttggtcttcagatcggatgtttttctttttcattttaaacttggaanattgttattttatttattcatc

SEQ ID NO: 5233 - DNA, 4195 bp, Heterodera glycines
atcacgaatccggcatccatttcgacatatatcgagccccgacgcgaattcgaacaaaaagtcgaaaattcaaaaaatttcaaaattcactttgatgttcgaatctatgtagaatgattattttcacgtgttcgcaatggtttctagttaacttgcttgttttaatctatttagaaacaaaaattgaattttgaaatttttttattttcgactttctgttcgaattcgagcctggggttcgaaataggtcaaaatggatgccggattcgtgatcaacgactctcgaaagccctggaagcatgttttcatgacttttgaaaacaaaaaaaattgcatcaaaaaaaggggggcaaccatcggcagtattacccaaattaaaaaaaatttcgttttattaatttttgtctaccttctgacaaaagcactatttcctctgtgtctcctactttgttggttcccatgggcagagagtaccaacaaataaattaaatatatttcgccaccagcagtgctaatttgcacaccccgaaaaaagcactggacaatttcgcgtaaaattgccaatttttgatacaaaaatctcaagattggcataaaaggatacaactctatcttcagatccttgacattttaattctcgtttatttatccaagctgtttgaaaaattgtgaccgattttttaatgatttaaggaaaaatctgtaatttttcaaaacgctcagtttcattgaaattgcgtttgcccatcgttgcctaaattcatttgaatttgtaacttttgtacaaattttttctttactttacattttgttcgtttcctctcttatctttcttccatttgctatttttgagctacccatttccttttttgctctgtcatcattttttcgtacaaattttgttttttttggccaaaaaatcatttttcaggaaatgttcatttattactgttgccgaacaactgaaaaatgtacatagcaacttcgcagtcttacaatggaatatcgggcgagcccagtgagttatattttccacttccaaaatccaagacattaaattgtgatggccatggatttgacatttcatgaacctatgaaaaaattcaattggtatgacggtcctgccactacggatgccaatccatggccacagagacccaaaaatgccacaaagttacgaatttttaaacagaatttcctcaaaaaatgtgtcggggatgaatggcatcaaatgttggcacattccttatctttttcaccccattttcccaggttcgtcctctccgccggtcaattggcgttccggcgcattgcgcggtggtcgaaaagtgaccaaagagccggcctacgccttcattttgcccaacttggagcagtacccggccgacttccgccactttttggagcgggacatcatcgaaatcagcacactgagggtcaaacttctgcatttatttgccatttgccctatttttggcgtaaatatgaaatttgagtgccacaattgtcactcttttttccttacagttctccgctgttgctctgttttgatcagtcgcatttcattgcgcttgtcgcaatgcgtcgtcagttaatcaccatcactttgcagggtaaagccatggcggggtcacccgtcaattttccccataattaattgcaccctttttgctttttcagtgattccgatgaccgacaaaaaccgcaatttgccgcccgtccatttctcagtcaattctggcgccgatttcacttggttcaacgcatctaatacggatgattgtcgatgatggaaatgatgtttcattttgtccgcaattttcattttatttatttgtttccatttattacgtatttatcaataatggttttctactcgcttctccaccaccataagtataagtgtgcctcggcattttacgtaattccgacatgcttcttcttttttacatattggtcaaaccgttaatttcaatttcttgttttgtgatgtgtttttgtctgaatttgtccgtaatatttgcgaattcaatgcgtgtgttagacacggtgtttcatcgctctctgtcatttttagtgcgcctttaaggcaacaacaaataatcgatagtcttctatttctctgtgctttgtgttggctctattaggtcattttctctgctctgacccctcctcctttgttcagaatctgtccgccctcactcattcattcacttcatttgtcagtcattcattcatttatccgtccaatttttctcatttcttttctgcaaatttctttcgaactgttgaagcaaaaaccacatcaagcaatgatttgagaattcattctaaatccgaaaatatattgttttttcgaatcactcactttcaatgatcccttcatattaaatatctaacgaatactttttgcgactgttttacgattgtgtcatgccaactcgtacaattgcttaggccgaatctttggctacgtctaggcttggtcttgcttcggcctaggcttaagctttgttttgtaaaaatacgagttgacttttgacccgaatagtaataccattcattgttctaaatcaacattttttttgttaactttgttctgctggtcgatctgattttttcactttagccatcactatttttttaacacactttaaacatcaccaatttgttccaaatggccgtcccattgcccttctctgttaatgtgtccaccatcggagtatgtttaaaaattgatatattcacaaatttacaaaatatttttaactgattattttgtcgttttcaaagtttgatttgtatcaccttatattttcccctttttcgggccaatttttatgtgaatttgacctaaaatcgctttttagaaaatccaactgattgatcccttttccgacgttttgtcggaaatcctttccccttgttaaccctttggccctttactaatgaaacctaaaattatccgcaaacttcccgcagaattaaacaacgaattgcttcaatttgcccccgagtttttgtgtcgaagcgttttggctaactctaactttttgttttatgatttgattcggaggagtgaaagaggcaaaaaatggaaaaccaaagtatggaaaactgaaacaccatcacacaatggacatgattttgggtccacttgggcaaatttaattgtggtttcaaatagcgataaacatatccaagaaattttcgctttcctacgcatttagcacaattttcttttaagtctgtggaagaaagcgaagcacggaccacgtacacgtacggcaatgtcacagtccggcctttcatcctacgaaaccgacgccaccacaacttcaatttcttggtggaagactttatcaacaccgatgtgtttctccgctcggaccaaaacaacggacgcattggcctagtgtcaattcgtgtcggtaacgctgcacaggtgaacgaccataaaaataagtgcaaattaagtcatttttcacccatttgatatgtcttttttaatgtcgttggattttgtgttcggatattttggttcccaccttacgattagcttgtttttgttttgagttttaattacaaaatctaattatgaatttttacctaatccaagacctggtttcattcggaatccttttttattgctcatatgaaaaaaacgcccaagtgcgaaatggattttgtttatagaataaatttcaacacagagacaagaactccgacagttcttcctcaactcttctcaaaatatcatggaaacgtttgaatgcagcattatgttcttccccctcaacgcctacgtaatgtttactctttaaaggtcgtaaattatttaaatagtagtaataatacgacgattttggacaatttaacagattatgcccaatttgaattgttgagattttagtctattaaaaaatatctaatatatttttatccaaatgctaagaaccaaaaactttcatttggaaatagcgcgggaatattgaaatttaataattaaaggcgtgggatgtagtccaagtacgctttttgtctgacagtattgtgggtatgtggactgatgtcatggaatgttttgagagggccgtaacggcagtgagtttccattaatcacctctttctgcaacttgggatttttaacagattgaggatggcaggccgccaacgccggtgaatagtccaagtc

SEQ ID NO: 5234 - DNA, 3672 bp, Heterodera glycines
ccttatattttcccctttttcgggccaatttaatacgaactcttaactaaaataattttttagcacagattggtccattttccgacgtttgtcggaaatcctttccccttgttaaccctttggccctttactaatgaaacctaaaattatccgcaaacttcccgcagaattaaacaacgaattgcttcaatttgcccccgagtttttgtgtcgaagcgttttggctaactctaattttttgttttatgatttgattcggaggagtgaaagaggcaaaaaatggaaaaccaaagtatggaaaactgaaacaccatcactcatggacatgattttgtgtccacttgggcaaatttagttataatatccaagaaattttcgctttcctacgcatttagcacaattttcttttaagtctgtggaagaacgcgaagcacggaccacgtacacgtacggcaatgtcacagtccggcctttcatcttgcacgaccgacgccaccataatttcaaattcattgttgaagacctggtcgaccccaatttatttctccgctcggaccaaaacaacggacacattggcctagtttctattcgtgtcggtaacggtgcacaggtgaacggccataaaaataagtgcaaaataagtcatttttcacccaatgttttattttgatccgttttttaatctggttggattttgtgttcggatattttggttccaacattacgatagcattgttttgaattttaattacaaaatctaattatgaatttttacctaatccaagacctggtttcattcgggatccttttttattgctcatatgaaaaaaacgcccaagtgcgaaatggattttgtttatagaataaattcaactcagagacaagaactccgccaattttttctcgactcttctcaaaatatcatggagacgtttgaatgcagcattatgttcttccccctcaacgcctacgtaatgtttactctttaaaggtcgtaaattatttaaatagtagtaataatacgacgattttggacaatttaacagattatgcccaatttgaattgttgagattttagtctattaaaaaatatctaatatatttttatccaaatgctaagaaccaaaaactttcatttggaaatagcgcgggaatattgaaatttaataattaaaggcgtgggatgtagtccaagtacgctttttgtctgacagtattgtgggtatgtggactgatgtcatggaatgttttgagagggccgtaacggcagtgagtttccattaatcacctcttctgcaaacttgggatttttaacagattgaggatggcaggccgccaacgccggtgaatagtccaagtccagtgcaagaagttgtttcggctaacaattccggcgagaaattgccatcgctcaatggaagcaacgaggaagaggaggcgaattgaacggacaattcattgttgtgtttaaatatcatttgttgatttcacaatttcaaaattttacataattgaataaatttccacaaagtggaaaaaattgattcaaaaagggatagtttagtaattttgcgttttttgctgtggttaggtcgcaatgattttctaccaaaaattgtgtgagcaaattaaaaaatattttcttttgcgttttatctatttttcgtctacaatctgacaacaacactatttccatttcctctgtgtctgttttacattgtttgttcctaatggcagagagtaccaacaaataaaataaatattttacgcgttttcccaccggcggagacgaaaaatttgcacaccccgaaaaaagcactgctgcttctgccgattagtcatgtttcttctcctttgttcgtcgtcataaatacaaaaatgtgatgtgtccaatcgctttttgtttttctccattggttcacttacctaattaaatatttccctacaatttcgcgtaaaagtgccaaattttgatgcaaaaatcgcaagattggcataaaaaagacaactttaccttcagatccattgacattttaattcccttatatttatccaatctgtttgaaaaattgtgaccaatttttaatgatttaggaaaaatctgtaattttacaaacttgcccaattttcattaaaattgcattggccaatcgctgcccaaattcatttgaatttataatttttgtacaaaatttttcattattttactttttgttcgtttcctctcttatctttcttccatttgctatttttgagctacccatttccttttttgcactgtcatcattttttcgtacaaattttggtttttttggccaaaaaatcatttttcaggaaatgttcatttattactgttgccgaacaactgaaaaatgtacatagcaacttcaaagtcttgcaatggaatatcgggcgagcccagtgagttatattttccacttccaaaatccacgacattaaattgtgatggccatggatttgacatttcatgaacctatgaaaaaattcaattggtatgacggtcctgccactacggatgccaatccatgaccacagagacccaaaaatgccacaaagttatgaatttttaaaacagaatttcctcaaaaaatgtgtcggggatgaatggcatcaaatgttggcacattccttatctttttcaccccattttcccaggttcgtcctctccgccggtcaattggcgttccggcgcattgcgcggtggtcgaaaagtgaccaaagagccggcctacgccttcattttgcccaacttggagcagtacccggccgacttccgccactttttggagcgggacatcatcgaaatcagcacactgaggcgtctggagaattcgggtcagtgtacagttctcagaatgtctgataggagaaagcatattccccatgattatttaaccaaaattttctagaactattgattggcatcattcagttttataccgaccgttaattacgcttttgttttcaaacgattacaaaaattttattttgtttctgaattttggcgatgtttccaccttcgttgcccaataacttttgatttttccgcaattttctccactttttctaatttgttgcatccaaatcgctcaatttcccctttttgcaggacatttgaattggtggtgtcaacatgacagcaaccaacggctgtggcccctggtgacaaccggcgatggcaattgtctgctccatgccgcgtcgcttggttggtggacgggaaacaaaaaggggggggggcaaatagaataatcttcgaccataactggatggatttttcccgattatcaaatttattgacaagactgccaagaaattcccaaatatttttattccttttttggcattatgttaaacaaaattaaggcatttggggtgtccacgaccggcagctgaactggcgcaacacgctgcacgatgtgctgaaattcgggagccgaaaacatgccatctaccggcgttggcgttggcacgagtccaagaacaatttggcgtcgggtttggtgctgtcggaggaggaatggcgccgggaatggaacgccgtgttggagttggcatcgccgacaccgcgcccaaagtaaattttgtggaaaaacaaactagaaaaatgggactgcagggacggtcccaggatttgggcttggggggggg

SEQ ID NO: 5235 - DNA, 1524 bp, Heterodera glycines
  unsure (1)..(1524): unsure at all n locations
ctctctctgcgaggaaattctcgagatggcaggccaccattctgacgccgatgtggaagaattgatggcaaaacacaaggccgtccttgagcgtgaacagcgagcgctggctgagcagcagtattggcgagactttgcgttccagccatcaggtaaccggacgaagcaaataactgtttaaatttctaaaatttataggagagtcaatcgcagagcaggctttacacccgacaggactagaaatggagatccagcgctacaattttgagcaccaacaacaggagagaaggcttcaacaggaacggatttggaaggagcagagggaagcagaaatgcttgagaaaaagatgcgccggatccagctcgaacaacaaaaaagccaacaacatcaggcaaaggactcaacacggaagcgcacacaacaacaagcgcaaatttctacaccaacaaaggctgaaacaaaaagtaaaaatgacatataattttttgtgattatttcgtattatttgaagattgtggcaaaaatggaactctgtcgtcaccagggaacgctcggaagcaaccacaacatgcagttagtcggctttactttagcgaagccaatgccggtaaaaaaaaagttataataattaaaaaatactaattgcaataaatcagaacctgagcatgctgcgccagcgtcagctgtgttgacgactgagcaacccatcgccatcatccagcccgaccctgaggcaatccgggcccgagagatcatcgaccagcggctcaacatccaagaggcagattttgtggaagatgtccattgcggcagtgacgataagggtaataaacttaacagaaaatatttatgaaaataaaactttcagcgcctggtccgcaccccaactttaatgctgtgcacatggagatcgtgagcagtaaaaaagaaggaagttggcgagacaacaacgagacgtgcggtgtctgcactgaaccactgcttcgcggagacctcgtcactcagctgccctgtgacgccaatgtcaagcatatcttccacaccatctgcctacgccgttcgttgacaatcaaccggacatgcccgaagtgccgccgtcccgtcaacatcccagacgacatatggtgaaaattataaaaaatataggcataaaaggtttgcttaggccgaccaaagactcgcatagtcagtcttataaagactactttgctgagcaaagtcaaagcgcaacatcagcccgacctccggacgatgactttgtgatccgagcttggtaataaaaaattgaaaaagtttgaaaaaatttatcaaaaaatacaggagtgtctacgaagaccttcgcaacggccagagagacgcctacgggaatgtgattcgtcaaccaatcgtgccccgtagagctttccagctcgtgatcgaccannatccgggaggacagctctgaccttggcgaccgtcaactgggagtgggacattacggacccacggaatgacgaaagcacagggctccacatgtgcgagac

SEQ ID NO: 5236 - DNA, 1041 bp, Heterodera glycines
tgccgcccctgctcatggaataccctcagccgtgccttggcattgtcagacagaaatttgaactcacacaacgaactcagtaccactggggggacatttctgccgttattagtcatttggccaatgctaattaccctttgggcattcaatgcgatttcgaacttgccatttgccggcacggcaacgccactgttcgaaccggtctaatcggagctgattgctcggactggcacacttcacctttaataatgggaccggcgttaaaatgcaaaaaaaaacaaataaataaatccctcagtctaattacccttaattattcttaattacaaaagctcaagctttttccttaccaaaagtgcggtgccggatggaaatcgcactaccgtacttttgtcggtccaccgtccgatgttcaacaattggtggtcgtactgtaacagtccgtccgtcgctggtgcgcctgctgcactgtccaacaagtgcaacgcgtgctcctcctgcagttgtggcgcggtgcacgtgccgcccgggtcacgcatcggcactttggtgagcaaagactgtgccgcgggaggggcgtcactgggggacaccgcgccaatgccaacgcaggacaaaagaagcgcagcccaaacgccacgaaggcactggcaaagaaagacgaagcattttgagtagttcaaaaatgaattcaaggagaaccaggggattggcttaagggtttgaagggataacaatgggtggactttcaggcgattattgcatttttagaatttcactaatggagggatacgactcgcctcccctcccttccccgcccctcccccaatggggacgaccgtccaaaaacatcgtatcctaaactaaaacacttctaattttcatatttgatattaactcgactgaatattagtgtagtaaaagtacctttcttatgagtattatcatgtatattttaccttgatgtttggtatagaagaattttggaaacttttttagaatccaaaatctttggattttacacatgtgagtgaattgtca

SEQ ID NO: 5237 - DNA, 2255 bp, Heterodera glycines
ttaaatgttatttcattttttaaatgccaaaattgtcttcaaatttacctactccactcagcagatggcggcgtcttcggcgccgtcggcccggccgactccacagaatttggccctcaactgccggatggacttgcggcacacattccggcttcagtccgggactccaatcgccacgcttaaaattaaaacaaaaaattgaaataattccacagtattttgtttatttgttgttgtcacctgacatgttgccttaggtggtcctaaattacttccacaaattaataaattgagttaatgaaattaattaattaatgtttaatcgatttgtctgaccaacgagaaaattgcccttttcgcagcgaaatgcgattgatcgcccttccggcactcggcttatgtaatcggaataatcgtaagcgcccatttggccctccagcataatgtggccaccgattaaagtgccaaaagcttttgtcggatgctcacaagacccttttaagtcaaaaacccttttttgagtgcctttgccatgcttttattttactcgctaagcatcggaacggcggtccgtctctgacccatttgccgtagagacatttcatggaattgttcggcgacgacggacgaaagccgtgcagacagcggaatttggccactaattaatgggtaattagttgtccaaatggtctaatatgacaaactcgagccatgtgttgactttgtgaagacaattcgcgaattggacactttggccggccaatggacacaacgaactgcggcaaaaagaagagtgttctttcaaattttgacttatcaatttcacttggcgaacactgcggcatgtgggaccaagtgccattggcacacctagccgatgccaatgccttcgagtcgtgtttcgggtcacacaaaatgctggcctacttttattttttaactaattttttttttgtttgaatttgcctctgttccgtgcggcaccgcttcgccctgctcgaattggtcgagtcttccgtttcgaattggcggcaccgtacacccagctgaaaaggaaggcgaaagtgccaatgatggaacgacatgacattcgttgtgcttcccacccaaacatttcggtgccattgcgctccatttgccgctttcctcgcattttgcgaacggcgcccccacgtgggacattccctcgaagcagcggaacaccacaatggcaccaaagctggtgtcctcgccttcgatgtacccattccaaatgaccggcagaggagggcatttgatctctgatgagaaaagggggattttgacagagaatgttgatcagaaatgaatggtatgatctgatcagttgcattgatcagttaatactacacaatcagtgtgtggatcacaatgattggcattatccaattacaaattattaccctcacaatacggttcttggcccgcccaaatgccttccgccaagcaaactcgttggaccgaaaaattcaaaatgattttatgatttcttaaaatttttgtacctgcccaacaaggcgatagccatcgttacacgaataagtgaccaccgattggaaggtcagtgaagagccaatgacagcgccgtgcaacggatcatccggacgagaacattcggtcgctaaagcgatcggaattagccaaatgatcggtcaatcgctgacgatgggataaacgaaattatctgtttttatcaaccaaataattattattttgagtttttttaaaagggtcaattttaccaaaaatatataagaaaacaacggaataatcaatcaaataaaatttctgttttaaatggccgagcgtacgataggcaatctgccaaaaaggtgtttgtttcattccaaaataaataggtaattgaattttaacaaaaatccgtaaaagtatttttcctttatatgtacataattatgccaaattggcactttagaaaaaacggaaaatttctgatcagtgattccattgattttcctttactaataaattctttggggccattcctagaggatacttgtgttgtgactgaacccaccacaataccattccccaaaattgaaataatatccctttattcctaatgtgtgcacacgattacgtaatgagtaaatgagggaaaggaacggccccccgatccgtacgggacagatggtggagggaaggatcggacgtgcacttggcccaatccccccgaccagaatgaatactaccagaagagaggggagcagattaat

SEQ ID NO: 5238 - DNA, 2709 bp, Heterodera glycines
atcatggatcatctccacggatgatcacctcatccatcgacccacgcccctgattcatcttcagcctcagccactcactcatccgtcgatccatagagaagaggagtctctgaagagcggtgggacgtgatctctcccctcccctccccctccgctccccccccccccaattcccctcgctccctcaattcctccattttccccaaatatcgccgcctcaatctcgacttttcattctgcccattactggatgtgaaatttatgcaagagcccatccttctgttgctgattcttccaaattttgcgcaagtgaattaaaccattgaaaaacgaacttttcttagagcaaattaaaaatatttattggtaagctcctaaagtgcatatttcctcctccccaatttgttttgaactgtttgtctgtcattgaccccaatttgaattggtcagccgaaagaaagcgaaaatgggcaaggaattcgtcataaccaagctgttcaactgaagggtcaaaacaaattcggctaagaaatgttgacataaaatgcgaattgtacccatcgctttgatctttccagttttcccttgctccgatcagcgattgatcactttcatttttattccctggcccaatgggcgtgaaaatgacgtcacatctcccgagggcttttggcaccccccgccctcccccattcagttattcatcatttacttgatgacgttgtccagcgatatgaaagggaaatttggaggacattgttgtcccacctcccacccgtaatactcgtccaataatttttgaagcaatataaaagcaccgactcgttaattagttaattaatggcttaatgtgcgactgaatggtatttaagcgatcgtttcttttgccaacttcaaagccctctttgccattccgcagattccaatttgaccattcgcttcccccctttttgtatatgacccaaattgcgtcatttaaccgtcgtccgttgaccgtctcgcgccccttttttattgtgctgtacatcatcggtctgatcatctgcgtgcccacctctctgttcatttggtcccttcgaagacgcttcaacgaacggaacgtcgtcggggtaaggaaaaaggaaaaagcgactctcgagaagggtgccgggtcggaaaatggcgaaaccgactcggcacatattcgcccattctgagggacacgtcgaaatattttgccaaatcaaaattcgatcgaagaaagtgcctgattctcgagagacaaactttccccctttttccaatcccactttttgttgtttcagcaatgctcgttgtcatcatccatccagaacaatggaacggcggctccgaccgatgcacaatcggtgggccaaatacacctaattaataactaattaattaatatttattcattgatatttaatgattttttcaaagtgacttttgccattcgttgtaaaaatgcaaaattacggcaatgcttattccttttaaggattgctccgacactttgtccaagccggtcataaggtgttctggctgaccacaatgattgacacttattgggcatccgaggatttccacggcgttggcacgttaatttaatgaattgaaaactaattaaaaaatgaatcggaaaatctttcatagaaatcatcggcccatctctgttcgcccatatgcccctccatccgggcgattggttcgcttttactttttttgttatctttttaaatttattccccccgccccaccgttcgtccaggtacacacagaacaccgccttggccctttactatctgttctccaagcgtggcatgggctcgcccgatttggtggtggtcgaccattccgcctcgtgcgtccccctgctcaaatggttcttcccgcgctgccgcgtccttttctactgccatttcccccaacaactcgtaaatttgggattttcaatattatttattttcaaaatacccataaatttcgaaaaaaaatctaaataaaaatgattaattattgcgaattagtcattgttcataagttaaatgtttccggatttgaataaattaaatctttgtcccgcccaaattgagtatttgccaatttccccttatttgttaggtcactccgtcccgctttttcctctaccgttggtacgcttatctgatgggtttggtggagggtcgtctgttcgaatacgtggacattgtgttggtgaacagcgaattcactggtcagcaaaaagagagagcattgcaacgtaaaaagttcccaaaattcaatttaggtcgccaatttcgccaagtaatgccaaccgtttcgaatgccaaaatccgcgtcgtttacccgccgtgcgacgtcgactcgctgcgttgcgggtgggtgcgtccgattagtcgtgcggaccgtccgcccaacgaacgataccttttcctgtcaatgaaccgtttttggcctgagaagcggctggaaattattatagaggcggctggtaataacccacaaacttttttggcatttcatttccattttcagctgagttaaaacgccgcgggctgcggccgcgcattcaaatggccggctctgtgatgccgcacattcccgagtctcgaatatactaccaagagaggcaaagtcactgcaaacagttggagctggacgacctggagaggtgatgatccatttaaatttaaaatttttcaatttaat

SEQ ID NO: 5239 - DNA, 1274 bp, Heterodera glycines
ccaactgatgaacgcaagttcgagctgtatcggcagtgcgattctgtgatttacacgccccccaacgaacactttggcatcgtgccaatcgaagcgttggagcagcgacggcccgtcattgtgaacaacagcggagggccagccgagacggtgttggaggacatcacggggacacgagtgagtaggggagggggggggggggggaatagggcgagaatgggttgaatgacgaaaagaatttaaaaatatttattattattaaataattaaagggggtcatagggatactaaaataactaattattacaaattacaaaccaacagaatgtgtatttctcgattttttagggtttatattgaaaaaaccgatcgaaccctttgtttggtttttgatacaaaactaaaaattaataatttaaaaatcaaatcacctgctgatcagattgccgacacttgcggtgttttgctggccaatgcaatggcatcgcacatgggccgcaaagaatggccccaactcgacaaggacgaactttacgcgaaacaggcaaacaaagcgaattaattaagccaatttaaatggctaattgccctcttttagcgcattcgcttcgatgaaaaatttagttggaagggattcggacgacgcgtggacgaagcaattgccgaattattttcggtggaccatccgccgacggaggaaatggcgcaaataatggcggaaaggcgtccccagcaaaatgaaactgtgcacgtgcacatcaacggggtaactagcaaaactaattatgccaattaattatttcctggataattcataatttatatgaatgaacactcccacaaatattcatttgaaaattcactaattgcttgagactttcctcagttacttcataagttttcgggccctaaaatattttaaatttttaaattaaaaaaaaaatttttttttttgactttgcaatttgtcccattactcccaactttcatctgctcccacccccattgttcagcacagcaaatgccaccaacagaatggcatttccgactcgaacacagacttggaacggggcatcattccccccagtcgccgtggcactctttctccccaacgtgtaaagtttctgtcgcccaatggcacgcatttgccaccgcagacaaacggaggcgaagtgccggcgacaattggcagcaaatcatcggcattttctgctgtccttacaaatggccatcggaacacggcacttcaccgacgccattcggaggcgaagggc

SEQ ID NO: 5240 - DNA, 7940 bp, Heterodera glycines
  unsure (1)..(7940): unsure at all n locations
gagaggaanattggggacgattttggagtcatttttatatcaaaatgatttgttagtttatgaattatgtataaattattattttttgcttattttgattaattattattaaaattttaaggtttaaattcttttctacctcaaaattatttcgttttgaatacgattaattactactattaattattaaacatgccattttgtttcaatttcaacttttctagttcgttttaaaatatttttctttaatttttccttaaaataaaatatatttttttaaaatatcgctactaaattgtctgcaaacgggtctatcaaacgtaacactataatttgtttaattagacttatgaatttttatatttatccagtgttttgaattatgctttggtttgttttttgaaaataaattttatgaatttaaattgattttttttggcaataaacatctgtgcattttccctaaaaaacgaaataatttgagaagagttattacttaaattttgggtttttaaaaatttaaaagtcgggttaagaaatttttttttaaattttttttctcccgaaaattatggtaagctgatcgtttatacattgctgcttgggagtctcggttcgccagctcatttagctttacttatggattttattaaataaaaacaaaattaaaatctaattttgtattattttcaattgaaataaattaaaattaaattttttaaaaatttttttgaatttttgaaatttcccggttggtcccggtccccggtcccgaagaaaaatcgaggtccaggtcccgtcttctcaggtcccggcaagtcacggtcccggttttggcaaacattcccggtcccgtgacactctagaataaatcagaaaatggaacatttttcacgtcaattaaatcctgaaaagttacactatttttgcagaaattttattaggtgtttaaggaaattaaatttaaaaaaatgtctttttcattatcaatttctctatgaaaaaatggtttttcttgcaaaatgaattttaccattttttcaattaaattcatcaaaatttattatcattcgaagcccaaaatgtttagaaagtaattaagacattgaaaatgtttagaatgtaattaaaacattgaacttttgtcagtgattgaacagtagtctgaaaagaagagccagcaatagaaaactccataaaaatcataattttttgttaattttatttatttttacaatttgatcataattttataagaaacagagtcaatgcgaaataaattttattcctccaataataacaacgtgacaaaatttcgaattgaataataaattcgttattcggcgaaaatggacgtggggggggcggggagttgtaagaaaaaagatcggattggaaaaatccacggaatcctgggactacggaaatcgtgatcgtgtcaatcagtttccggactcgagaattttattctcggatccattttttcaagaatcgagaatccgatcatttttgcatttggtgttgcgtacattaattatgccgaccgattattggtcttcgtcgtcgtctctgaacaaatggagagagagactgtacggcacggaaagagaaacaacaattactgtaattatgtggaaaatcagaggaagcttaaaaaagaagaagaccaaggacaattaaaggatggaattacctatgaacggattatgatagtgaagaagagatgttgacgagaaatatatgatgaagggaaaaaagccgagagaatggataaataaatagaaacatttagtttgacgtgcttttgttttggctccaagaaatatatatgtaaagcatttcatcgccataattaccccgatttttgatgaatctgttatcactcccaaaagatttcctctttttttttagtaaaatttatagaaatgtggtgtcatgacaactcgcacaaaaggcaactcgtacttttgcataggtgagatttaagctttaagcttaggcttaggcctaagctttcggctaggcctaggcttatgcttgcttggttctaggacgcccgtgcccttgcgtctcggggttttcctttgttcatttcttctcgttttcagtgccatttgctgccactccttccaaattgcttcctcaacatccacacactctggctttttaacggtcgactcttccgattttgtgcccgtctttttcttctaaacaaaaaatgtttaaataaattaagcaaaaaaaaaaaaattttctaagtggaaaatatgaaacaaaaatctctgagaccttttgtttgttcagtttggccacaagcttcgccaatgccttttcattgctaaagtattcaatgttaacaatcaaaaataagaattaaaatacattttgtctctctttccggccggcacattcaactttgcatggaagcaaagcaacaacttggcaatttggaatttgcctgtttcatccttaatgtgtgaaaatataatttttggtaaaactttctcaattttaccaaataatacttatttggtgatattttaattgggaaaactctaccacgattttcaaaaagtcaaaaaaatcatggaaacgcattaaggggttttagtaattgctgaatacgattcactcaatagtcattctgcacccctaactaaatccggaccccaacaaaaattcaaagaattcacagtaaaaatgcaaaaaacggacacaaattaattattagcccctcgggcaatttgttttttgcccgctaacgaacctccaacacatgtgccaatggcgacatggcagcgctgtcagtcgcgttcgggtccgctccgttcgccaaaatcatcatcgtgcacgcaagaggtgctattaaaagtgcaaataaaaattatttttaaatagaaaaacaacaaacattcaactaaatgtacatttttagttttacgctcaagggtttttttcgcaaacttccttgttaaagcgttcgtaaatactcattggtgccggctgctgctgcggctggacaaaaaaaagtttaagacaaacattaaaataaattgcaaaccccagcgaagaaacgaagaaatgcgtccaaatccatgaaaattttttgtagaaaatttgtaagctaaaatcaaaaccgaaataagaagagaattttatgtgaaaaaaggaaaacatatgtatgagaatgattgttaaaatgatctaatctggccatttttatgcaaaactgctaccaaaaacttttattcaaaaaacaaacaaatttttttttgaaaaatcgcaaaaaatttcgttttatgacttcaaagtgcgtgcaacattttcttaactaaattcaatgaaaatcaaaattttctggcatcgcctatcggcaccatggcgcccaaagttctaccattttcgaggggtcataattagggattccaattatatggaaatccatattttttcctggactgtgggaggcctgaaacgcacttaaattttttcgattgaaaattttgagtctaattccaaaaaaacaattatttcagaaacaattgtgaggaaggggaaatatacaaccccagcttgaaattacttttaaaatgatttgctttacacacacatatatatatagtgtgtgtgtgtgtgtacctgatccatcaaaatccccgccagattcttaattgctccaataatcccaatctccaacgatgttgtgccaaccggttcagtcggtgccttgccagtaccaagcgaaacaaaacactccagctcatactgaggttcctgaaaatgtaaaaattgaaaaaaactaaataaaactggtcaactgctgcatacattgtgttgttttgccaatgcattttccttgcttatttcatccaacagttccaggcttggattgtttgcgagcagacctcaaaatcatattttatattcactatcaatagtgaatgggaggggggaagtttgggtgcaaaaacggtattactttttagcagggatgggccaaattgaaaaataaaaagcgaaatttgcgaaactgaaaaatgcgaaatgaaaaaaagcgaaatgcgaaaagctaaaatatgcgaaaatgcgaaattttttctaccactttttaataattaaaatcataaagcaaaaatcattttttaaaattttattccaaatttaaaaatcaataaaacgcttttttgaggcgcgctttttcaaaaaaaacttgttgggaagagggggcaggcggcgccgggaaaaaatttgaaaatttgattaaaatttgttgacagattttcactaaaaaatgatcaaattttgtgatttttatcatttttcatgcatcgatagttaattatttatactaattgaatagtttctatttttgcctacctccatccatgaatttgtcccgactttcaaagtacgttggcgccgcagttgaatagcgcgccgctagccaaatgttggttttgtacgggtcgtattcgttgagcgccgaaatgaagttgcgaaatttgaccagtcggggaggtttttggccaacgtatgttgcggtagtaaacaatctgcaattttttttttgaaaattcattaaagcaaaaccaaaaaaattgaaaattttctaatagcaaaattttttcccaatttaaaggctaacaaacggacgggcttacccaattttcagccctctgaaaaaatattcagtttggcagagaccaataacaaatgttctgagtcatcaatattttaaaaatttcactgatgaccatcactcaaaaacaaaaaaaaaattaatttttcaaaaagttcaaaaaactataaatggctcttctgcgactatccaattttaaaatggatttcccaaaaactcacttaatgtttccacgcgataattcggccatttttttgttttcgccaaactgcgcttggaggaatgtttccaaattttgcgcgttgtaaccgatcagctgcgcccgggcgccaaacaccgaatccttcaggcgcaagtaaagtcggagtgcgtcgatcagtgagatgcccgagacaagtgccaacgcaacgatctgaaattcgcaatgtccaacatctttaattgatcagttcaaataatttttttaattggaaaatgcattaacaaattttcgaaaatttctcttcaccgccaccccccccccccctccaatgtttgcatttttttgaaatcagacccaaaattgcacaaatatgatacttagcaagttaaaactgataattttaatttttgctctcaccgctccggtgctcgtcccgataatccaattgaagttcttttgtacgaagtttttttcatggccacccgcttgcaaaccctcgccgtacatcagcgactccatttcaattaacatctgcaaattcgataagggataagcatagcgaaaaatatggtggtaagccgctctattgcattgacatgaccataaaaaagacacggccaataaataattttgcaaatgaagtaaatcacaactttttaaagaaacactcaaattaaacattctttatattattcgataactctattaggatgcaaaattttaaagaatattctctgtttcggaaaatttataaacaaaatgcttagataaaatttttttttttgaggttttcgggcaatgacttttttgaatgatattggtgtttattttggatgcttctttaaaaaatatggtttttatggaagttttttttaactgtttgtcaagaaagtaaaccccaatttttcatttgcaggaaaaaattatttaagtcgcaaattgttaatcgaaaaatttaatttttaattaaaaagtcccgaatcaaaacctgcactaatacaatgcctcgaattccgccaccgtccagtgaaagtgctcgaacgcccgtgcccttgcgtctcggggttttcctttgtttatttcttctcgttttcagtgccatttgctgccactccttccaaattgcttcctcaacatccacacactctggctttttaacggtcgactcttccgattttgtgcccgtctttttcttctaaacaaaaaatgtttaaataaataaaagcaaaaaaaaaaaaagaattttccaagtggaaaatatgaaacaaaaatctctgagaccttttgtttgttcagtttggccacgagcttcgccaatgccttttcattgctaaagtattcaatgttaacaatcaaaaataagaattaaaatacattttgtctctctttccggccggcacattcaactttgcatggaagcaaagcaacaacttggcaatttggaatttgcctgtttcatccttaatgtgtgaaaatataatttttggtaaaactttctcaattttaccaaataatacttatttggtgatattttaattgggaaaactctaccacgattttcaaaaagtcaaaaaaatcatggaaacgcattaaggggttttagtaattgctgaatacgattcactcaattagtcattctgcacccctaactaaatccggaccccaacaaaaattcaaagaattcactgtaaaaatgcaaaaaacggacacaaattaattattagcccctcaggcaatttgttttttgcccgctaacgaacctccaacacatgtgccaatggcgacatggcagcgctgtcagtcgcgttcgggcccgctccgttcgccaaaatcatcatcgtgcacgcaagaggtgctattaaaagtgcaaataaaaattatttttaaatagaaaaacaacaaacattcaactaaatgtacatttttagttttacgctcaagggtttttttcgcaaacttccttgttaaagcgttcgtaaatactcattggtgccggctgctgctgcggctggacaaaaaaaagtttaagacaaacattaaaataaattgcaaaccccagcgaagaaacgaagaaatgcgtccaaatccatgaaaattttttgtagaaaatttgtaagctaaaatcaaaaccgaaataagaagagaattttatgtgaaaaaaggaaaacatatgtatgagaatgattgttaaaatgatctaatctggccatttttatgcaaaactgctaccaaaaaatttaaaaatttcaaaaaacaaacaaattttttcttgaaaaatcgcaaaaaatttcgttttatgacttcaaagtgcgtgcaacattttcttaactaaattcaatgaaaatcaaaattttctggcatcgaaaagaattttccaagtggaaaatatgaaacaaaaatctctgagaccttttgtttgttcagtttggccacgagcttcgccaatgccttttcattgctaaagtattcaatgttaacaatcaaaattaagaattaaaatacattttgtctctctttccggccggcacattcaactttgcatggaagcaaagcaacaacttggcaatttggaatttgcctgtttcatccttaatgtgtgaaaatataatttttggtaaaactttctcaattttaccaaataatacttatttggtgatattttaattgggaaaactctaccacgattttcaaaaagtcaaaaaaatcatggaaacgcattaaggggttttagtaattgctgaatacgattcactcaattagtcattctgcacccctaactaaatccggaccccaacaaaaattcaaagaattcatagtaaaaatgcaaaaaacggacacaaattaattattagcccctcaggcaatttgttttttgcccgctaacgaacctccaacacatgtgccaatggcgacatggcagcgctgtcagttccgttcggatccgctccgttcgccaaaatcatcatcgtgcacgcaagaggtgctattaaaagtgcaaataaaaattatttttaaatagaaaaacaacaaacattcaactacatgcacatttttagttttacgctcaagggttttttttccaaacttccttgttaaagc

SEQ ID NO: 5241 - DNA, 1525 bp, Heterodera glycines
ctttctatggactgaacaacgcctaaggccaaatcatacatctaaatttgacgacaacattccgaacggtgcagaaaaaaatttacaccgacgggcgaggggttgcaaagggggatgtactcattgacggatgttgttaactttgaacgaacgaggcaaatgacctcgacatgtactcacggcggaggggacgaattgaggagtttgtacccagggtaaatgcccttattacgaaggaatgcggaggataaaagtaccgaattgaaagaaatgagaaaggaaaattaaataaattatcgcaaaaagaatgaatttccaaatcgattaatggattgaatttaacacaattttaaatgaaaaatgtaaaaaaaaaacccttcaccaaaagcccataattttaacagtttttccttttctgcctttgtctcttttgtctcattctttcttcttttctgtctcttttgtctcattctttcttcttttcttccccgtcatcctctgagcaaatgacaagccgacgttttggcaaagtgcaggcttcgctcccgcccgaccatgtgctgtcgtctgaactataagcctttttgcgtgactttgccgacgtagcagcacatggtcgggcggaggtcgatggcttttgtagaaatggcggcagtggtgggggaggaatttgcgacagcaacgccatcggcggaacagcagatggttgatgagcagcttgaaaacccaaacgcggatcggtaggacgagtaacaattcgatgaaaaagcgggactggctgcggattcgtaggcgaagtggcaagagtccggtgaagaataggacctaaatagctagctcatcagtaaaaaataaaaaagattatgttgatggtcgaacggcagtaccaaattgcgtattagagttgagagcagcagtaacgttggagacagcgtcgtcggagcgtggtagcaaaggaacaggagcaggaagatgaggcacaatcgtttgttggccaagaagcggcggcggcaccacaatcggtacatttggctcatagttgatcacggatgtgaatggaacagacggttggccacgcacttgcgtctatgattttaagcattatattttaatggtgaaaaatacaattgacttacgatttggggaattgccaaaaaagttgttgttgctgtcaccgacatccggtattgacctgccataacagcgtttcgggcattacggtagtcagtgcgcagccgaattagcgcccgttggcgctgtacttcttcttcctttctgcgctgccgccttcgccgcttttcttcgcgcagtcgctcgagctcaaggtcagcaggttgtgctcttttgcgcccgcggtttgcttgggccggaccgttgttacggacagcgctgtagttgttggcactcatttttgagggtgataatatactgcctgttactgtaatatgtggataagattgaaatttacgaactgaacatacgcaagggtgggttccgtccatcataaaaaatgggatacgttggg

SEQ ID NO: 5242 - DNA, 1204 bp, Heterodera glycines
  unsure (1)..(1204): unsure at all n locations
ctaatcaaaatggaccattttgcctgggggcaataaagcctttccgaatccaaaatgaccccaatgaaaagcgggatttaatgcccagagggcaattgatctttctttaaatgactattttgcctggggcaataaaacattaccgaatccaaaatgaccccaatgaaaagcggaatttaatgcccaggggcaactgatctctgaattaccattttgcctggggcgatgaattcagcatataaaagacattgaattagcctatgtgtcgcattctctcttaagcaagcagtgaaaatacaatttattgacaacccatcgatggacaacataaacaataattgctcaacagagtaacggtgctcaaaagaacaaaatttggttgctggacaatcgacgactgcagaaaaaaaattgctggacgatccgtcaaataagttgtcggtgggttacagaatttgcgaaaagtttaattattgaatttggccactgaatttgctttaagcgttttagaaaataaaatcaatatacgaaacacaaacacaaaattttttctactgaatgtccttaaatggcaattcggtagtcgccgaactttccgcaggggcatcagcgcttaatagcgaaataaggcactgactttttaatgtcatcacattaactcttgtgaaaagtttttgtatgccatttcaataaacgcaatcttttgtagttagaaaaatacaaaaaagaaattgtcgctaaaatttttatccatggcaaattagggatgtttattttgagatttaaaaattacgttaacgtttcagtaccagcttttttcttgacaaaccatcattggacaacaaaagcgagcattgctcaacaaagtagcattggttaaaacaacaacaaattttggctgctgcacaatcgacgacttgagagaaaaattgctggacaatccataaaataaccgccaatcgaaccgtgagagttgtcggtgggttacagaatttgcgaaaagtttaattattgaatttggccactgaatttgctttaagcgttttagaaaataaaatcaatatacgaaacccaaacacaaaattttttctactgaatatccttaaatgggtaatttcggtagtcgccgaaactttccgcaggngcatcagcgcttaatagcggnaataaggcactgaaatttttaatgccattacattaactc

SEQ ID NO: 5243 - DNA, 3675 bp, Heterodera glycines
gagattaaaaatattttagccttcggtaccacttttttctaggaaaaaacctttattggtactgaacggtcagacagaaaacgaaaatcttaaaaggacaactcagtaccacttattgcttgggaagaaaatcaaaaatattttttgtactgaatactcagacgaggacaatacagtaccgccttttgatttttaacgaataagcattttggcgcccaactgaaggctggcataaattgctatgaagcaaaaaccataaaattttgtacttaattgcccgactgggacaaattcagagtataaatgtctttactgtctcgacttggtcatagaacttgagatttatctgaaaagcttcgtaatcttaagtacttcttcaaatggaccgacgattttatgagatcgataccgacttctcgggtaaaatttgcccgcagaaactccaacgggcattgacaaacggcacctctcgcccttttaattacgagacttgccgcttgctcgtgcttcagttcgacccaaaccgagcaggatttgtcgatatcgagagatttgagtcgctgtggaaagttagttagtttttgtacagtcttatctcttatctgtttttcagcatgtaaatgattggaaagtagacttcacctgtcttagtgaaaatatggggtttcttacgatgagaaagtttcaacgagcattatcccattacggtaataaaatgtgtaggcttatgttgttgcgctctttaggatataattttacaacaccgtttctgcgaattcttttgcaccatttcgatcgaacacagacaggtaaaggtttaaaattatggtggttaccaatgcttaatcaatcaatatgtaccggaaggttttctatatttcgacgacttcatgcatatgtgcatttttttgcaacgactgacttcacctttccgtcatgtagacttagaccgggacggacgcgttgacattcgtgaacttagcctaacatttataatcgtttcttgggtggtgtttagatttcgaagaatttcttttaatgattatggcaacaaacatctaagtgttattccgctacttatcagctttgaccttatcaagtcattttatctttaggaccgcctccttgctgcccgaaaattcgacataaatagcgagagatgattagctttatttcacaattttcaccgtgcataaacgcgattaatctttaaccgagagcgaaccgctgttgattatttctttctacctttgctaacattacaatcaatcctcgcaccttctcttttctcaacagaaactcaatcaaaatgagcggactgaagcgcttccaaatcatctcatctcctaaaaaaaggacggccgacgactttccagccaaccctaaacagcttcaggatatagttaaatttaattcacctggtctattttatgttcgtgccaaagttgctgaccttcaattttccttatacaaggtattggttttccggtttatattaatagttgaatgagtttaggcgtgccctttaaaaaactttggcaaattatgtaagaaaaagcttgacagtgaaatgtattgcgagagttgcgcacatcatgtcaagaaggcaagcatcagtctctacatgaaattagagctccgtgattgtgaagacccggaaataagccaaattgcgactgttttttccgttgtcgcggaacattacatgaaccttaaggtggagcaatttgccaatatggtagatgagcatccagaacagctggaagcgttgctcaaatctaaaattgagcagactgtcattgtcaaactcaatataaaggtatccaaaattctctatatgcttgctaaaaatattgccattttgagtttaaggcaaaaggagagctcgagacacttgactggatcatttcgtccatacagcaggagaacggggaggaggggatgccacaagaaggaaaaaagtccaccgacgcaaataccgaagatggagaaataatcgagatagacggcccgctaaaaaaacgtgtagcaaaaaagaactgagtccaatcaattggcttagttgctatggcccattatctgtaggaatctttgacctaatcgatgttaatccggataaatattatagagagggaaaggaaaagagacataaatcatacatttttgtttttaccaatgatcatatatttcctttgtaaatttcaagctaaaatagttttcaagtaatcacagcttaacctcgatgaaaagtgggccgtccaccggatcgaccattcaatcatcatcgtcaagagcgagcgataagcacatcacgacgactgcggcctcatccactgatttcattaccaaacggcgaaggtgcaatagttgggacttcaagacaatggcacactttgaggcaccgaaggcggatgagaaacagcctcagcagcgaacaccattgtttgagcaaaaacagcactatgtgcaccgagtggagcggttcgctctgcagcgtcatgtcaccgagtttgtgctcaatggtcagtacgatgaaccggaagaagcgcttctccgcgcttttgagcatatcattgctcgtgcagtccggaacgcagaagactcccagcagcagacagatggggcaggaatatcagcgggtgacggtgcacgtcgtcaacagcgagtcaccagacttggaattttgcttaacggccgaggtgggaccgatcgggagtgtaatgcgctcttttgttaatggaaaattttctatgcaaacaccagggctaactgacccaattgtgctgcctattcgcccgccggagcaaaacactgcggaagtgcttatggctgagttggacaagcttggccagtcggatggcgatgaggaagtgcatggaggaggaataagcaaacgttcgctgttgctcagcgaaccaatagaagtggtcatcacatgtatagcacctccggttggtgcagcaccacggttctatcagtatcagcattggggctatgacgatcggcaaatgatccgtgtgacaaacctggatgacaacttttgtctattccacgcgctgattgccacccgtgcttacacagaccaagaatttttaaagacgacttcacaacgacaatcggcaaccgatgcagatcatgggcatcaatcgaatgccgtgccagctgagattgcacgaagagtcatgacgagaacggacttttgtgctggatatgaagcactgaaccgtctggtgtccaaccgtgaacggatgaacgctgcagtgacggagctgatgcgtgctgcagacattccagcagaccaagaggcgtatggactggagcatctcgaccaaatacagcaattatgggtcagttgttggtgttggaaatgaagctgaacggaagtgcattaaacataaacacaggatcaaacgtaccctggcatctatagaattgtactgttcgaggatcactccgaggagctgcctcgtccgatttggaaaggtccgatgggccggcgcctctgtgtgtcactgtttgtatcggatggacattactacggtatcaagaagatacattgttttttcaaactgggccgaaaatattgcatggactgtgaatgtgtctacacccgtgacactaagcacactattacgtgtaagagtcgctgcccccaatgtgctaaaggttgatagt

SEQ ID NO: 5244 - DNA, 3311 bp, Heterodera glycines
tttaattagagttgagcggtaccgggaattttgggcaaaaccgggaccgggaccttttcgagttgaaaaaccgggacttttttgctgggaaaaccgggaaaaacagggaatttcccggtcccggtcaaaaccgggacttcggtactcaattttccgtgttcaggtcccggtcccgctcaactctagaattgagtgaaatgatggaaatgcgttgaatattccttacaatcaatgtagaaaaattcttgttttttttgtgtctaaaaattcattttttttatagattttttaaagtttttttgttgatagaattttaaaaaaatttgcaccaaaacatgaaatgactaattccgctaaaaagttttgtagaaaaaataaaataaaataaataaatatacaaaaatatgtacggttaaataagttaaacacttctgccttttgtccgtttttgttttgcttggttccaatcccattcatgttcttcatctactggtgatgttcgtcgatgtttctgactttctgttgtaaattggacagatttttttgatttcgttttattgcctaaaaatttttaattttccattattttaaaatgaattaagttgactgattaatttttattgaaattttgaaaaattaattaatatttattcttgtttaatttcaattggctctgtcttgatttcttttagctcctctttaaatatcttttcatcattttggctttctttttgcttctctttgattattttttgacctctttggctttctttttgcttctctttgattattttttcaccactttggctttctttttgctcctctttgattactttttgtccacttttattttctttttgctctgttttaattatcttttctccacttttgctttctttttgcccttttttgacttctttttgtgtcttctttttcttcggaatttcttcttctgttgatgcattactacttttgcttaattcttctccgttttgtctgtcattaatttgttttttcttttttataatttcttttttctttttaccatttggtaatttctctttctttgttgcctcttcctttttattgttagtgccattttggatatgccctaaaaatgaaaacataatccatattttttgaaaaccctaggcctgcctgctgctggtcaacggtgttgtttttatgctagatttggacctgattttttgaggaaaaaacccagaaaaattccggttccgaaaatccaagcctggaccaaggcctagccacaaacatattttaatcttcagataaaatgctctgtaattaatgctcgttttttaattgattttaccgcatgtctttttcaatagcttcaaattgttaattgaaatatctaattgttttgctattgcaacatccgaaagtttttcttctccatttttcaatttataatattcggccatgatttcctctctttgcacatcgtttagtcgttttcctaaaattttaaatttaatatttttttagcccataaaatgatagcattaaaattatttaaataaaataaaactttgtaatgaaaagcgtcgtttccattttgtaattgtgccaatgttaactccgataattttcgaaatcatttctgcccgttgttcttttgaataatttgcgaattttgtgttaattattttgctggtttgagcatagttttcgattatttgaactctttcttcatcattatatcttttattatgttttgtttctgtaaataaattaatttttaatgtaaaaaatttacaatgattaaaattataattatttcaagaaaattaaacaaattcaatttttcgaaataaaatttacacattttaaatatatttttataggggccaggaccgttttggggacgttttcgcgtgagtgcctattaggactgaaattggtcggatgtgtgccgaacatacatttcgacctatttcgaatcccaaacccgatttcaaacaattttttgcttttatttactcgaaagcgtcctcatttttaaaagattaacaacttcaagtattgacaacgtgaatgagacacagaatccgaccatcggcatcacgacatttctttaatttttttctttttccggggcggaggactcttcttttcacatacatatccaagagattaacccattggaaagtcaactgttttgtccaattttttgccgtacaaaattaatgccccaaacattttacataaataactcaattttatgtagaaaaaattctgtaataggggttggaaatttttttaaattatgataaataactctgacagaaagagagaaaacaattttagagtgaaaaaattttccaaactataaaaaagtaaaaattcgcttaccgtatatactctttttatatgccatggtatattatttttcaacctcctcagaagggggtagataattggaggccggcagattaatggagactgggagattatttttcagctgatttatttagtggaaaatttttgaaatttttttgaacatgtcgccaaaaatgtcatcgcgtcaaaaaaaaattatttctattgcatttctgttaaacaacttctgagaattgaccccaaaatggcaaaaatgtgtcattttcttgcttccaatatggataaaaattgaaatttttaatggtgaaagatggacgaaacgatcacgaagaagccttttttatttttgtgcacagattttgttcgtaaaatgagtcaaaaaattagagccataaaaaattggtctcgagtctcgggaaattttcggtctcgatagtgaaaatttactatttcgacatttttaggaaattcctaaacaaaaatgcaataaaatcaaaaaatacacccctaagaaacgacctaaacattttggtaatactttggtttgtcccccctatttttcaaaaaaaataaaaaaaatttaaaatcgcttaaaacatctctcctggggtttttggggccactgatcacgaatccggcatccgtttcgacccatttcgaacccggacccaaattcgaacaaaaatcgaaaatttatttttcaccaaaattcacactgcagcgactcgtggtcacaaaagacgttcaaaatgaaagagcgacggacaacggccaatagattttgaatggagaatcgcacgactgccaacgaacgaccatttcgtgtagggttgcaaccccgacgtcggggttggaaaattcggggttgtcggggttggaagtgtcggggttcggggtcggggttgccaaatcgttcggggttcggggtcggggtcggggttttt

SEQ ID NO: 5245 - DNA, 3404 bp, Heterodera glycines
tttaaaattcttcccacaattttttttttagttaactatttcgagattttccgtcactaaaagtagcgaccctactctgatgatgatgcagggctggatggagtcggagatgggaacgaattgttcatttattagcccctcttactgttgaattgagtttaattttttttttggaaaatgtgccaaaaaaaattattttaaaaattctatttatcccccctggcagataaatggagactggcatataaaaagagtatatacggtatatgcaaccacgcgaaaatggccacgcgaaaacgaccccgaccgtacattacttatttgacttttttcattacattttacactttgaggacttagacttttttccatttctttagtgctttttggcaaaatatacaaaaaatctgaaaatatgtacaaaaaaatgtcccaaaatatgcaaataaaagtccccgacttttatgcgcaaataccaaaaaacaaaatattttcctactatatagagcagggttaccctttgtccttatttgtaagatttgtccttatttaagctctttgtccttattttagtcttattttttggattcagggagaaatttagatttttaatgataatttttgaaagaaatgttttttgaagcgaattaatatgaaaatcttaacaagattcagttaaatattcaaatttttctctcggcggtttcttattctcttaaaaaaattagctcaaaatcgtaattttgtctttttttgaacaaaatcgttaagaattcgtattaaaaattacaaaaatttttccggcagtgtctattagagctgtctgtatctgttcttatttctaagaaatgttctgatttggggtagtgtcttattttcatttaaaagaggaaatttctgaaaaatttggctaattcctaacaaaattcattaaaaattcttaaaatttcccccagcggcgcctatcggcaccgccggccccccaaaactcctattttttctcttaaaattagcccaagatcgcaaattttggtcattttttggacagaacttgttaaaaaattgcattaaatttttaaaaaatttccccgcggcgcctatcgacaccgccggactctcttccctcacccatacccaaaaatttttcggaaaaatgcgccgaaaaaattgttaaaaatatgtttttttaaattttaaatgcactgaaatttaccaattgcttatgtttcgacaaaattgttaaaatcttaaaattgattttcggaaatgtataaatttctcattttaagccgaaattgctcatttgtcagaaaatagttggcggtgagtaatgcatggttttgttgaataaaaatgcgaatcaaagttttcgtagcgtgttttaaaaaatgtcctcatttttgaccctaaaatcttatttttgaccaacgatgttcttatttcgggaaattttcaagggtaaccctgataaagagcatgggaaagccagaaaaaaaaatttgcatatttttgacagccctgttaatgacttatttaaatatgaaattaaattgtttgaatttgttgactgtcattaatcggtcagatatgaaaaaatggcatttctgtgatgtgattcaaaaaagaagcttattgttcattctcatgctctaaactcttttcatcattgccaacaaaaagaaagtggtgcctttttgggtggtctctagcaattgtccaaacattgtaaaataaaattatggatgggagttttttgcagaataatatttcgattttaaataagcttttatattttaaacattcaaaaaaccaaattacaattgaagaagaaaagcataaaaaagaaacgaattggtcaacaattattgtatgttcttcatccgagtttccaaatcgaacttgaaaatgggcacaaagttcgcctcaattttgtcaccaaaggtggccaaagtaacgaatggataataaggatcacgagcaaaagatcgaggaacgaaaaaatcggagaaatctgtgaaaaagttaagcgatttccgacatttcaaatatcaattagcataataattataagttaagattttgtttaattatttgccaacccaaacgaagtccattcctcgtgaaaaagatctgtcgcgtgatggaattaacaccaattcctacggtatcgccaacaccgtaggaatattcggcaattgatccctttctttctccgttaatccaaacacagccattactttcatatgcataagtgtccttttcatgtcgcactgattgatacgattcatctgtctgctgtataatggcgaatccaaagctgatgagataactgtaaaattaaaaataaaggaatagcaataaaaaacaaaataaataaatcgcatactcattcattttttcgattgaaatttcgtagtaaaaaatgtcggaaaaattattgcccagccaaatttcatgttgagcgaagacggaacgccaaccttttaaggagaaatatacatatgtataacttaatttgtaagtaaattatgaaaaatacctttataatctcccttataatggacaatgagttttttgtcgccaatgatttcgagtttctcatcacaatcattggcaacccaataattttgtttgaaatttaaaagtgccttaaaataaataaaatagtataaaaattttgtttttacccttacaaattaattcacctttctctgcttcggttctttcttcaattgactgatttttttcaaaagaatcttccggtcattttgcatttctgagaattggtccgaagttgctaaaattaattttaaaaaggcaattaatttaattaaataaaattatttttatttttaatttcttctcctgcctttttttgctgcttctccaattcactgattttttccaaaagaatcctctgaacattttgcatttttgtgaattgttcctcaacagcttaaaatataataaattatttatttcatatggactaaatatcatattaatcaaacaactcaattgtgatactgtatcagtcagtcaaacattttgcgtccgtaaatggtaatttattaattttaccaaattattcaaataaataattccataaaataatttactaattcctttacttatttatttaccaatgttcttcttttcctgttcaattttggccaatttttccttcaatgcgttctgttctccaatcagttcctgctgctgctttaacttttgttccttctaaattaaaaaaaaatgttggccaatgttttttaatagtttttactatattttttaaacaaaaacttacattttcgagttccaatttggccattttcaattccatttccatcttggcaaacttttcacggaattcctaaattaaattaacaaaatctcttttg

SEQ ID NO: 5246 - DNA, 9351 bp, Heterodera glycines
aaaatatcgattaaatttaaatattcttaaaaattagtcaatttatgtcaaaaataagcaaaaaagcgaaaatttcgctttccaggtttatttttcgctaaaatgagtgaattttaagctatatcttgtttttttcttctaaaatcatttttaataccatatttagccatttttgaaagttttactttgcgttaagcgaatttgaaaaaattttgggaaacgtaccctcaattgggaaaaattgatgtccatatttttgcaaatttatgtccatatttcacgatttcttgtccatgttttgtggccatatttcgcgattttatatccatataattacaagccttagtgatcaaaatggattttgttatgccttatgataattgagttttctgaaacaaatctgaaaaatctgaatcaaagttcgaaaattttttggacccggaatccgataatacattattagccctcgaacaccttgaaacatatttgattagcacatatttttggcatttttttggcggttttagcacataaaaattcggtacttttctattcacaattcatttacaatttatcgtacaaagaatgtcatcctgatcagtttgaacaattatagcagacaaatatgacaagtgaattcaattatgagaacaaatatacacagcaatacatacataagacataagtgatcgaattccttatgaaagtcggcacatccgtccaattcttttgatcagcgatttcctctctcatccgaccgatcacatccgccgctgttgctgctcgttttgttgcctgaatttttgtacttttttttaaaatcaaaaaacactttttacccgtcgatgttctccctttgctgctcagccgccacggcacggaaaatgtctctcatttcggcattttcgctttcttcggccaagtcgcgcgcccgtttgccttaaatgggagaagaaaattaattacgtataaaagtaggaggacaatttgaacattgtacccaccatcagtgccaatttggtcagtgctcgtgccgatggccaccaaatgccgtgccatttcagtccttcttttcttcactgcgcacatcaacgcgttgtatccgtccatgtcggtgtggtcaaggttggcgccacgttcaatgagaaaattcactgaaaaattaaccgaaatttttgacacaatttttttcctcaccaacgtccacgtgtccctcaccgctagcgtctaacagaggagtggtgccgtcgattgcttcctggttgacatccgctgcccattcgtccaccaacagacggcacacttccaaacgggcaccaatggcggcacccaaaagagcaaatctcatccctgaaattgaaaaaaggggaatattttaatccaataattagggggcaattgtaggtcaatacacagtacccatgtcctctcatttctttaaagcaatcatccacggtgttgtaatcaattgttatatttgaacagttaattagggccatatgtttatgatataatccagcactaattgtagaaaaaaaagttttgttttgcggcataatacacttaaattacttgtcatgctttccactggaattgaagtcgtatgtccgccagaaaatttgttcacaaattcggcattattggttgtttatttaaagagtgcacacttcttccctcgaaaaaataaaaaaaaactttaaaactatttaaataagcaaattttaaaagctctttttttggttaacagagagaaaagttatgacctaataaatttttcggcgattttttggttaggctacagaagcagcagaattctgctgggatggggtcaggttcggattcccctttattttcaaattcaaaatgatttttaatcgtaatccacgctaaaatgacggccctaaaatagaggtgtgaagacactagtgaataaatttggaccatcttaagaaactccctcttcccctatcggttcactttggttggcccctctcttttgggccccaccatgtttttggctatagcttttttcttatcggtaccaaataattaatgtaaaatgggtacttgttaattatcggtgtccagattttcaaaaatttttttttagataaattcgttttataggttttcggggtcgggaaaaccgattctggcatctgttttgacccaattcgaaccccgaacccggattcgaacaaaaaagtcaaattccatttttcaagaaaattcacattttatgcacaaaatcgcttcaattatttcaaatttgtatgtcagaatcggttttcccgacccggaaaacccctaaaaatattttgagcaatgaacgtgaattttggtgaaaaaagaattaggcatttgaaaatgtatgtgaaatctgtccggtaagctggaaaagtacctgataaacatcaacatcaaactgctgaataaaaagagtgatgaatgaattgatttttgaattgattggattgcgaaattggcaaaaaacagtcgtggtaaaaaaattaatttaaaatttggtcattgcataatgacatcaccgcgaacatagacatggaactgctgctgaaatggagaaaatttttgaggacagcagggttgggattggaaggcaaattcgggaatggtccaattttcgtattcgtaaaattttgaaaaaaatgggatttattcctaaactcgggcataaatccatgttgatcactgatcaattccaacgaaaaacaattttttaacttcatatttttggttcaaattttgttttgaatgtcacgaaaggaagtgaaaattttcatgcaaaaattcaaatttttctcataaaataatttttcccgtttcccaccgcgggattctcatttacaatttatcgtacaaagaatgtcatcctgatcagtttgaacaattatagcagacaaatatgacaagtgaattcaattatgagaacaaatatacacagcaatacatacataagacataagtgatcgaattctttatgaaagtcggcacatccgtccaattattttgatcagcgatttcctctctcatccgatcgatcacatccgccgctgttggtgctcgttttggtgcctgaatttttgtacttttttttaaaatcaaaaaacactttttacccgtcgatgttctccctttgctgctcagccgccacggcacggaaaatgtctctcatttcggcattttcgctttcttcagccaaatcgcgcgcccgtttgcctgaaatgggagaaggaaattaattacataaaagtaggaggacaatttgaacattgtgcccaccatcagtgccaatttggtcagtgctcgcgccgatggccaccaaatgccgtgccatttcagtccttcttttcttcactgcgcacatcaacgcgttgtatccgtccatgtcggtgtggtcaaggttggcgccacgttcaatgagaaaattcactgaaaaatgagtgaaaatttcgaaatttttcatacacacacttttttcctcaccaacgtccacgtgtccctcaccactcgcgcctaacagaggagtggtgccgtcgattgtttcctggttgacatccgctgcccattcgtccaccagcagacggcacacttccaaacgggcaccaatggcggcacccaaaagagcaaatttcatccctaaaaaaattgaaaaagggggaaaatgtattaatccaataataggggcaattagagacaaattgcacccgtgaaatccgtctgttcaacaatggcaccatgtgaaagcagcaagcgtacaatgtcgatctaattgtaagaaaacacgagaaaaaaaacagttacaaatcatccatccaactcttccacctgtcccgaaaaggaagtgacaattaatggcgtcattccgtcagtgtccgcgagattagcgttggcgccattctcgacgagaaaagtggctgaaaatgggaaaacattgtggcaattacgcagcggcaaaacggcatccattcgagattgattcaccgatctccaaattgccattgaaacatgcgcacagcagtggcgagtggccagagtccgtgcccatttcaatgttggcaccatgggcgatcagcgcacggcacagctccaaattgacaaaaacgacagcggcccaaagcggtgtcacatctgcaaatttggggggacacaacgtttaaataacggctcaattgcattctttatcagtccaatcttcattttctttgcccataactttttttcggtacttttctgttttgagaccccccccctgaaattattttcaaagaaaattttcaattttccccccgttttttgaatttttttattttagtcataaaaaacatgttttaatgggctttctggatagactctgatcacggatttactttcttagtataaaacaaaaatgctaaagtccggccaattcataaatacaggaagaacaaatactgacaccaagaaacaaaaattatgccaagaatgttggcacattgaccaagtaaggttatgtatgagcaaagaaactgaagattgaactcataaagagtgcatatagccaattctgctgctgtttgctactcactcatgttcaagccgttcagttggccaatcatggtctgatgcggatcagcacccttctccaactgaatgaagaaaaatggggggaaatcaaattgctgtcgtcgaaatgtcggcggaaactttaccaagaaaacagccgtttctgtgtgccgattcaaaattgcgttcacgagagcgggccgagcatgttggacatccggttggttcatctccagcaaaatgctcagctcatccgcgtccagcgagtcgaccagcgcacgcaattgtccaatgtttccctggttgacgaaggcgaagaattgacgagtgcgctcctcaaaattgtcttcctcatcagcagccgcgacggaagagccaaaaacatttcccttaaaattgaaaaaaaaaaaattaaattgcattcaaaagatttaaaatttaaaaaattggggttaccattgcctgccgaaaatggggggagaagacaatgagagacggaaaacggagagcggagaatgaatgaatgggaaagggaaaaatgcaacacttttatactccgtcgaatctcgctcgaacaaaaaatttcggtacttacataccagcaggggtggtgggccaggccgttttcgtacgagcacatgtttttggctataacttttttctttgccaaccaaatccaatgttgttggtatcattcaagagcccttcagatgctctattagcctgcaaaattctaaaaaaaaattgttaagtttaaaaaaagttcgagccaaaaaagttgaaaatttggttttaagaaggcgtcgaatacgaacgacaaaaacgtcgctgtgccaatgtttatgatttgttgtgccattcttttgaagtattgggaccgcctcaaaaaaccaccaaaacaacgaagccatcgcaaaattgaaaaagtgccggaaattgtcttaacaatttgccccgacgaaatgtcatcagacaaccaaaatgaagcagaggcgaagatggcaaacgcgatgtaaaattaaatgccaatttcaatttttaattttgttttcccttttttcagctttatctccgccgattgttggctttgtgtcttcgatttgcttgcgccttctcaacttggcctcggaattgcgctgatcagccaccgttttgacttttacgtcgacgaacatttcaaaacgcgaaaatggacattggcatttattcgaatttggcacaaaattggagaaaatggcacaaagaaaatggaaattgtcaattttaaatggaaagcattgccaattccgcaaattcaaatgtcacgaaaagtcatcggattcaaacggatctacatccagtaaaattgacactaataattagaatttaggcaatatttccattttcacagatacatcgaccaaaatgtcatcgcttttctccaccgttttcgccaacttttcgccgcctgtcaaatcaatttgaacatccaaacggacaatgatcgcatttcggagttcattttgcgcaacatttggccaatgctcgggaaaaacattcatggcattgaaacgtccgcctcatttttccatcttttgcgacaaatggcgccatcaattcttagcgactgtccatcacttcgttttgtcattttttatgctggtgatttgttcgccgaatttccgcccgatgacagtgccgcggcatcggatggacaatctgtggccaaatggcttttcactccacgtccagacgatgtgccaaaagtgttcaaatgctggttgttccccaaaaacttacatttatgcaacaaaactagagctgacaaatgagcgggaccgggacctgaacacggacaactgagtaccaaagtcccgggtttttcccggttttcccagccaacaattcccgggttttcaacccgaaaaggtcccgggtttgcccaaaattcccggtcccgctcaactaaacaaaaccaatataaatgcactacttccctgagtttgtttggcgccaatgctttggtgatcgcaaaaatgttataattttttggtggcatgcataaaaatgaattttgaaaaattgggtattttcgattttccggggttcggaatcatcggatgtcagattcgtgcaacggcgtcgaaaacttttaaaaattgttttattatttttcaaaattccacaaaaaaaaatcagaaaagtacggtattattttgatggacagttgtgatcggcggcaatattttagcctccatttttttcatcaaaaattcgtataaaagacagtgaaaaaaggcaatgaccgtcatttttttgtacaaatattttggccaccattcatactgcggtggccatgcaaatgctttttaatgcccttttggaagccatggtttaaaaaggaatctccggactccataatttgtatttcatttttactaagctattttcaaatccgtcgaaaactatctttaaaatcttgccaccaacaaaatgtcagaccgccgaaaagaagcggaggaaaaaatggaaaaagcaatgtaaaattaaaatttaaaatgccaattttcaatttttaattttgtttccctttttcttcagtttcatctctgccgactgttggctttcggtgttcgatttgctctctccgcgtaaacttggccttggcattgcgatgatcagtcaccgatttgacttttacgtcgatgaacacttcaaaacgcgcaaatgggctctgaaatttattgaaattcgaagcaaaattggaaagaatggcaccaaggaaatggaaattgtcaattacgataaagaaacattgccaattccgcaaattcaaatgccacgcaaagtcatcggattcaaatggatcaacatctagtaaaattggccaatgtcaaaattttttgccaacagttcccatccatttttacagttacatcgaccgaaatgtcatcgcttttctccatcgttttcgtcaacttttcgccgcttgcccaattaatttggacatcgatatgaggagtgatcgcatttcggagttcattttgcacaacatttggccattgctcggaaaaaacattcttgtcttgtaattgtctgttggaattttcccccgtttgcgacaaatcgccccgtcaattctcaacgactgtccatcgcttcgctttgtcttttttggctattgcgatctcttcaccgaattccctgccgatgacagtgccgcggcatccgatggacaagcattggccaaatggcttttcactccccatcccgacaatgtgccgaaaatgttcaactgctggttgactttggatgacgggaatttggcgtcgagaattgaacacttcaaagcggtgcttattatttatttagtactcattctgtggttgtcatttactacttaaccaatttttccacattttaggcatttgccaatgcttcatctcctgccaatttcattgccatcatttcgtttccgttgccttttgctgattccgttgtgccatttgcgctgaccaacgaattgactcgcgaacaattggcattgaaagtgattgacaatagccatcgttttctgtttgtccgttgtccaattgcgcgagacgaaagcaaatggaccaaatgggaagaagaagcgatttattggcgaatttgtgatcagtggaaccaaacagaaattcgaatttgcgacgggtaagcgaatgcttgatcacaaattcaaattttttttgttttttctttttttagctttctcgacgaaattcccggcccaattgatcagcaacagaagtgaatgaatgaatgatttgttgagaagtgatcgatcaatttgaattgagaaattggagaatgaatttgagactattttgacgtgctcataaaaatgatcttttttttgttgggaagagatcagtagggccgcgacttttagtgacgaaaaatatcaaaaaagttaactaaaatagtgagtaaaaatgccaaaatagtgactaaataatgacaaaaggccgaaatagtgacataattttcagcaaaaataatttttattcactgattgcagttgcaaatgaggtacatttcttttctaatattttcttagtaaatattgacaatttttaaatcaaaattttgccaagaaataaatttgggaaatgaatttttgagaaagtttctaaaaaaattgagattttaaaaaatgtaatatcctaaattttaaattttttccattttcaatttttaaattttgttttcctttttctcagtttcatctccgccgattgttggctttcggtgttcgatttacttttccgccttctcaacttggccttggaattgaattatccaaaatgggctaaagctggcatggaatatcatttaaaactttgcaaatacttattttacgttttgctgtcccaaccccccccccccccgccacaccatttgcgtagtaaaatttcatgtttttttaaggaaaagtgagtgaatggaagaaaatgggggaggggagagagcgttatataattactaaaaatttagaaaatgggaaaccgtacaaatgaaccaataaattcatataaaagtggttgctgctcttcctccatcttccattattattcattcgccattattttcgtctctctctccaactttttctccatgacaatgtcttcaaaaatgattctgtacgtttttcgttatttcttctcaacatttactcttttccatctcatttttagtctcttcggtgtgccaatgtttgtcggcggttgtgccattctttggatttattgggaccgtctcaaaaaacca

SEQ ID NO: 5247 - DNA, 3728 bp, Heterodera glycines
gatttttgctccccataattgtttgagtaccccaaacggacacttgaaaaaatcgatttttttatttcataaatattttttcagaaaatgctctgaaacgcaccaaattttatttacatgttagtttaggcactctgatgctttttctatcgaaaagggagatgaataaaatttttaaaaatttttaattcctttttaaacaggccaaaaagtttaggcttaacttttttttcagaaactgatcagaagcgccccaaactttgcagggatactgaaaggaaaagaattaacctgttttatcacattagcttgtcatcagtttttataaaaaattttcaaaattctgagtctcctattattttatttttttttcaaaattttgaaggcggggggggggggcgggttatttttaccaaaaaaaatcattcttaccagtgcatttttactcccgtttttgggtaaaaatttccgggagcggaatcgggagttcaaaattttccgggacgggagtcccgaacgggaatcccgtaaaaatcccgctcccgttaaaaatcccgttcaccgaaaaaagcgggagtcgggagcgggactcccgtaaaatcccgcgggagtcccgatcccgccgggctctagttacagttgacatttagaggaaactgaaaaggatttgaaaataattaaattttaaatttattttttgccgtattgtctaaaattgtatgaactgaacttgaactcacgaacccacagtaaaaatattgaattctatgaatgtttaattaaatatacgtctgatcgtttaacaaaagtctcaattttttttttgagctttacatatgccttcattgagtgtgaatccagcacattctgtggaacccgcgcaggaagaggaggacgattgggaaactgacccggattttctagtcatttttaatgtcattatttaatctttaattttgctctctttatagaatgcagttaatgaaaaggaaagtcggtggggggcaaagacagtggccggctcgggacaccaagaatcgattaggctcgacaaacttcgggaagaagtgttgaaaagtgaccaagtcgaaaaggcaaccaccccggattctttttatagtaaaaaatgcttgttaatttaaggagagaaaattggcacaaatgccgagggccagcgatggctatggcggtaaatttggagtccaaggcgaccgggtcgaccaggtcgcaacaattgtgatgcttaattaactgattttgagccattttagtgcgccgtcggatttgaatacaaaggaaaagtcgaagcgcacgcgtcgcagcgcgattattcgcatggctttggcggtacttttggcgtacaaaaggaccgtgtggacaaatcggccgtgggctgggacagtcgcgagacggtggagaaacacgagagccaaaagggtgcggaaatttggacattcagtagcagcatctgttttttcacatctgtttaaacaatccttttcacaattccttttatttttagattataaaatgggctttggtggacaattcggtgttcaatcggaccgacaggacaaatcggcggccggttgggacgagagggaaaaggcagcaaagcatgagagtcagactggtaatagcaattctctgattgttctttctaattgcttaaaccttccatttcagattacaaaaaaggatttggcggacaattcggcgtccaatcggacagaaaagataaatcggcgctcggatggaacgaagttgagaaggtgaagccacacgaaagccaaacaggtgcaggaaacatcaatgttttactcaaaccattaatttaaattaagactacaaaaagggctttggagggcaatttggggtccaatcggacagacaggacaaatcggcactcggatgggaagaacgagaaaagctacagtcacatgagagtcagacaggtcgaagagaggcatttgtttgtttggtgtgcaattttaaattttagattacaaaaaaggatttggcggacaattcggcatccaatcggaccgaaaagacaaaacggcgcacggatgggaagagcacgaaaaggtggaaaagcatgaaagtcaaacgggtaagtgcttgattgtcgtctcatatgttgttcaatttcaaaaatagacttttctcccgttcattgacagattataaaaagggatttggcggacagttcggagttcaatcagacagacaggacaaagcagcgcacggatggaacgaaaaagcgagggaagaaggagacggagcagccaaaacggcagcagagacgcagaaaaatggggcacaaaggcagcaaaagtccgatgggccgacccacggggcggccaaaagtctgcgcagaaaattcgaacagatggcctcgcaaggggagcaacaggtgacaacaatgggacaatattgtgaaaacaatcaaataattgacagaatttggaccgagttcgtgaggagagagagcgccgaaagcgcgaggatgagcaattgcgagaacgacgaggggaggaggaacgccaacgacagcagagattggaggagcaatgggcgaagcaaagcgaagagggagaaaaaggcgaagagcaacagcagaaagtacaacaacagccgaaacaacggccgaccatcggtcggacagcgaatggggggggggggaattgtgcctaacaatataaatattgaccagaaacatacattccccaatcacacgcatattttgaacaatttcgataattgttttactgttgaaatgtattttactaattctcatcaacttgaaggtgttcgtttgccatacgctgctgccccagtcccagaacaacaacagcagagaaatagtcgcctcgtcgaagaaaattcggccgaaattgcgtcggaacattcggttgccgagactgaagtggaagaaccacaacctccgccggtgaaggtccgtttactggttccactcacaatcaacgcactcaacgaaaaatttatcatttaattcaaaaaatgactgtttaaatgttttactcaatttgaaaagatttttaaaggttttgccatctgtcgctgacattgcgcagcacaaaatgtttatgggcgctgtttctcacgacgaattgaaaaagcacgcgaatttggacaccaaaggcgaggaagagaaactgagagacagcggagaatgggcggatgagccgaagaattcgatgccaaaagaaacggacgaagagcaaaaggaaagggcacagcaacaacaggtggggagggaaaagcaaagagaaaacagcaaaaataaggaaccaaagataaaaccaaagctgtacttaaatggcagatgataacggagtaaagggaaaaaattaaaaaatttcaaagtttgaaaaattctaacaataagtttttattttattttttcggggcgaaatttaatgactccttgctaatgcgtatgcctcaaattagcttaattagttttaaactgggaattggaatttgtttcaaccgtttatccatcctaatcatggccacctccctacagcatcaccagtacgaattgcctccgattgtctacgacgaattgccagatggtgtcacctcttctgctattactcctgctgatgctgcactttccacccactcggaaatgatcagaatgtgcgccccccgcgaccgacgccgcggtgaaggaggaccatcggcggggaaagcaccgc

SEQ ID NO: 5248 - DNA, 3206 bp, Heterodera glycines
cagcagagaaatagtcgcctcgtcgaagaaaattcggccgaaattgcgtcggaacattcggttgccgagactgaagtggaagaaccacaacctccgccggtgaaggtccgtttactggttccactcacaatcaacgcactcaacgaaaaatttatcatttaattcaaaaaatgactgtttaaatgttttactcaatttgaaaagatttttaaaggttttgccatctgtcgctgacattgcgcagcacaaaatgtttatgggcgctgtttctcacgacgaattgaaaaagcacgcgaatttggacaccaaaggcgaggaagagaaactgagagacagcggagaatgggcggatgagccgaagaattcgatgccaaaagaaacggacgaagagcaaaaggaaagggcacagcaacaacaggtggggagggaaaagcaaagagaaaacagcaaaaataaggaaccaaagataaaaccaaagctgtacttaaatggcagatgataacggagtaaagggaaaaaatttcaaagtttgaaaaattctaacaataagttttgattttttttaaattttcgaggcgaaatttgtcttgttcccaatggtgttcccccatttaaacaagtatcaccaaaaaaaaaaaaacaaagaagcataaaaggaaaaaaaggtcgtctaccgggaaaggagggatttgaaatgatccaccgaatgaaaaattcattgccgaatgactctttgctaatgcgtatgcctcaaattagcttaattagttttaaactgggaattggaatttgtttcaaccgtttatccatcctaatcatggccaccttcctacagcatcaccagtacgaattgcctccgattgtctacgacgaattgccagatgttgtcacctcttctgctattactcctgctgatgctgcactttccaaccactcggaaaatgatcagaatgtgccgccccccgccgacccgacgccggcggtgaaggaggaaccatcggcgggggaaagcaccgccgcccctttggacacttcggcgggagcaactgcaatcgcactgtttgagtacgagcgacaggacgacgacgaaatcggattcgaagtgaacgacataatcaccgacattgaacaggtaataacattttaattgatgaatttgagtcacaaatagtccgagagtacaagagtggtccaatgactttttccctcgtgccattaaattttccaaaatttgccgtccgttttcagatcgatgttggctggtggcgtggcgtgtgcaaaggtcgctacgggctgttcccggccaattacgtgcagctgaccgagcgaaagtgaagcgaacggaaaaggcaaaagcttgtgcaaaaagacgactaacggaggatatgctttgatgtttaaatcttcgcactttcgcaaattcaccctttttgagtgaatgtttccattttttttatcaaatcagtcacgtaattaattaatgggttataaatggaaatattttttcccctcccttcccatatcagttcagataatgcctttttttattctaattgtccagctttgacaggtgcttatttttcctttttctcctttcgacttacccaaaatatttttttcatattaaataataaaataatttttaataaaatgttttaatttttgctttttgttttgtgtgttatttccacattaaatatttacattttgagtcataattgattgttgatatttttcctcatttttgctggtttttatccgtccgttttaatgatccgtggcttttttaaacaatatgataagaatttggtggccaaatttaattcgctgaaaaacaaggcttggcgcgttgcgatgcccggctcaaacatccgaaagttggacactaagtgttagcttttgcaaatgctttcatttttctttaattgattatctccccgtcattctttagccatcagtgggtggagtattgtcgtggacatcgccttcaatgcactaatgaagggccaagtggtggccgtgccgaccgacacactgtacggcttggtggtgttggccgagcactcggacaaattgtacaaaatcaaacgacggtccgtccaaaagccattgggtgaatctttaattgtgcattttcttgggtttaatcctttctttccattgccatttctttcggcaaaacatttgctcatcctttgtctttagggctgtttctcgacaggcccgagagcataaagaagtgagtttgttctttgaattatggactttccatttgccaaggccacctcccaaaaataatttttttttttttttaggaagagaaaatgcgaaaatctttaggaatttgcgtttttcattgtcacccctcccaatttattttggctttttttaaaaaactccttaagattggttttgttgtaaatacttaacaaacccatcgaatttcgctgaatgccgataggcgccgccgggaaaattttttaaaatttaagtggattttgtaacagattttcatcgaaaattggcagatttttgcgatttttagccaggcgcgcgggaaaaattttgtattttagtgccattttgctaccagattttgactaaaaatgaccaaattttgagattttgggctaattttgttaagaaaaatgaccaaattttgagattttgggctaattttgttaattgtaagaaaaaagccaaatttttcagaaatttccttcttttcccttcgctacgacccccccacctcttttacaccggcccccctcgatgcgaaatggtccaacattttgggccctttgcgggcgaaatggggggtttaatccataattttaataataaatttataaaaaatataattccgatcagaatttttttcataaaaataagttacaaaaattaaaaatttttctgaaaaatttattctcttcatgtgtctctattttattttattaaatcatttttttactttatagcaattattttaatttttttttgagtaattaatagttttaattagataaaaaatatagaaaaaattcattcatgatttgctttaatgattatttataaatatgatcaatttaaattatttaattaattgtaaaattagtttatttggcattaattatctctttttactctttaatctcacggacaaaagggggaagccgtaataaacatttcttttttaagacataaat

SEQ ID NO: 5249 - DNA, 2756 bp, Heterodera glycines
cccccctttttgcatgtataatcatattgcttgtttaacttcaggtactgtgaccaaactgtgcccgatgagtttctccacctcatttaccccggccccgtcactttgctgttcaatcgcaccgatgccgtcccgtccgacttcaaccccggctgcagcaccgtcggcgtccgtgtgccgcaggcgaagttcgtgcgcgacttgtgccgtcgcatgcccttccgactgctcgcgcagacgagcgccaacgtcagcggaggaccgaatccattgtgcatccgagtgggtgtggtgaggggaaatcactttgaacaacgaatgcacttcattacggtttcccgaaaacttaaaaatttaataagtccaaaaattccaaaattccaaagaatatggaaaaacaggaaaaaattaaaactattcccaaaaaacctataaaaatttagtaaatttttcaaaattgatatttaatgttttcgggcgggaatgagctaaccattaagcaaaactcgcggctctattttcggatcatgcttttgcttgcaaaatttttttcaggattttgaagagatttgggacgacatcgatttgatcgttgacgcgggcgaaatcatcgaaaacaatggggcggacgagggaagcacaggtggacggacataaaatgttgttgcttttgctctgattatgaaaggcgtttccccttcgaagttgttgacctttccgtgcccggccaatacaaaatgatcagacagggatggtcagttggccaaacggatgcaaatttaaacgaagacattcaaattacagcgcaccgatcgagacgatacatttgctgagagagttcggactccgatcaacggacgaaattcagagggaacggctgatcgaagcgggcaaagggctgaaaatgttggaaattgaggcccgtgaaatagcacgggaagatgagagtgtggaaagggaggaggagggaaaagacgcaagggaagaggagagagtggcagagaaagagagagacattggaagaaaagaaggaaagagggaagagagtgctgcaaaggaggagaaagacgctggcagaaaacagcaacaaaaagccaattgaggctaattacagtgaacttttttatgtgtaattaaatgatgttaattaattttgttattttccgttttgtctgtctgcggtgggctgatttcccttaatattaatcacagtgacaaatgaattcaactttggaattccatttgtttattgtttatattcatttcaacagagtacaaaacaaacaaaaaataattgaataattttatggctttacaaatttattaattaatttatgaattttcctttggtcacccgcttcgtccgatgttttgcttacactctctctcaaactattgagtcatttatgttaatgttgctccgattccgtcgtcgttccgtcgcttcgtccgctgagtcgggccttcgcgcccgtggcgactccccgtcggatggtccgtcgtctttggccgttcgccgtgccgtgccatgggaacgtgctgatgggggcggactgtgccgtcgatgctcacgcaattgcaactcatcaacgtgtggggaatggggttgaactctgttcaaatagggcaaaaagcattgaagaaatcaaaggttcgcggtacaggcaaaggatttatctttcttcactatatcttacagtgtctctccaatcttccgcctactttaatttcccctctctttttctttactgtctctctctctttctctccccttctctctctctctttctctccccttctctctctctctttctctcccctctctctctctctctctttcttgcattgtcctactgtattattttatgtgtttgttccgtgttcacttactttgtgttccgcctcatccgactgagcagtccgcctccgcttctgctgctgttcggcacttgcactgtgacgggtgcccatgccgtgccctgctccgattcgtcgtcccctccctccccttcattttcctctccctcacgtgcctcttttacttttctgtcgtgcgtttgctgcgtgtgccatggcttcgcctcctccgccgccgcatgttcgtccgcggtgtttgccgttggtggtcgaatcactgtgatcggtcggccgaacggaatggcaccgttgccgagaacgccttcagagggagggaggagagggcacattcaatgggtgccattttggcatttcaatagcaatggcattcgttagttaatgctttgaaccgttttgcactccctcctccgccagtgacgtgttgctcaaattgtgcctctgctgttgtatgacggcattcatcgaatgagttcgatgtgtcgacgagtgaatggtcggcggcagcgaatgcttttccctttcaattgggtgccttcggttggcccgtgccgttagagtaccaccgccaccgctggggaacgattgctggtcggagtcgcggcgaagtacgcctaatttgacggggccgagccgcaggggttccaactgaactttggcattcattgcctatttggcgaaattattggaattcaaaaagtggcgaatggcggacgaaatcacgccgtcagatcaatttttacatctggcttaatttgagtattttatatttagttagtcgctagtttcgaaaacggctaggaaactttccaataacggtttatcctgtcatttccgctctcatttctgatcacaaactattcagtatatcagccgataac

SEQ ID NO: 5250 - DNA, 614 bp, Heterodera glycines
ccccccctcccccgccactcacgcgtccgtgcacgtgtccggtggttgcggcagacgcacattcgccccgcgcggccgcctcctccgccagtcggcgctcgcgcgtaagccgcgttttgcgcttccatttggcgacgaatttcaccacactataggcattccttaaagttttgcctcgacccgacgtggccaacccaaacattctttgcccatcgtttggccaaaaagagaaattccaaattttgatcaaattgcactttaatttttttgcgattgaatttcgatgagcggagaatttggcggaggtcgtggcaaagaattggaaaaggcgggtgcaattgcggtactcacctcacgttcagcttcttctcgatggaatatttggcgatgttgtgtccggccaggccgtgctcgatcagatcagcgcccagctgctcctcgtatttggtcatgcgaaggccccacgggaattggttcattgtctgccaatggcaaatcgcattcatttaaaatcaattttaaaagtttttaaatttttccaccgaccgcaagtgaaacaaaagtgaccaccaaagagaagacaaaaatgcacacgacgcaaatcgctggaccag

SEQ ID NO: 5251 - DNA, 4967 bp, Heterodera glycines
  unsure (1)..(4967): unsure at all n locations
attagggcttccttttttaggcataaaaaaatcgcaaaataggcattaaataggcacaaaaaccctaaaataggcacaaaaataggcaaaaaaaattttttttattaacgcttttttggtattaaaacaggtaaaaacttaaatatttcaattgtaaatgaaattattaaataaggacaaaattttaaataaataaatttttattaagaaaaaatatattaattttgggatcatttttttgaaaattttttcaattcttaagggtgtattttctgaaattttttagggtcatttcttaggggtggttttttcgtttttattgcatttttcttatggattttttcaaaaagcctaaaataggcactttaggcacaaaaaccacgaaataggcattataaaagtcatcgtagacaccccaaaccaagcggaaaacgcgtttttcgtgcttatctttgcgaatttagtgcgcaaaattttaggcatttgcctaaaaaaggaagccctaataataatatgaatttattgcttcaaatgaattcattctgagcaatcaattaaatttaaatttaatcattattttatattttatattttttatttaaaatttataatttataattataaaaaatttccttttgaatttttttttaatgaatttgcttatgctcaaatatatgaaatgtttcgaaacgtaaattaattgaatatttgtgaaatttgttgatgaaatttcaaaaggatgtagttgctgaggataagcacaaaaaaaaaacagattttcttcaaccaattttcgattttgagcgaatttttagcaattattttcaactattttcgtatatgaaactttttaacaactatgttggttttgtgaaatttaaaaaaaatattttttcactatttatgcttttcaacaaaaaagttatgaaaaaataaataaacaattttgaaattttcggcatgtttaactgaaaattggcacaaatgttcactcaattttcaaattttccctggaggcgcctatcggcactgccggaccaacaattttccccaaaaatttaccatcatgattttgggaaattttcacatttttgagcaattatgttccatttttggcaactattttggcatttttttgttttttagcaactattttggcagttttttagcgactacttaggtacttatttcggggtttttagcaactaaaatccgggccctacagaccgcgaatctgacttctattttgacaaatttctaatccctaacttgaattgaacaaaagtcgaaaattcagacctctcattttatgagttttttttggttcaaattgaagttaggaagtcaaagtaattaggtgttcgatgccagaaaggtgatcagggactccaaaaactccaggggcaaattttcattacacaaattattttacaaaaaaattcagagggttccttcccctttgatttttaataaaattcaaaagacacgactttgcaactagcaccggattttttgtttgcattttttgggtttttgaaattttcagttttatttactataattttcctcttaattttttaattattttggacaggtatcactaattaatagaatgcttttttgcatttactcgtcagtttgtccttttctcccacctgagtgcccgtgtcgtagctgtagtcgtcctcctcgtggatgcgtccgttttggttggaccatgtcagctgcggcggcggatttcccccctcggcggtgcacaaaagtgtcacgttttggcccgccttaagcgccgtgccggcagcagacgcactgatcaagtcgatctttggccgatcagacgaatctgtaaaattgaacagagaaacatggttggacggcaagagaagagacgaaaaagagcaaatttgaaaagattggcagccgaaaatttatttatttattttacaaaattattttaaaaaaatgtatcaaaaatctaaatttaactgtaaatttttctctttcgaaaaatcgaagaatttctttttctgctgaaaagttttttgagaaaagtcgaacaaggaaggagtcgacattttttcagactttccggggctaaaaatattcgctgatttcataattcagaactcgaatttatttaatttggatttttttaatttcagatttttgatcagttaatatttttagcctgtaaaaacttgaaaatgaactccttgttcgaccgaccgacctttcacaaaactcatcccgccatccttaaaatttccgccccatccaattataccgcaaccctcaaaatacatttgtagttcatttatttgcaatcaccaattatccgatcatcataacaattaggccaaactcacagaaaacatccaaagtgatcgagtcgcgtaagtttgtgttcgtttccgggtgctgcgcttcgcaggaaatcacttttttatggtgaatttttctgaaaattaattttcatacgcttttaccctgatatttttaatttattcttttttacccttatcttatttaatttttaattccaattttcttttttattcctgccttatttttatttttaataattccattttttcttttttaccccggtctgaatgccaggctggcataagtgtacacggtgccgttttcccattcctgccgtccatacacatgctccgtcgtctttttgccgttcacgaacaaattcataatcacctttacacaaaaaaattttaaacaaaaattaattataaaatgggtaaataaaagactaataataatttaacagcagaacttgtaatttcaaaattattaaatatttgattttttctaattttgcctccggcttcgatcggtcggtcacgcaagtgatgttcaacggaatgccttcgttgaccgcgatggtcgagccggactggtaatgttggaagcgaacgccggacggaggcactgtggaaacgaattttttgaaattataagcaagaaaaaaaaatgaatggacccaaaacggtgacaaaagcattggcacgaaaaaatttgccacccggcttcagaagttggcattggaattgtccgtcgtcatccaacgacacatttcgaatgtgcaaatggaattcgccagggttatcattggagtaactgcaaaagaaacaaaaagataagacaacccaaaattgggtaagcatttttaatttaaaatttttggtatattttattacttgaattggctttttacgagaaaccggagggggggggggggactcccggggatttgcccgcaaaatttgtaccttttggagtcatagttgaagtccttcggtccataaaatatttaaaaaacatttacaatgttttagttggaattattctgagacaaaaaaaaagtcacaaaacaaagaattaccaaattggcactgggggaatttttagtacaattaaaattttgtattttttccagtaagtccattaaaatgttggtgccaccaaatcaaaaagaaagaagaaataagtgaaaaaaatgtctgtttaccgtaaattaaaaaataaatattcaaattttctttataaattaatgtaaattgaccaattttcactcattcaattattcttttatttttgaaactgtttaattataaaaaagccaaaaattgcttccataatctcgaaactcgcctgtatctgcccgaatatccggggatttcgttggaatgttggatttggttcagaatgatgcctcggtttgtcctccactgcatatggaacggctcacttgtgccatggtggtgggcaattgagcagcgcagtgacagatcagagcctggggcaaatagcataattaacgtttacaatagagaaggcaaaataacaataatttgaaaatttacgaatttttttctcaaagggatattttgttattgagtttgttttacaatttagaaaaccgaacaaatctcaaaaattattaaagctaattttgattattttttgagattttgctcgctttctccaagatgtctcggtttaaatttgcgtgtcccttcgcagaaaattttttaagcatatcattttgccttccttttctcttgttagtttcttagttggtattttatgaattgctactaacagtaaaaatttctttcaattttatttttttcaattattttgaattttttcttttttttattttaagttttcaaaaattatggaaatgccacaccaattaggatggattggttcgtcgggtgctccttgaaatgcaatttttcagcaacaacggcacttgtccaaaacaatgacgagagaaggaaaagcagcgaagaaaagtgaaggaaaaagccaccaattcttagcagcgtaaaaagggagtggtggtgatgcctgattaaattttgggaaaatggcctcaaaggaagtgccatttgaccttaaaaagaaaggggtgggaattttgtcattagttaatgataatgataattaagtgtgaaagtgaaaactaaaacgagaagggaaaaggcaattaattagcaatttaattaaacgggtatgaacaaatcaattaacataattaagcacaaaatatgattgaatatatgcaaaataaaatttaaaaaaagaatatttgtaaaattcacaattcattataattttttagaaaatattgatttgagggtnatngaaaantanattgatanttaaataaaaatatataaaanaaattnnaaaaaaaatgtnggnggaatggggagggnangaaaagagccantgtnagtgtnggaccagnganagtttgtggggnatgttttcgcacaaaagaatgggtgggtgatggcgattctcgcgcgggttgacagcagtgggacggacggcgggtgataatggactcggatgggggggggggctaaatttgggcatatgactgacccccggggggatggacaacaaaaggcagaggggagggggggggggag

SEQ ID NO: 5252 - DNA, 1435 bp, Heterodera glycines
ataggtgctaaaaagtttcaaatttaggggtgtaaaaccctaacatcttatcaaaaaagcaacaaaattaagtcaaatcagtattgagatacataatttttaaaatcaaaaattcttataaaaaatgaatttttgagaaaattttttatttcataggggtcgtatttttgaaaattttagggttttagggatgtattttcagaactttttttggccgattcttaggggtgtatttttcgtttttcgaaaatgttagccctaattattagtccttttagctttttgtcatatgcaaaaaataatggatgagaaagcgacgaatttggcgcgattaatttccaatggatccatcaaattgtcgcagcggggaagggagaaaaaagttggagaaatgtgaacacacatcgccaccatttatggctcaatgggtaaaaaatggagaagggattaagcgtgaacaaataagggttaattgctcttaatgaggccatggttggttgggcaaatagcgaagtgccagaaacgatataaatagctatgtcattaagcaaaatattatagaatttattaatggcattttgactgactgatttatatattggggttataaattgttggtgttcttcaaatttccgaatcctcaagctgctaaaatgatcaagctttagaacccaagtcaaatcccgaccgattctctcattggcactttctgtgcacagagaactgaagtgggttaatgcgggaaacggaaatttgagtgtgcggtgatggggggggcggacgagtgggagaccaattagtgggttcgagattataattctcgactgggcggaacggactcgagaataatgacagcagtttaaatggcaaaacgagcagaggactaaaacggcacgaccagtgccatttgaatgggttcacatcagcagcagggccaaacttttttttgtggctctctgattctgtcgtcgtccaagtggtgggtgctgtcacacattggacttgacacttttggcaatgctaatggtggctgattgtgatgagtgatgatggcctcaccccccccgctggtgttagcttttgcaatgacaattaataaggcccaaggccaaacccttgagcaagttggcatagatttgagaaaagatgtgtttagccatggtcaattgtatgtggctctttcgagagcaagagcttggaataagttgagaattagattagatgatggcaatttagagagaaaggtgaagaatgttgtgtacagagagttattagataacagtgattagtaatgttttagactaggtttggatttagataaagtatagtattagaattgggtttgtatagaaaaatctgttgttctttgggctgctcaggacagtacgaacacaattccaagtgagtcattccttttaattttaataatcctttc

SEQ ID NO: 5253 - DNA, 2205 bp, Heterodera glycines
  unsure (1)..(2205): unsure at all n locations
cccccccccccccgcgggagatggtgccgttacccccacctccccaggacaactgtgagatagagagtgacccctttgcaccccccccccccctggggcccctcaaaaatataatggcccccgggggcattggggaggaaaaggcaaagtgtttggcttgtgctgctgatgcttctgctaaacgaacactcactttcttcctcttcctccgtatcgattccatccatcatcatcgtctcgtcgtcaaaaaaacaataaattttcatagcgagtatttatacgcataactctttggttggttctgtttctgttggtggcccccctccttaagaatgactcaaaaatggcgggggacggcaatcattgaccaagcaaatgaatgaccaccaccaccaatctgtgggagacttttttttgggtggggggggggggcaaaacggcacggcaaaatcaatgccgataatgatggagtgtaatgtaatgaaatgtaatgtatctgtttgaatgcaatcaaacttaaactgggaaagagggggtaatgagggaggggcgagagataaaagcagtcacagttttcttttttgcctaaaatggcacagtgaaatttgccgacaatgaaatgattaataatttcttattgccatacgcaaattaatattattatcttttaatagaataggggtttttttgtataatttcacccaattttggagctattagtaggattagtcaaattggggggctattagcagaggattaagaaataaatacaaatattatacaaaattaaaattaataatatgctgcttctcatagaatttagggtttttttttgtataatttcacctaatttggggactattagcaggattaatggatgaatacacatattatacaaaattaacattaataatatgctgcttctccctaatcaattataatcagaatcttcaaaatggtggcagtcgctgcttcggccacggccaacaacaacaacaaaatcacaaacaacagccccaacaactgctgcttcatctcctgttggcttttcaccaatgtgccagtcagttcattcactgccccgccggggggcggggggggggcatttgtggcgaggcgtctccccgtcctcaatcattttgcgccggggggtgcggcggcggcggaagggacccggagacaaggggacaagacggaggagggggaggacagattgggattggacgagatgggatgggatattggttgataatgggggaaaggcgatgaaatatgtgccaactgttgccgggggaaaaggggtcaaaatttgtggggggggggggggggaggggatgagtttgcccaaaatctttaaatattttaattgaagaattggtaaatccaatattttttcgaagccacaaaaataaaaaataaaactacctaggtatctctttttgtctttattattccgtcccatcattcatcagtgtttctttatgggattagcggcattcgttttcaaaatcattttgcgcccaaggcaatatcttttgtccatttttgtctgatggggttttcggtggttggggattaaatttaatgggggatttaattaggtatatcatttaatgatctttgatcactgaaatttattcaaaattttagccaaaataattttgcaaaagtgtgaaaatgggttttgttggcaatggtgaaccaacacaactgttgtgctttgctgtggctgttccactctttgaaaatgggtggtgctgctgaggtgacaaaagttggactctgatggggcggtgtttgttctgaggcgattgcccccgggggaagcgatgggattggcccttaggaagtggggaacggaattgggaagtaattggcctttgcaaaaagcaagacggactgatggacggagggacggacggatgataattaattgcattttaaatgacaattcaaatggcgccgccgccgtcgcccctccctttgaaaattgggagctaatgaattgaaaagggagaggaaagaaagtattgttgtaaaaaaaagaagtgtaatgacaagaagaagaaggagaattgtgtaatatttttggtgatgctaacaattaatttcggcacagaaatttgttggacttaaaagaagtttggccaaggctgagaccctggncattgcaccttacaagtgagattccaatcccgatttctt

SEQ ID NO: 5254 - DNA, 580 bp, Heterodera glycines
gatttgttgaagaggaaagtgtcattacgacggacgcctcttacccatgcgcaatttcctcaaatgctcaccccccccccccgcggcccatccctttccgccgctgggaattttgccataattgacccggtgggagctgcctaaatcagtcctggcaaatttaagtgagagaaaattgaattatttaaatttctgttaaaaaaattcaaagaaatttactgcttttggcaccagtgaaagtttttgcaaaagccaataaaaacaggccaaatttcacttggcctcaaaaataaataaaaaggcttttcctctttcttattttggcattaccttttttcttgctcaaccaaccgcacataatttatgttatggtcaggttaacccgaagaaagtaaaatattaaaatttgccaaattttgacccaaaatctgaggagaaaagagcaaattgtgatgaaatgtcgaggattttcaaattggattaataaatttgaaaggatatttaatgaaatttgacagatttaaaaggaggaatgtgagaaaagaggggagaattgtgaatacagctagctataaattat

SEQ ID NO: 5255 - DNA, 1538 bp, Heterodera glycines
tcataataataaaaaattttttatatatattttggtacatattggagctttttgtacatatttattacattttcggggtaaaatggaaacataaaagattttaatttcattagctaaaacagcaacagcgaatggcaccgacggcacttatggaggatggcggaacgtcaacggtgacaagcgccagttccaggtaaaattaattaaatattaataaatgaaaatttgtttggtttcgttaataaaatacattcatattgaaattttttatttaataaatattatataattaataatattttaattttaaaaatctttcagtaagaagtggaaatttagaaaccaaaaaataataattaaactgaaaatgtttataaatttaggaatttaaaaattaaaaattttgtttattttttatttttttttttctaggagggcgggtggttggatctgtcgttatttgtaaaaatttgtttcaacaaatttctcaactaaattttttttcaggtccacccggtcttccacaggttcttcttctggctcatgctgttcatcatgtggcggggagcactgctcacagtgctgtgacgaaacatcgtcattcatatcatcgacaggtgtcacattcatgtcatattatttctttcaatattttaaatcaattaagcatatgcctttggaccttcgtcaagcagtgcacgacggggaggaccctcgcatggtggtggtgttcagtgcccgggggatgccgaatatgtgcagcaacgaaaaatgccaatcatggggccaaattttggttggtttttcgatgaataaattattttggcaattattataattttttttaaaattttgttggatcatcacaacgcactgctgataccgccaatttccatcaacttcatcatcatcaacaacaacagcagcagcagcaaaggggacaaccttcgtcgtcaagaggcacaacatcgcaaccgtatcaaaaaagtgagctttttaatatgttttctattagagtttggaattttgaagaaaaaaaatatagattcgggttttgtgaatcaggccgagtttaatgtggaatatttaaggaaaatttggcaaaaaaaattttctggcggtgtaaaaatattcgaaaaatgtacaagtgaattgaaaaattatttaaaattcttaagcttttccgttttcagcaaaataaaaaatcatatctgcttttttactacttttctaaaaatgcctgatttttgcctaggtccaaattggagcgagaggacacaaaattatcataatcatcatcatcatcatacaagctcatttaatgacagagtgagttgcagttttttaaatttgtttattattaataaattattattatacatttaattaatacataaaataaaatattttaagtcacatacaccgacaacacaaatgtcggcctcagcttcatctatccggagttgggaggtgaaaacaacactcactttaaaacagatacatatttattaatcctatttggtttcaaaatgtttcct

SEQ ID NO: 5256 - DNA, 3565 bp, Heterodera glycines
ttaaaaacagatacatatttattaatcctatttggtttcatatgtttcctaatcttcaaaatggtaaaaagacgagattcgtttttgtacaattaatttttgaccctgattcgtttctataagcccaattcatttttattgttcaaatttgtttttaaccccattttttattaccacattttttgggttgcaacgcgaaaagcgatgtcatatcgatgaaatttcaaatatttttaaattattttcagcatgtaactaaaataggtaggtcaaggaaaatttttgaaatttcattcgcgtttcaagcataaaaacgaattcgagtaataaaaactgaatcgagacaaaacgaattggccaaaaggcaccgccgggcctctctttccaaaaattcaaaagcaaaaaaacaaaaacaggaatcctggttcttctaacatccaataaattaaataagcatttgacgaattttgtttttttttaaatttttggcattatgtacccatgacacttttacaggcaatgccggtgatccgcgcacagcccggacacattccgctaagcgattcggaagaagatgaacagctgatgaggagatcaacaggaatgatcaaaaatgaaactccacaatgaattttgacccaatgatatgtgttgcatttgctcaagcttatcttttttataatttgtttaaatggattttaaaaaaatttacgtgttgaaaaattataaatcgttttaccgaagccataaatggcagaatttaatacagtaatacacggttcgtctgccttcgttggatggcagtgttggtggacatcggctttcgcctcggcacagtctatacgctgctgcactttattggtgtggaattttttaaactaaagttcaaagacttgcttaatgtgaggatcgaacttgtcatttctctctctgtctgtttatcaatctctcttttctctctctctctctctctctctctctctgtctgtctgtctctctttttctctccattcaattagtgtataatgttaattagctggctatctctttctttctactctttcgttttctatctctctcttcatctcactctcttctctgtctattcctttttcgcactctctctctctttctctccctcttcctcattctctcataatttcctttgcatgtctttttgaattatattttttccccatcaaatttctttaaatatttatctttgtttagctctcgcattggtcgtgcaattggaatagagcgtgatcctttcctatacgagttgcagtgtcaaattgttgccgaatttggcgattgcttatctccaagagttatgttcgcgatgttggcactacatcaaaaggtagtgcgcccgataggactcggacccattggcttgtctctgtacccaaattcggcaatttaaccaactgagcccgctgacccacaaaatgtccagcccacgaaatgtccaagtctcgaatttgagttttttattattcagatgggcctaaggttaggcaaggggtaatataaagggtatattcgtattcagcgaccccgaaaaccctaaaaatcctaaattagactcattttgtttttataaattttgaaaaattttggacatttcgtgggtttttactcttttggacatttcgtggcttggacactttgtgggggtgccactgagccacaccgactcacttccaatcaaagcgcgtccattgggattcgaactttagggcctttcatataaaacattttatactgttggtaccaactgaaccatgtgcgttccatttcagcagtaaaatggaaagtgcgccattcattaggactcgaacccgcgagcagctcgcttcccctaactcctcccacccccgaaaacttaacaagctgaaattttacaagaaaaacatgagatttttttctaagaaaattacatgcaaaaaaactcgagaataatttaagtaattttggaaaatttaaaaaaaaattagtaattcagcatataattttttgaaaagcagaaattaaaaaaaaaaaatttttatttactttttctttttttttttgatggtcatgccgatgctgacattttggccaatgctgatgttgtcatcatgaacaacgtgttcacattctttgctgaccacgctgaacaggtgggatatttttaaaaaaaaatttgcgggatttttttttttttgatttttcctctctcattcagtgtgactactgattaatttttttttaaattttttattttctcactaccaatttttcactccttgatttttctcccttcgtttattctttagttttttaaaatgttgttggatgaaaatttctaacttagaaaattttaaaaaattttcgagtgaagttaaacacattgtacaccttttatttatttatttataaagaaaagaaaaagtccacaaaagggataaatccacttactttgtggacatatacatacattaatcgtccaaaagtatcggattatacaagcacaaataaaataaaatcgccaagaaaaatataaaatgaggtcaaagtcaaagagatcacaattaccaaatcacttataaaaaaaaaattttttaaatattatgtagccattttttaagtttttccggtcttattgtcttaatgaacttttaagttttgttttaaattgatttaaagaatttttgtttttattagttctttatctagttgattccacaattttgttaccctccgcgtgttgatggattaaaaattgaaaatagtttcagatctgttcggccataaacaattttatgtgccatgaacagatcaaatagctttcgcctattctcaagtgttggcagttgcaggtattctaatcgattttggtatggaattggcggaaggctgcatttaaaaaatacccttttggtgaaatatttttgacacttttcgatttttttaatatttttttgaagagacggattccaaacctccggagcgtattccaataaaggcctaatataagttttatataacgtaatccaaatcttagatgatttggatttaattattcggaacaaggaacgcatacgtaaatacgcattccttgttatttggttaatatgatcggaaaattgtaatttgttatcaatgattactcctaaatccctagttgtatccacagcatttattgtatttccatcaaatttatatgtttcttttgggttgtttgaacccaactataatacaaaagttttttgaattgaaacttttatttgccatttatttgcccattcgaataaattatgcaatgctttatgcataatttccgtgtcggctcttgctttataacaaatatataatttaacatcatcagcatataattttattttcactcctgatggcaaggcatcaggaagatcgttaatataaatcaaaaataataaagggcccaggacagagccctgggggacgccagaggtaacttttttacttgaggataaagaatccccaattttaactcgaaaagtcctattactcaaaaagccctttatccacattaaaagtt

SEQ ID NO: 5257 - DNA, 3283 bp, Heterodera glycines
  unsure (1)..(3283): unsure at all n locations
ctaaatntcggtatttncaaagggaataacatcgtatttccgttgatatttaaaaatggaatttcttccctttgaaatagcctttttctcaatttgcgagtgaaatttatttgtttgtatttttatatgtaaactaatgctatcataaagtgctttttttgttgggtcagttttacattgcctatacagtctggctttctctttgatggaggccaataaatgcgttggatatttaggggtcaaatcttttttggtaatttttttcattggaatacactcgtttaaggtttctagcaatgtttattaaaggcgttgtatttttcgttcacactaaaatgctcgttagataaagcgctaattctagaagaaaccataatattaaaaagagaaacattcgacggaaaaaaccgtcgattgtaaaagaagtttgttttttgtagtgtttttggaatagacaatgtgaaaatttgcgctaaatgatccgatgaaaaaacaccatcttcaatagtacattgctttacaatttgatcatttgccggcaaaactaagtctaaccacgaatttcccctggtgggtccactagtggcattgaaaaaagtaagcttactaaaaaagtggcaaaaaatttcaccaaatttactcatagaaatgggctgcccttcattccataccaggtctttattcggaaaattaaaatcacccaacacaacacaattatggctatagaatgtttctaaaaattttaaaagttccttggtttgtctatatgttgtcttgggtggtcgataaacaagcacaaatctaattgattttagtttttgtaattgaaaaaccaagatttcgcaattatattttgtttcagaaaatttaacaaaaaactcaatttctttcttaattaaaacaccgcaaccacccccacgtgttaatttttgagattttctatgacaaaaaacaaatttataattttcgattatccatggactaaagaggattgggtttccctcctttgtccacgtttcagttaacaggcaaatttctatgttattatttactaaatttaaagatatttcatcaattttgttgtaaagtgatctaatattaactaagcatgctttaacttcccctattttggttttggggttattgggcttaacatgcttaagaccggaaaagtgcgaatttataaatgttttatgagtgtgatttggtaaaacagcaagtcaattggtgttatttttaaatgccgcaatgtctgacctcagcatcactttgtccgcgtacaccacccactcgccgccatcttcctttcttttcctgctacactcttcttgcagcacacgtcgggccttgagttcctcttggctgagtaaagggcgaattcggatgttgctcatccccaatttctgattgatttgcgcgcgccctttgttccactgtgccaaggtttgtttctgatgtttggagcacccgaaaattactttcatcaacctcgggcggttttgacctgcctttgcttggtctggggaacccattctgtacacagtgattgggctctcgatgccaagctcattgagaacgcctgagatggcagttcggtcctcagcgactcgctcggacggcttttgtttctgcgattcagggagacccattacgacgacgcttcgccgacgctcatggtcttgaatggcttcttccatcattttctgttgtttgaaatgttggagttgaaggtcttgttcggagatgacggcctgttgttgctggacatgctgtaaaagttcgacacaaattttcaaaagttgtttagtgatggggtcgacactgttgttgtccatttgttgggaaattgccgcaagttggtcactaagagcggtgtatgggtagtcagaggtagatttttttgatgcgttgtctgagagaggagaaagatgggaagaaggacgctttccaaacatgtaaactttgtcttttccatgactccccccccccccctctctaaaaaggtttcctgttggcaacatttgcgtgcctatttgcgtcctgacactctgttgttgccactcgccctcgctggagttggtcactgcccatctctgtccgtcggcacttggctttgccttcgacgattggttacaagcggtcggtcatcattttgaataattaattataaacatttttttttgaatgaagatgagaaattgagataaaagtgggaaaaaccaaatacttgaaatttttttttttttgaaaaatggataaacgatcgaactttgtttgtttgttttactgtaccagatccgtttccatataaaaaaaaaatcggaaggtggcctccgaaatttttttttctctttgggccaaatatttttctctagtgttgcaatatttttcaacgaaagatattagtcgctatttgtcactattttaaatgaccatatttgccatatttgggtgaaattttcaaaaaatggtaaaatatgggaccgcggcgctatttaaaaagaggacctttttaaatttttttttgcacttttttttggtcgattttttttttatttattttaatatagaatttgtttttttaatatatggtacgcataaataatttttaaaagaaatttgacgctaattaaaaagtgacaaattttgaattttatcaaaaactataggggggacccttttgttttgcagttttttaagaaaaaaaaaattcgtgaatatacttttactcgccataattgtgctgttaatgtttaatattcattattatttataaaaaattttaaaaaatttgaccaaaaaaaagtgcaaaaaaaattcaaaaaggacaactttttaactagcgccaataatcccccatgggctataattagagcatatacggtaattaatatctgccaattgtgcaaatagcctagtggctagtctccttgactttcccttcttctttcccctggttcaagccctctacagaaattaaattattttttttgaattttctctgaatttctaataatattcgatcacttagtccaaaaatgattaattgttcgaaataattgaagaaaatttgatttcaaaattttcattaatttaattattatcagatgatcaaatatactttgtttttcaatttgagtgtgttggcgttttgttttacgccaattattttttggcaatttttttcgttttttaccgtccatgggcaccatcgacaaaattacaaattataaaagccaaaagttttttgaattgaaacatttaattacccattcgaatacct

SEQ ID NO: 5258 - DNA, 1623 bp, Heterodera glycines
attggcattggcaccttatcgcccgcctcggctcccaccgccactttcaaaaagggcagaaacgcggcccaaatgtctttgaaccattccgcaatttcatcagtttttgccgcttcccaaaagtcgcttccggccaaacctattaattagttgtcaataaacaaattccataatcctttccaacaagtattaccatatttattgcccaaataacgacaaattgtttgagactgggccaaaactttgtgctcagttccctcgtcccattcgaggttgggcaattggccgtaaagatagtctgaatgaggaattaattaattaatggtttccaaattaggagctacattttatgatttgatttagaaattaattaggaatgaataatccaattaaaacaagtaattatataataggtacttgaaattgggaagttaattaatggtctgaaaccgaagctaatcaggtcgattataaatgatttaattaattattattgaatgttttgcttctttcactcactttgtttctgcttcagccatttttctcgcgatgactcatcggcaagagttgagctgaaagtgacgtcttcaaacggaatgcctttgtaatggaggataagacggatctgcgcatttggatgaacaaatatggaaatgtgttcgaatttgctcttacgggttccgcaattcctctcgacgaaaaataagtgagtttataattttttgtttccgcgtccatccgtaaatttaaattgtaaaaatttaatgttgaaaaccaaactttaaaaacaaaattgcgaattatatataatgagtgttgtgcattattgaaattatttgatgataaacaaattgcagaacaaacacagcaaaatgagaagtggcgattgattttatgtatttattatttttcgtttttcctctccctttttctcccatccccaaattggataaatgaaatgcataaacaaaaacaaaacgaaaataaaacaacagcagaaatgtgaatttgtacattctgtaaggggcgataataattaataaaaaaattacaaatacaaaatataaattcataaactaaatggtaaatattgatcataggccccaaactcaaaaatgcttaaaaacagtcagaatcgatgtaaaaaggtttgaaatgggttggaaaaatagaattaggggcgcgcttgccctttttcaggatgaaaagtgccgaaaatggagtgccaaactcagctgggactcaagtgaccgtgctatataaagcactcaaaagacattataaataatttttctagggtaaattgtggcgctgaacacgaatatgacctttaatttgcaaaattccgaaccccgaacccaaatttcgaacaaaaactcaaaatttataaataaaagaaaacatattattaaggggttttgaggttgctgaacacgtttatgacatccatttgaccaaattcgaacaccgaaccctgactcgaacaaaaaaccgaaatttaattttcgacaaaattcaaaattaagcctattttcgcaaaagggagcatgcgaagacggagcaagtagtggtcgagacggagggcggaggaagcagtctgacgagcgccacaggcggttgact

SEQ ID NO: 5259 - DNA, 1981 bp, Heterodera glycines
caacgctcgctagcagctatctggttgatcctgcctgaactgatgtgttcatttcaaagattaagccatgcatgtgtaagtttaacctgccagacagggatactgcgtttggatcattacaccagctataatttgcttgtccttaatttctaacttggatatcagtggtaatttcagagctaatacatacacctaagctactatttcatcatagtgtagagcgttttatataccccggtccaaggagtctcagttgattttggcgtctcctttttcggctcttttcatcctgcaaaagggcaagcgcgcccctaattctatttttccaacccatttcaaacctttttacatcgattctgaccgtttttaagcatttttgagtttggggcagggctgcacgcaattgcggattgcggattacggaaattgcggggtttttggacccccgtaattgcggattgcggatttttgggatttatccgcaattttgatccgtaatttgactattggattatttttcgagacgatttcttgtaagattattttttataaaatgaatttttttctatttttatttaaagaaaatatgtacatttgtttaaattcttatttctttagcaatttaaaaatgtcaaacttaaatcctggtaattggtggtattatttaataattaatttaaggcaacatccaccagtccatctgccttggagacaagacaaaaagccgaagttgaagtaaatgaatatttacgggatccaaaaattaaatccagggccgatccatcattatactgggaagtcaattcacaaaaatggccaatgattggtgacgttgtacggaaatttctttctccacctgcaacaagttcagaaagtgagaggcttttctcaacggccggtctaatttcagatgacttgcgaaagagtttattaccagaaaatcttgcaaaacttttgtttcttcatcacaatttgcttttaaccggtttctcaattgaatgattttgcttttataaatttgctttttaatatgcttttaaattgctttaaaagatttataggattttttaaaataaaatttaaaattatttaaaaaaattttttgtttaattgcggattgcggattacggaaattacggaaattgcggagtttttggacacccgtaattgcggattgcggatttccgtaattgtaaatccacttgcgtgcagccctggtttggggcctatgatcaatattttccacaaaatgtatttgtaaaaccctaaattcaccaaaaagggctttgggaatggttaccagaaatttggggaccccaacatttgggggatccgacttttggtgacccaaacttagggactcgacgggttctcttgacttatacgatgtttttttctcatggacaaatctcgactaatatggtaccaatcgatagctctcgatgagacatatcgatctaggggtgggggaatttgatccgacaagtataaaccggtttttgaaccgattcaaaacacaaaaagtgaagaaaattgggcatttttaattaattttttaatggacatttcagtaccaatgaaaaatggataaaaaaaatgaaacaaattttcgcaaaagggagcatgcgaagatggagcaagtagtggggcgagacggagggcggaggaagcgggtctgaatcgttttggcgccgccgttttggcgccagcccaagttttcggactataacttttttatttgttaaccaagtccagcaatcttggtatcaatcgaaagcttaacatgtttagaagatatttctaagctattgcttcgcgattagacaattaacaaaaaagttataacatgaaattgcaaaaaagtcgaaaattttgaggttttttcctaataacttttttagaagctaaaatttttgtttgttttttgtaggggtatgagagcttgggaggggctgtcaattgatacaaagatagatagatt

SEQ ID NO: 5260 - DNA, 3078 bp, Heterodera glycines
  unsure (1)..(3078): unsure at all n locations
ttaatttaatttaatttaatttatcgagcaaaccaaaggcacatgagtgctcttatatggtgccaaaaagaaaacaacaaataaatttgatcaaaataaaaatacaaaatgaataccgtaataaaaatgaataaaaataattcaatcaaatgttaaaaattcacaggtgataaaaatatagtgtaaatatggcaacatggaaaatcctactcagaactcattgcttttagtaaatccctgaattcctttgccttattaatttgtaccgctaccactggaagattagaatttgaaaattaaatacttgttacatatgagtgatccaactatatttattagagttatcaaaatttgagtaacaaacgaaaaagattcatttctaatccaattatcgaaatggccaaaaataaattcataattattatgaatttaaaatttcgaatttctcatcatccttcgtcactttcgtccccacaaattgtcgaaaattgtgccgcgattgttggccaaggacagcgagtcggcataatacgactggggacgagcatttgtcagagaaactgtgagcagaagaagaaacagcagcaaacgggcgaaaaacattttaaagtttaatcaaattaattaattattatttggagaaaataaaagtaaatatttttgttgtcgcgcgatggaaatgatttttgatgggcaatttggaatttgccgccacggcctttccttttataggcatgcgaatggaaaggcacaaaacagaagcacaaaatagtgcccaatttttcatattttgtgttcttttcaacacattaatatcatttccaaaatcggagttgattcatttctctctcagatggaaatctcgtcgaaaagtgtacatattttgctacaaaatgtgaactaatttggttcatttacacatttttgggtctttttttgttttcataatcttttgttgatcaagtgatgcgcaatttttgggcggaccgtcgtcgtttactccattcttttgcgcacaatgtccaaacagaaaagggactttcccttcctataaaaagggtcgaaagtggaaattgcattcattaattaattaaaccaaaatcattcattaactaatcaatcaattggtcagtccctctcacaatgctcttctccactccaatgccactctttctcgtctcttctgtctttctcttcgtttttcttctcgtcgccatgtttttggccaatccgtccgatgcgcggcctcaatttggctcatttgccgattcgatgaccagcggaacgattttgagtaatatgtggggaaaaaagcgatgagaagcggccaacagcagacggagaaagaaagaaaattaaagaaaactgaagagaacaattggaaataatcaacaattaataaataattgttaattttgtataatcaatcatcaattataaatggttggtaattaaattgattttttattttgctggcggaaacttaaaatcccgaaagggttcccgactgcttattgttcgattaactgatttataattttacgctatttttggggtttgccaatttgtggcattttcgtattgctatttgattattatataattcattttcaaatatcaaatgcatttcgttaataacactgatttttactcttttaaaatggcatttaaatttaattggccaaaaatgtcacttgcttaatcatttacttatgttcaaacataatcttttaatttgtcggaattgaatgaataagccataaaattcactcggaaaccaatgagtaatattcaaaagcatttttttgtcgctcccggcaaatggcaacggtctgagcaatggcggacaaatttggagctatttataagcgaaaaggtgcagaaatgggcatttcttttgttgcatttaaaaattcatttaaaacatttttatgtgtgattaaaaattaatatttcagccaaactcttccaaatggcttaccaattgacgccgatcattatgttgcgttggttgttcgttgggcttgtcctctcctcgcatcaacagatggcacaaatgggtcgaatggaaggggatcaaatgcgcggcatggaaatgggccaaatgcgtggcatggaaatgggccaaatgcgtggcatggaaatgggccaaatgagcggaatggaaatgggccaaatgcgcgggatggaaaggggccaaaagcccggcatggtcatgacacaaaaatcagaaatggatatggcacaaatgcgcggcatggacggcgatgatggccagatgcgtgcttcatgggcagcatcgcaaaaattgttacgcgcagaggaaaaggaaaaagggccgaaatcgcaaaaaaatgaaactgaaaaggtgaagaagacatgcgaaatgagatgagtttggtaaaacggaggacaatttcaattttaaattaaagaccgcgttaattagggggttgatccactaattaattaattcactaattgacttatttgctcttttgctgaacagccgccccagcagaagcagcctcaagaaaagccgggggcgcaacaggacgacacggagacggaggaggacagcaaagaagacaagcggaagccgataaagtgtcaggaggagaggaaatgctacgcacactcggagtgtggcgcaaggagcaaatgcgaaccggcgacgctggacaggaagaagaaggtgggcacgtgcgactgcggcgtgtgcgggggattccaactgttattgctgtgtgagttgggctaattaatgaaaatacattaaataatgatttatgaaattactgcgttttttgttttgtcatttctatttcatcagcngaaaggtcgatcctatggatcactttttgactttttgtttgcttaangnncgtctcacagtggcgccctttccnttgacaaanacatttttgcgcgggagtgtgccggactgaaagatgcttgtgtcgaaaagccattatttcgtgggcagcaaatccnaaaagtgcgactggcgagtgggcttccaaaaggcggccttangaatctgaggnatggacagaagaaagtgtgcacaagcagaaa

SEQ ID NO: 5261 - DNA, 717 bp, Heterodera glycines
agtagagaaaggcaaatcaacatttttctcttagcgaaaattgttttaataaatatcaacattgacgttgatatttatttagggaccagagcgtttgggcccccgtttttgggccccggggtcgtttggaccccaacccaaaaatagaaaaatgtgcttttttaaaaattaagattctaaaaactaagcctgagggatccctcgccacttggcataagttaggtttaattacattcgctcattttttacttattccaaatcctattattttttaatagttaaccaatttgatgtacattctgatttggacatttttcagaaatggctaacccaattgcaaccaaaaaacaaaaagtaaaattgaactctaatgcactttatgagtccaatcaattgacaatccatggtttggtaatagtaaagtttatccacccccccccctttttcaaaaaaataataaaatttttaaaaatgcttaaaaacaggttttagggggttttcggggtcgctgatcacgaatccgacatccatttcgaccaattccgaaccccggacccgaattcgaacaaaaaatcaaaatttcatttttcaccaaaatgcatatttattgcacaaaatcgatccaaatgcacggaatggcagcaaataagagattcacacaaaaaacatgtagtaggaacaacattgaaaggaaaaacactattgacatggataaaa

SEQ ID NO: 5262 - DNA, 4286 bp, Heterodera glycines
  unsure (1)..(4286): unsure at all n locations
aaatcattgcttgatgtggatttttgcttcaacagttcgaaagaaattttgcgaaaagaaatgagaaaaattggacggataaatgaatgaataatgactgacaaatgaagtgaatgaatgagtgagggcggacagattctgaacaaaggaggaggggtcagagttgggcagacagaaaatgacctaatagaaccaaaacaaagcacagaagagaaacagaagactatcgattatttgttgttgccttaaaggcgcactaaaaatgacagagagcgatgacacaccgtgtctaacacacgcattgaattcgcaaatattacggacaaattcagacaaaaacacatcacaaaacaagaaattgaaattaacggtttgaccaatatgtaaaaaagaagaagcatgtcggaattacgtaaaatgccgaggcacacttatgcttatgggggtggagaagcgggtataccacaattattgagaaatacgtaataaatggaaacaaatgaataaaatgaaaattgcggacaaaatgacacatcatttccatcatcgacaatcatccgtattagaaacgttgaaccaagtgaaatcggcgccagaattgactgagaaatggacgggcggcaaattgcggtttttgtcggtcatcggaatcactgaaaaagcaaaaagggtgcaattaattatggggaaaattgacgggtgaccccgccatggctttaccctgcaaagtgatggtgattaactgacgacgcattgcgacaagcgcagtgaaatgcgactgatcaaaacagagcaacagcggagaactgtaaggaaaaaagagtgacaattgtggcaatcaaatttcatatttacgccaaaaatagggccagttttgtgggattttaaattaaaaattggtgattaaaattcctgggggtgaactgaaccagtgaaaacagacagcccctgaaaatgtaattaagttgggcagttttctgaaaaattgtctgaagctcgggcggacactcaaatggcaaataaatgcagtttgaccctcagtgtgctgatttcgatgatgtcccgctccaaaaagtggcggaagtcggccgggtactgctccaagttgggcaaaatgaaggcgtaggccggctctttggtcactttgcgaccaccgcgcaatgcgccggaacgccaattgaccggcggagaggacgaacctgggaaaatggggtgaaaaagataaggaatgtgccaacatttgatgccattcatcccgacacattttttgaggaaattctgttttaaaaattcgtaactttgtggcttttttgggtctctgtggaaatggattggcatccgtagtggcaggaccgccataccaattgaaaaattttcataggttcatgaaatatcaaatccatggccatcacaatttgatgtcttggattttggaaatgaaaaaacaactcactgggctcgcccgatattccattgcaagagaacaaacaaagaagaatagacacagaggaaaagggaaatagtgttgtagttagatggcagacgaaaaatagataaaacgacaaaagaaaatatattttttaaatttgctctcaaacaacgctatcaaaagacaaaatcactaaaaaaatatcccaaaaatgcatttttccacttttattatggaaatttcaatacgtaaaattttgaatttgtgaaagaaacaataaatattttaacacaacatgcaatcgatttcccccttcaatttccctcctcaggatttccatcaatcgacggcaatttgttttcgccggaagaattactcgaagcaaagtcagggctcgcaattggtgaagggttctgattcagttgaatctgtgttgaaatatttgtaatcataataataataattagaaaagatggttgcatttatttctctaattttgaaaatggtagttttgtggtttctgcaaaaaaataattttaaaatttaagaagcacattttcgaggctaaaagcgctgatcacgatctgagcttaaacttggcaaaaccattgattttgtatttttattaagaactgattttttcaaaaatttttaattttcaaatttaatcacccttaaaagaatccgctcaattctggacatcattccgcgccatttgttcatggaattagcgaagattttaatcttgacaacatcccattccttaagtgttgtttagttgaataagcaattcattaccccacgaaattcggttttccgattttatgaaaattgtaaaccccgaaagattctttcattttatttttaatcattcaaaattttctttaccaatgcgtttattggaaggagttggatctcacacaaatacttctgattaaacttcactgaattaacggcgaagaattgacgaacactgagtcgctgaaataataaattgtcatttgatgatcaaaaaacaaggatttggggattctcttgtcatgggcaataaaaagtaaattgaatttcaaattacccaacctttttaaaacatatttttgcatgggttttaattttttcgcccattttttaagcaaatatgacaaaaatgttctcagtaagatgtaaaaatctcttattttttacgtattcacctgcatctggtcatcaactcttaacgagaccacgcaaatccttccatcgtcgacgtccgtaccgaaaaacaaattcgggctgaatccgccaaaaatgaatgaggcaaataaagcgcccaaatcgtgatgagtacgattccgtgggagaaacggtcgcagcgtcacatttgtaaaattatatgttgtgttggcctctcgctcggcgaccgtcttaaaaggcattgcactaagtcataggaaggggacaattattagagctcttaaaaaacccccatttttaaaatttgatgtgcttaaatttgctaaataaaaagacgcaaaaaacgtgatggtgtttcagttttccatactttggttttccattttttgcctctttcactcctccgaatcaaatcataaaacaaaaaattagagttagccaaaacgcttcgacacaaaagctcgggggcaaattgaagcaattcgttgttcaattctgccggaagtttgcggacaattttaggtttcattagtaaagggccaaagggttaacaaggggaaagggtttccgacaaaacgtcggaaaagggatcaatcagttggattttctaaaaagcgattttaggtcaaattcacataaaaattggcccgaaaagtggggaaatataaggtgatacaaatcaaatattggaaagacaaaataatcagttaaaaatattttcttaatttatgaataaatcaatttttaaacatactccgatggtggacacattcacagagaacgttgggacagccgcagcagccatacgaattgataatgatcaaattgtatttttgaagaaaaaaaaatgcgaggctaaagtgaaaaaaacagaacgaccaacagacaaacttaatacaaaataaaaatgttgatttagaacgatgaatggtattactaccgggtcaatggcaactcgtacaaaagtcaactggtatcttacaaaacaaagcctaagcttaagcatagaccaaagcaagaccaagcatagtgcctaaagattaggcctaagcaattgtacgagttcgcatgacacaattgtacaacaatcgtaaaacagtcgcaaaaagtattcgttagatatttaatatgaagggatcattgaaagtgagtgattcgaaaaaacaatatattttcggatttagaatgaattctcaaatcattgcttggtggtttttgcttcaacagttcgaaagaaatttgcagaaaagaaatgagaaaaattggacggataaatgaatgaatgactgacaaatgaagtgaatgagtgagggcggacagattctgaacaaaggaggaggggtcagagttgggcagacagaaaatgacctaatagaaccaacacaaagcacagaagagaaacagaagactatcgattatttgttgttgccttaaaggcgcactaaaaatgacagagagcgatgacacaccgtgtctaacacacgcattgaattcgcaaatattacggacaaattcagacaaaaacacatcacaaaataagaaattaacggtctgaccaatatgtaaaaaagaagcatgtcggaattacgtaaaatgccgaggcacacttatgcttatgggggtggagaagcgggtatacccacattatttgagaatacgtnataaatggaaacaaatgaataaa

SEQ ID NO: 5263 - DNA, 2813 bp, Heterodera glycines
  unsure (1)..(2813): unsure at all n locations
cattcatccccgancacattttttgaggaaattctgttttcaatattcgtaactttgtggcttttttgggtctctgtggaaatggattggcatccgtagtggcaggaccgccataccaattgaaaaattttcataggttcatgaaatttcaaatccatggccatcataatataatttttcacagtcaaaaacgataaagttaaacatctgtcattattaatgactcattaagaatcttatttttggcagcgttgggtcaacccaatttctttttgtgccagttttacaactttttttgtatcaaaatttggcaattttacgcgaattgttgagaaaatatttaataagtgaactagcggagcgaataaagtgattgaacagtttttttgtatttatgtcaatgaacaaaagtggaagaaaatgactaatcggcagaagcagcagtgcttttttcggggtgtgcaaatttccgtctccgccggcgggggaaaaacgcgtaaaataatttatttgttgtactctctgcccacgaaacaaacaatgtaaaacagacacagaggaaaagggaaatagtgttgtagttagatagcagacgaaaactgatatatcgccaaatcaaaaacagtaccatttcaaaaaagatttttattcaaatttgctcaaagtatggagccacgcgccgagattttgcgggaatctcagtccgcaattttcatttgttaccaaaaacataggcatttcctaattaaaattgactcttaaatttattttatttagaaaaatcacttttttttctaatttactaatggcagcttcctcatctgctgcttaccccgtgctgtttttcacgcaaaaacgggcgggcgatggtgagttattggcacataaaacaaaaaatatttgtcgccgggcggtccgaaattttggaattttcgacccttttgaatttcatacgaattttgttttttttctcccacttttattcatttttgattttttccccgagtttagacaaactttgggtgttctactggctcagcgatgagtcaaaattcggcatcgccagcttccccgacacagtgtacgaaatggacgcggacagagacacgaggagggcattcctcggcaacattgccaagagtttggtggaggagtactgggagtaagtgaacatttttgctaatttaattgtttttttactcttaaagtggaccccaaaagcttcacggaaatcaaaattaaaaaaaacacctaaaatggggatacaaactaaaatagtccgaaaaatcggtatttgtatcgatggcccctcactttgacgaaaaaatatatgcctaaaaagtagtatagatttgaatttaggttcagaatttttgaaaatttatgtatttttaccgccttccgttaccaacaaattagaaaaaaaagttacgttttgtcaaatatctcaggttttggacatttagcgaatttaaaaatataatttgtttttaccaacaaattttccctacattatgcaatcccttccccggattaggacaatgttcgaggagggccggaccaagatcaagcaggtcaacgacgagtccgccaccgtttgctacgccttcaaacacttcctggagttgccgcgcgtggacgacgcgacggcacggcgccaacgcattgaccgactcgtcaaatttttcattgacgaagcgctggagaagaagcgcatggaggtaaaaattgaattcaaatttgatggaaaatgtctgaattcgtgtaatcaacaaaatttttctaaaaaatatgcgtattttctgcgagcaaaaattcaaaggaattttttaaaaaattttttggtctgttttaaaactaaaaattgaatctttcttaaaaaatcttgaattttccactaggaaatttcaaacacatgcaacggtaaaaaatggcaaaaattagacctattttttgggaaaaaccgctacaaattccttcttttactctccctgggggctgaaaatttataaaaccattgagaaaatttttttttttttgtaattttgctccgaacagtaaacaggaaaaggccttcgggttccgctaatccgaaagtttctggctacaagtttgttctgaatttgatttattccggccaagataaactttttgaaaatcactactttttgtcgtctgtccattttttttatcttttcagcagggcaaacagcagcaggtgtccgtgtccaacaattggtcaacaaatggacaaccacaaaacaaaaagagtccgatcaaggtttgtttgtttaaacaaaaaaaaaaaatttttttttttggggggggggtcagtttttcccagagggggagccctaattaaatggggctaatagcctccggccgggtcacaaaattgtatgaattttgtaaaataagttttgattggcaaccaagcaatgtaatggacagcccatccatttaccggaaattttttaaacataaaaattaatcgaaaacttttagaaattaaaaaaaaatgttttttttttttgttttttttggtttttattttcaaattcggatttttttcagaaaaacgggaatatggtgttcatcgggagagggatttaggcccaacaaaaccatgcgaaatgcaaaataattagcctaacaaatgtgaaatattttcagcgaaaattgccggcaaactcgcgcaaggcactccgcaagttgccgaccatgggcctgaactttgacgacgtaattgaggaggatcagcaacggttgcgcgacatgcacccggtgggtcggaaaatataaataaattaata

SEQ ID NO: 5264 - DNA, 1235 bp, Heterodera glycines
atagctattgcatatttcattcatttattcaaatatattattattcaacaataaaatttattttataaaattaaatgcaaattttaaaaatttgttaaagcctccatttttatataagggctaagataaatggcaaaacgacaaaaaaaaaactacaaaatatagggcacccctaatttgagaaaatataataatgatttctagatgtgccatcagttatatgagatgcaaatagatacataacactaatttatgctatattccaattttaagctttaaaaaaaacaaatatttaattgccttcactgttaagtgctctgtaaatataatggtggcaaactgaattttcattgacccataattaacacaaatttggaaagatataattaatctgctcaatcagtctcatatacagtgggtggcggatttaggaaatgctcaaaggttaaattgttgattccaaaaaaaagttttgaaaaaatcttttttgacctatttggagtttttccaatttttttttcataaaatacaatgattaaaaataattattaaatttttagattttgccgttttggtgcctttttggcgttttttccggaaaaatccttaacaagaatgtaataaaaaagaaaacccaccctaagaaattacctgaaaaatttcaaaaaatacaccctaagaagtgaaaaaaatttcttaaaatttgatcgccaacttatttttttttaataaaaataggtctaaaattttccaaataatttaatgatcaaaaattattaacaaaaattcaatttttgaggactttgccatttctttcgtgaatttttggctatttgttcatgattttttttttttttttgcatttttcctgactttttgacgtttttatgacttttttgtgactttttgtcgattttttataacttttttagtagactttttggaggtttttcgtgacttaaattcccagctctatttatgattcgaaatttttccaaactttttattcggtaggatgcccacttctgtggaaataaaaaaatgctgctgagatgaagcatgaatggtacaaagggatgtgcctaggtttcgcatttcgctttttggcgcgaaacgcgacttttacacccctaagaattggattaaattcccataaaatttttcaaaatcttacctataaattgactaattttcagtgaaaacctgtttataaatgatcaaaatttccaattttt

SEQ ID NO: 5265 - DNA, 4887 bp, Heterodera glycines
  unsure (1)..(4887): unsure at all n locations
atatatatatatatatatatatatgtaaaatttatataatctttcatttattataataaaaaaatataaanatatttttttcaatcaattttaattcaataaatggcccatatgcttacgcaaaacgttaacacgtaatcttacttttatgtttctaccagtatttcattcatttattgctcaaatatataaaaataataaatttatttataataaatattgtaaaatgtataagcaataaaattattttcaataaaaatataaaattatttaagataatttaattcgtaaataataaaaaaaataaatatattaaatatttgttaaaaaagtccatttttaaattatttgtctcacaaaaacagaatgcttcgcaaccaaattttctggattgctttactgttgtcacttcttcgggtggcacaattagctccatctcacggtggcgccgcctacaatggttacaacgaaagcgaaaccgagggggacgaaggtcattagtcattcaaattagtgcttgaacggttttattgcgctaccatggcaattttttggcacaagatttgttataactttcttcagggatttaagtaaaaatatgtaaataaaactcacccctggcactttttttttgttggcacatgccaaaacctgaccgtacaattttaccaactcgaaatcctacccaaactttttttttcggttgaccgtcctgaactccctatccgagttttttcggcccgcaattttcttgggatacagaaagaaaacttcgttaatttttgtataataagtaattttttggttatgccaaatcattgttccgcgccttttggaaatatgttctctatttcaacgcctcaatcaactaatggaggtattttaattagcaaattttacatggaaattttgattttcaagcattcaaattaactctcatgttttaatacctatgactcgaaatccttgtttgtttgtttttatcttcatcagaaattcggctcgtcttttttctgtcgacacgccccgaaacccggtccgactttgttttcaacccgaaaccagacaataacactttagtcttttccattttttcttaatattgagctaaattccttaaaaaacatgattttttggaccaaaaactgttagcgaactgtgctaaaatttacaacagtccccccacccccccccctaccgccgtcccattcaaacatttttagacccgaaagccgaagcccggttttgtgggctcgaaaactgtcccgaacttttttaggcgtcacgaagcctataacccgaccctacatttttcccaaactcgaaatcctatccgaaatttttaatttatggacctgccaactcatggtttcatgatttaacaggaaatattttctctggttcaacacatcaaccaactgatgaagaaggtatcttaattaggaaattctaatcaaaattttgatttttaattatgcaaagaatttaagtacttattttaattttttttttaataaaaatgatttcgttattaaaaaattaaaataattatatttaaacaaaaatattacacagtttttcataatgatgatgatgatgaggagttaaagcaactcaaagatcgcacacgtgccgaatatgatcagcaacaaattgcgaaagccatggaaaagtctatggaagaaattggaaatgatccatatcgtcaagagatggaagcaatcaaacaactgtcattaaaagaacagaaaaaaagggagaaagaactgattaaattggccatacaacaatctatagaggtactgtaataccgtattaccgaaatttcttttttgtttatctttgtatttgtctcggagcgcagagttggggtttttctcctattttcaaggtgttatgcgaagggctcaaaattatatgggtttatagcaggggtgcgatcgaaaatttttcaaaatcagaacatcgggctcaaaaaatcagattttggggtcaaaaatcagaacattttgcaaaattgcttcaaatcagttatttttataatttatttaatcaaaaatgtattaaaaaattatatttttcgcctccgattatcatctttaaaaattttggtgaggaaattagcaaattgaaaatttcagtgcactcgggatgaaaaattagactttttagaattttttttcggcggattttccaaaacttttgggaaatgggcgaggggagagggtccggcggtgccgataggcgccgccggaaaattttttttataatttcgttttgatttgttaacagattttcaccaaaaaaaccgctttttgcaattaaaagctaagcgacgacttttccttgcgttccaaatgttgccacaaatcttatattttcttgacaaaaaagtaacattatgccacaaaatttcaaaaatatgagtttatctaagaaatcagaatcagaacaaattttggtcgctaccccaaaatcagaacatttctgacaaatcagaacatttttattttatcagatttggaccctccaaatcagaacatttctgacaaatcagaacatttttattttatcagatttggaccctccaaatcagaacatttctgacaaatcagaacatttttattttatcagatttggaccctccaaatcagaacatttctgacaaatcagaacagatcgcacccctggtttatacatatttttctgggcatacatatgctatgaagaaaggggctcaaaaaaacgcatttctgcgttaaaattttcttttttggtgaatgtttttaatgtgtagaaatgtatttttttttggggggggggttccgagaataaatgcatatttcgccatttttgcgtttttagtccctatttatgcaaaattttcacaagaaaaatgcaaaaaaaaaaaagaagcgaaaaataacatcactaaggatcgagtttagaaataaaaaaaatacaccccccaaaaaggagaatttttttgaatattggcaaatttttggggtactttgttagtgtccgaaaatgtttgctgacatcaaaatgaaattattacaaaaaatttttttgagatgtattagatttgaatgtgataacatttggcattcttaaggtttaaatccatttttaatagtttattttttaagtttatttgagcaattttgaatatatacacatttttgtaacttttgtgggttttaaactatatatatatattggcagtttttagtccgtattttggtacatatttggtcatttttgagcttttagtccatatttcgaattttagtcctatttgatacgctcataagcaactaaatttttaatttttgatgtctttcgcgagccctagatattctctattagccagtaaaatttcaagaaatttcgttgagtttcaaaaaaaattatgatcaaaagtttcaaaatttttatttgggtcttggtcatgaaatttttttaccccattcttttttttttagtccaataatttgtaattttttaattcaacagcaaaagccaagacaacaggcaattgaagaaaaatctgaacatgaaaaactgtttcatgatcttaatgccgtggaatcagaagcgctgcaactttatatgctcggcttggtaggccaagcgaaggcactgcttagtgaaagtgcgcaaagtagaagagctaaagtgaaagaaagatataaattatgggaaatgcaaaacgctggtggtggtaatggtggtagtgttggcaccggtaacactggtgccgttattggtagtgccggatacggtggtgccgaaactgatagaccgtatctaaacagcaggccggagagcagtaaagcagcggcgcagcgtggaaaagctgtggatcaaccaaatgaagtaaaagcaaaaatttatcatttttgtgatttctcaatatttttgaaaattttatgaaaaattttgaaatttcgtaattttcgaaaattcatgaaaattttacaaaatatttgttttggtaaaatccgttatcggttaatgtccaaattggtcaccgagaaaattttttaaaagaaattaaaaattcaaattttccttaaccgacctattgataattagggtgatggtttatacgggctaaaatattgcataaataactatgatttttgcaataggctttttccaaaaaaaaacagaacttaatttgattacaaaagcttaggacagacttataaaaaccaatttgttctctctacattcaattttaaatccacaaaaaacgcttgccctactgaaaacttttaatagtttaagctaattaaaaaataatttttaattagatttattcgaaagctaattaaaaaaaaaaaaatttaaggcatcggctggtgatgaaggattgaatgaagctgaaaaaactgtttttaagaatggacttaacatgggaacaaatgaacgcgaactatccctttttcagctttctgataatgaaagcaaagataaagtgttcaatgcttggcttaagcaagatataaaggaacaaaaataccgtaaattgttggacaaggacaacgatactagaagggaagtgaagagatagagagagcgagagagtgtagggggatgagtttagtaatgatgtacaaaacggaaattttgccgagaactcaagaccacgactaaaaaaataccccaacttttgtcgagaccaaactctcggaagtgttacttactaatacaggagtgttcttgactggaaagcgagaattgaaaattgaccaagagggctgagactgtgagcagccaaaagatttctcgaaaccctaacatatttcagacccgcagaggtggtccaggtggagcagttcacgcagttttcgcacaatgggatgtcgactgaatgat

SEQ ID NO: 5266 - DNA, 1004 bp, Heterodera glycines
  unsure (1)..(1004): unsure at all n locations
tttataggaaatagaagcttgtgtaatattttacgagattcttgaatatcaataaatatttcaagaaaactgaaaattttgcaatttttatttatttcatgacaaggacacaaattttttatgttttttggattttaaaatacataaaaatttaaaataattttatatatttttaaataaaaaaaaaattatgaaagaaaataaaaaagaaattgaaaataattcttgttttgctggatttcatttgaagattttggtggtttgttaaaaatacgacagatcgaataatcaaggacgacatttaaatgattaaaggacccataaagatctatgttcaaacaaattcactgctataatttaatatcaggaagaagatgatgatgatactgtatcgcatatagggcacaatacagatgaagaagaggacgatgctaccgtattgcatacgaggcgtaaccgcgaccgggaagaggatgttgctacagtattgcatacggggcgtaaccgtgatcgagaagagggtgttgctactgtattgaacacaaggcataatactgatcacaatgcttacagtgacattgtatcgcattcggagcaaagtgatagtaatagtgaccagtacgaggtacagtaccatgataaaattgatttaggcaatgtagaggtagttattaattgtattacaataaaaaaaaattttttgggtctttgaaggttttttttacatgcctaccgaacctaagaaagtatctatgttggctaaactaataaaaaatatcaatgtgtggaaatctaaaaaaaagtatcaatgacagtaatctttaaatttaattattattttattatttaaaatcacaattagttcaattcaaattttaattattatttaaaatgaatttaatttttatttcaaattacaatttaatcaaattcatcagtcttgtggtactgagcgatagagagtggtttaaacttttgtattacaacanaaaatatgaaaaatt

SEQ ID NO: 5267 - DNA, 1702 bp, Heterodera glycines
  unsure (1)..(1702): unsure at all n locations
cttgttcatgtcaccaaatcggagagttgtgacgcggccgtacattgcaaatgcatctgtgaagaacattatttcggcgacaatgtgtcatcattttcttttcttttaattccttccgtttgaattcagtgcgaaaacatcagtccgtgtcgcgatcgcgaatgtcttaacctgggcagatgcgaatacaatccaaacagcgacggagcgcagtgtgtttgcccaagtccattacagttttttcacaacggagtgcaaataagcggtgaattatcagcaaaaagattgattgatcataaatcaaactaacccattttcaggcgatttttgtgaagtgatcgattttgatgagaaaatggcgtgtaatccttgcatggaaggaaaaaactttgacgactataacaattgttggaagaacgcatttaaaccaattacagacaaatttgccaaactgtgcggcaaagagacttgtacggatttgctgaaaagggaaaaaaagttttgcatgaacggaggcgaatgccaagtgacagttgctaattgtaaggccaacgagatgatggcttaattatttaaggttcaatattttctcatttagtttccgatctcagccccaaaaaacctctgtttttgattccaaaatgccaatgcgattctgacaaatttgaaggcgacttctgtgaacatctgctgctggacgagtgtgacaaaaaggacttatcgttaaatgtcgatgtgggcaaaaataagacgggtaaaattgtctaattacgttatttaatgccaagatttttatatttacattcgaagatcgtatgaaaattattggcactgaagagtttttgcgggagctcaaaaacactgtatttgacccggcccaaacgaaaacgcagagtgccaatgcccgagcggtgatgagcaaagcattcgagcgagtgcttaagacaagaggtaatagacgaacacacgagccatgttgtttgtttatattttgctcgctttttaggaatgatcactttttgcggacccaacggattctgtcgtccctataacgaaggagcaggctttagctgcaagtggggttttcagcataaattattggctgtctttgagtagattttcctaatccattcgtctgttgttccgtcagatgcgacgccggctacacgggcgtacgatgcgagacgaaggacccgtgctgggccagcagttgtccggcacactctctctgcgtggccatcccagcaattgatgaggaggcatcgcccgaagagcaaaacaccctgaggcaaacatgcatttgcaagacaaatcaggaaatagagggtggttaacttttttattgggacctcactagacgatcgcttacagacaacaaatgcttcgataaaaaaaggggaccgtataaagtgtgtttcgatgaaaaaaacaaacaacccaagtgcgctaatgatggtaacacgattatgactaatccatattaaattcaactgtcgtggtgccaactttccatatcttaggccattgttacccgtgcgagttggacaatcagttgttggagaaagcccacgtcaaagtgtcgcgtatgcctttgtgtgatgcaatggaaagaacgcgtggcttccgttgcgtttgtccgcccggctatgagtcgacttcgaattgtcggaatgaagtcanccgtgcgatttcatcactgcca

SEQ ID NO: 5268 - DNA, 3376 bp, Heterodera glycines
ccgagcggtgatgagcaaagcattcgagcgagtgctaagacaagagtaatagacgacacacgagccatgtgttgtttatatttgctcgcttttaggaaatgctcactttttgcggacccaacggattctgtcgtccctataacgaaggagcaggctttagctgcaagtggggttttcagcataaattattagctgtctttgagtagtagattttcctaatccattcgtctgttgttccgtcagatgcgacgccggctacacgggcgtacgatgcgagacgaaggacccgtgctgggccagcagttgtccggcacactctctctgcgtggccatcccagcaattgatgaggaggcatcgcccgaagagcaaaacaccctgaggcaaacatgcatttgcaagacaaatcaggaaataaagggtggttaactttttttattgggacctcactaaacgatcgcttacagccaacaaatgcttcgataaaaaaaggggaccgtataaggtgtgtttcgatgaaaaaaacaaacaacccaagtgcgctaatgatggtaacacgattaagactaatccatattaaattcaaccgtcgtggtgccaacttttcatatcttaggccattgttacccgtgcgagttggacaatcagttgttggagaaagcccacgtcaaagtgtcgcgtatgcctttgtgtgatgcaatggaaagaacgcgtggcttccgttgcgtttgtccgcccggctatgagtcggcttcgaattgtcggaatgaaagtcaaccgtgcgattttcatcactgccaaaacggggccaaatgcattccgatgcctgagccggacaatgcgttgaactacgcgtgagaggaagcagaatccatgctcgtaacaaatgacatttgcttttaaaggtgcaaatgtatgcccgggtacggcggctccttgtgccacctcgttgaggatgtttgtttggccggtaaacaattcaatattgagcaagccgatggatgcccttttcaggttcgagttgtgggaatggcacgtgcaaattggactcgactttgaagcgtggctttcgctgtgaatgtgttcagggttatcatgggttcgactgcgagcaaatcggcaccacaggatttactgcctttttcaatgtattcattcatttgaattttttaaagtgtatataagggttagacctgtacctggttccaggcctggtttttttgcagatacaggtcagaccattttttggcaatctgggtttttcctggaccttgattttcctagatttttatccatgaaatcaagttccaagttttttttatagtactgaactttagttttataattgaatttccgttccggtaaaacgtcatttttaattccgatttcttactgtatttatgtatcatttacacaggaaaattatcgttggacctatcccttgctggtgttttcattgctcactcccgttattctggtgtccatgattttgcaagaccgccgaacagccgcaaaatacggttcacataatgaccggtcctattatcaagtactgtccaattatgtaaattgaaagataatggtgatatgtaatcatattctattgtatttaaatgttaaatatttatttgttatttgatttcaatcgaacgtgttgaaatgaattcctttatttctcagtgttttgtttaaaattcattgtttcacattttgtttaatttacctaactgctttgcgatgacaaaactttgtttgtttgttatttgtttgatgatttcgcttttttcctgactgcgctttgctccattattgattccctccctccccctttttaatattcacttttctcccttttcccaccatttgtcccatacgcattcatttattcctcgtactgctgatgatttcgtttaccacaatcacaccaatgaatatcgttttgacagaaaggtcgccgccgttaataaaatagtcaaagtgtgattcgataaagacaacacaatccatcccatccctttttccattttacgggtttttgtgcaacgtccacaaagggtgagcaaaatatttaattgatcaaagccgagaatttattttttttttgattgaaagaaagcaattgcttttagtgttaacatcggatttgttttgttgctgcgagttgtaatcaagcgactttcttacgctgatggcggatgattgggctgagatcggatgcgactttaaagtggtgttcattcaccataaaccggaagacattgtcgaagatgcacacacattgctccaggtccgctgctgttagatttggccacactgaaaataagcacagattgcttttttaggatgcccttaccgatatgcagttcattgttggtggggcccaaagtgtactcgtctctgttgcacagccaaaggttcgttgtcattttcgatggcaatcttaaaactgatttcgtttagtctttcaactccatggataacggaacggacgtggaagagttggagccgcgcattgagttttacattggactcatcgagaagttcaaatccgtcggatgtattttcgtgttggatcatttgatgcaatgtttgcgccattaccaaatgcaaaaccgtcgtctgctttacttgcgctatcgtgtggaattccgtccaccgattggcattgatttgccgcccttcaaaaggcacttgagcgccgcggactcggcacaattgggccgcattttgctaggcaatgttatctggcacaatcagttgtacgtgcgtagagtggtcaagccgaacaggaagaagatggaggagatattgggcaaagacattcggcacgtacagataccaaagtctgtttggaattagccacacttaattagcccaaataaataacgttttaaagtgtgccattgaatcaacaacggaaaggcagcataaacagcggaggacggggcatcgatggccaagtactaagtggagagacgccattggaaaagtcggacagaattgtgaattccgctaaatcgtcgattgaaagtgacaaattctcgatggagaatggacaaagtccgaatgacagaaagcgaaaccatgaggaccgcaaaaagtcattggcaacagacagaacaactacaccggaagagaatggattgacagaaaaagcgcctccccaaatgggacaacaccaaggggtaagtcaataaacatttaattattcattttgtcatcctcctttggatttaaattgcatttattttttcttattacttgcagcgtggtcttaatcgcaacggagacagcggggtggagttagtgaacggaaatgcgcgcgatttcgacgagattgacggcattgtgccctggtggataacacaccaccggagg

SEQ ID NO: 5269 - DNA, 3960 bp, Heterodera glycines
  unsure (1)..(3960): unsure at all n locations
cgcgtggttacgtggtgatggaccattggattgcgtctaaggagtgtgacgatttcttcaacaatttggtcctatgcaacttcaaagagaaccgcgaagagacgctggaagcacttgaaatgttggccgacaaactgttggacagggcggagatcaaacatcactacggattgggtggaatgttccgtgagatattggccgaagtcagccgaaacggaaattatgtgcagccgttgagagaaggattcgaacgagtgaaaaaggcaaatcaaaaaagaatttattgtgcaaaattagtgaattagaaaaatcaatcggattgccaagaaagtgggggtggtaggtaaaagacaatttgcagaaaatgtaattaaacattaatgggacatagtaatttacaggtcgtcatcaccccttctcggatcattccttgcggtcacgaaattctgatgggcaaccgcgctttacgttttgaccgtgacaattttcctcccgagaaattcctccgcgtgatttttcgcgacgaaaattgggagagagtgcgcaaaaaccaagtcaacgggtggctgctcgagaagtttgttttggagcgtttggtctgcggcatttccttcgctggccaagtgtacagtttcgtaggcacttccaattcgcaaatgcgcgacggcggatgttattttctgcaggtatttcattggattgctaccggaacttgtgtttatataggctattaataattaagactgacctggaaggagttgatgagttccgaaatcgacttggccaattttcgctggtgccgaccatccccaaaatgatgtcccgcctcggcctttgctttacccaaggccgtgagacagccgtggatatgcggctgcgaatgctcgtatgggatttcaccggcatgggctgtaagaatgacgaggaggagccgtacaacttttctgacggttgtggttgtctgagtatgtcagcggcacgcaaaatcagtttcttgattggactcgacgagcacgacccgccctcctgttttcaggttgcgagataaccatgaaaaataatcgtttccgattccatttttcctgattagatattcagattatatagttaaatgttttagtttcgatacgctggttacaagggcgttttggcagtcaatccggtgctggaccagaacaaacagttctttgatacgtgtgttgttgaccttcgtcagtctgaagcggaattcatggcagtggactttctatttcggccatcccaaaagaagtttgaggtgtggcaggaatatgaggatgagtgtcgtcttgacgttgtgaagtgttccgctccaacaactgtcgtgctgaacaaaccattcatcaacattctggaccaggtacattcgtagccattttttaatttttattattaaattcccaaaggtgtccgaaatgcaatccgttcgatgccacaaaaggatttgttcgcgcattcattccctcttggaccggcacatttttgctgtctgtgcttcgctcactgacgaggttttcgctcgtcggaggttgcaggaattgccacggttgatcgactatggtgcaatgaattcggttcaattcacacgcgagcccttcttccgtctcgtcctccgtgctgctgccaaagtggccattcaccgggtgtgccaaaaattggccatcacaattccgcccgagttgggccgaatgatgttcggggtgatcgatgagaccggcattctgcaggttacgactttttaccagactaacgaaacttccataacttgttgtttagtatggccaagtgttcgtccagtactccgtcggcattgatggggcactgaccgaagttggctggcgcaacagaaaacctcaaaatgtgtccaacaaaaaagcgcattttgactggtagagaaagattctgtccaaattaaataacttcttttggtgaagggccgattttaatcaccaaaaatccgtccgtcgtcggtggcgatgtccgcatgtttgaagctgtggacgtaatggccctgcgtcatctcgtcgatgtgcttgtttttccccgttacggtccacgcccacattcagtaggacttacaatttaccttataatcattgaatgccaaaattactatttttaggacgagatggccggctccgacttggacggtgacgagtacacagttatctgggatgaagagttactgctggacagtacccagccggcggcggattattccgcgctcaagggaagtcaagcagtgaccgaggacatgacgccatttgagtatcagagtcaaatggcttcgttcctcgtcaactatctgaacaacgactcggtcggacaaatttccaactcgcatttggccaactcggacctgtatgggattaacagcgatgtccgtttttatttattttccatgtgccttttactgtttcaatgttaaggtgtgctcaactattgccaaaaagcactcccaagcggtggactttccgaagacgggcgttgctccaacgcaattgaccattcaatggaatgaagcggcggatattccgccggagaaatacgaacggacgcccgactttatgggcaaaatgagcaatgaggtggggcgggggagggaagaagcatagattaatggaagaaattgaattatggaataggaatcaaatcagtaattatttgcgtttattccttttattcagcctcattacgtgagcaatcggttgaatgctcaactttaccgtcgcatcaaaacactgagtgactttttgtcctacgcaatcagtgacgaatccgtcaaacttccgcacatggacgacctgttactttcgtcagatgagcactcggagttcattgagttggcggctgttcattaccagaaatatgcctattcaatccgggtttggcataattttcagaaactatattttatggtttgccctctcagagtttgatggactcctacggaattcagtgcgagggtgaactgttctcctcctcctactcgtccctgtgcaatcgcatctccgaccgtgaaaatgaggacatgtacaaagagaaaaaactatttattgttaatctagggcattgtttataggtcattcttcacaacttcgcgggttatcgagcagcgtctgtgggatattcgccaagctgcgcgcaaaacctttttcgcatcctatggaggggacatggaaactctgacggacgacgagggcatttgcagggagccgtccgatcagcttaaactgctagcgtgtgcttattacacaattggatactgtatgtttttaggaaattaaacattttaatttgacttaatagaatttgcttcgttaattttcattcgttctcttctttttcaggttcgctttcccgcaagttcctttccttcccgtgggttgccagttgggatgtgctcgatgccgtgcgtcgttcgcgcatgatgtccgcgcttggccagcctggcaccgccaccaccggaagctgctcccgtatgttcagcgcaatgttcgactcgttcggcgaacgtatctccgaacacattgaacgttttgtttctgcacgacggacgcagttggaaggattcagtgcccgttgttttggcactgatcggacagtaactgatgggacggagacgggggaccattcggacagttgcgcgatcaaacagttgctgaaccgttacgtgcttcgacatgaaggtgaattttcaggattttgacaacggagcttttgccattttcaaaggtcttgccccactgatgttcttctgtgtatcgtgggctgaacacatgggccttttcgcgcagagtccgctcaaggaggaacatatttgtctccttttgttaagcgccggtctgacgaatcagcccccaaacgtaatcaactcggaggagcgtcgcccttggctgagtgaggtaattnggtaattgcccgaaatatttgaaaaaggat

SEQ ID NO: 5270 - DNA, 982 bp, Heterodera glycines
caatggaaaagaaaagagagtaaaagaaatgaaagggagagataatgggaaatttctctcgcatcccttccttatttataacccattttttattgtataaaatatttaacaaaagaatgagcacatttttgtgtttgtttgagtggaaaatccggtatatgaaggttctgtttttgtgtgtaagaaaaaatttgtggttttgctgtttatcattatttttttgtctaaattttgtttttgttaattgatttgattttgatgtggaagcttttgttttgcttatgtaaacgataatggagaattgtttggttaaaaaaatgcattagaatttgtttgaatgaaaaaggtttgttatttaaaaaagttttttgtacttttccttgcttataatatgaaaagaatctgatttggtttttgatatttgttttgaataaaaagcatgttatgatagtaataaaaaatgaaagaaaaagcctttgatggatagaaaaagcaatataaatgctacatctcatgttttgcctgtgttcgagtggaatatttatatgcaattgggatattgacgtgccacttgcgggatcaaatttaggtggaaagttttaaacaggtcagttttaatttgaatttatggggtgggggcattaattatacaccatagtgttttgatttatgggttatatttcaatttctggattccttttaaatagttctgtattccgttgctgaggttgagttccggtgattgaaatgtcggagaattgagtcccagtaattgaaatgcagaagaattgagtcccagtgattgaatgctggtggattgagtcccgttgattgaaatgcttgagggttgagtcccagtgattgaaacgcaggagaattgagtcccagtgattgaaatgcagaagaattgagtcccagtgattgaatgctggtggattgagaaacgttgattgaaatgctggtcggttgagtccccagtgat

SEQ ID NO: 5271 - DNA, 3377 bp, Heterodera glycines
aaaagacttttttgatcaggaccaaaagttagacaaggaggatttttttcagaattttacgtcaacataaaattgaattttggtcgattaaaaattattttccatacttttgcacctgactgtatttgtttttttttctgaaaatggcaatgtcttttactaattattattatttttttgtgtttgtactattatttctaattcatcttcatcccaatttttcatattttctttttaattatatacagttctttagctgaatatttattttccatttacttaatttttctttatttttaatagggatgcgatttttaggcaaatgcctaaatttattgcgcacttaatacgtgtaaataagcatgaaaaacgcattttccgcttggtttttggaaaaattatttgctataaaccaacaaatcactaggtttcaaaagtacatctttgataaattttgacatttaattaatcagtttatatttttactgatttaatcaaattgttaagatggctttctggattttacattattcgaaaaaatgtcaattattgaagaatgttgttagaaaataaaatattaaaaagttctacaatcatcgtgttaagaaaaaaacctttgaatatcgtgattaaattttcacataaattgttcaaaaacgagcatttttagaaaacaattttttcataattttatcccatttaaacaaacataaaaatttaaataataaatatatattgtgtataaaattcaattaacaaataaatatcttttcaatttgtttaatttttatctttttcttcacaaattcctcctcacatccatcagttttcattgttttttcaacacattttgcaagtgttggcacagaacagtctcatccaaatgccaaaacggttgcacatcctactgtaacggctgcacagtcgggcaccaatacggtcaatgcagctaccggatgaaccacctgaagctttggtcgtggtagatgaggtgcttgttgaagtcgaggttgtagttgaagtgctgctggtcgttgatgggcacatgttgcatgctttggcacaatgctgtttaagccatgccgaaaatcggttgcacctattcttgtaaaagttgcacgctctgtcaccggccgcgttggtacagctgctggacgacggattagttgtggttgacgaagtgctggtcgtagttggtgtagtcgttgaagtactcgttgaagtcgaagaactggtcgaagtcggtgtggtcgaagtactggttgaagtgctggtcgatgtactggttgaagttgaagttggtgtggttgaagtgctggtcgatgtacttgctgaagtcggtgtagttgaagtactggtcgaagttgaagtgggtgttgtagttgaggtgctcgtagaagttgatgtcgaagaactcgttgatgtcgatgtactggttgagcttgaagtcggcgtagtcgaggtactggtcgaagttgaagtgggcgtggttgaagtgctggtcgacgtgctcgaagttgaagttggggtggtcgaagtactggtcgaagtcgaagtgggcgtggttgcagtgctagtcgacgtactggtcgaagttgtgcttggggtcgtggtcgatgtgctcgtgctagtactggttgaagttgatgtactcgttgacgagcttgaggatgtagatgaatcgtcttgggatacaacataatccgtggacaccatcagcaacataatgcacatcaattggccgaaccatatttggcaattcattttcaattgaaattgtttaattgaatagtcgaataattcgaaagtgattttttgtgaatatttccaccgcttttatattggtccatgacgacataaagcgggtaatataacaactaaacaaactaattagtttattcattttttccacgttaatggtgaaaagtgtcaaaagtcgtcaacaatttccgcttaattttaaaaactttcccaactgtttgccgaaattagtgaaaattaagctgtttcaataaatactatcattctaacgaattgacgaattttcctttaattatgtaaacgagtgttaagccaacacattaaaaatttaattcatttaatatttatttgccattatgacgggatcggagtgaataatgttaggcttataatattacttcaaaaattaacacattgtttaataattaacagagcttagattttaaggaaaaagcatatcttaattagaattaaagatttaattttaagtacatcttataaattttttaatctaattaggttttaattttttattatttaaaaacataatttatttattctatgaaattgtgtaagcatgattcaatttattcaactaaagagaaaaaaataattaaataaaattatttataaaatatattgtttcttactccgattatggaagttcattttttacttaaaatatacttaaataattaatattttgtttgtttttaaaatgttcattttaaaatcttgcaaaggaaataaaaaagatagattattaaataaattaattttttcataaaaataaaatatatataatttataatcaaatttaaaaaaataaaatcttttcattttgaaaaatacccaatttagccgagtttcttgacaattgttcctttttatcgcggataaaaatataaaatatgtgtctttcaataaatcccaaggaactcttcgcaacttagccgtattttccaagaaacaaaattacttcaagaattcttttggcattaaaacatcaatctttttttttataattttaatttatgtgattttctttttgggtttgcttactttgactattttttacgtcagatccgtcaatttcacaaatgcatattattcaaacaccagggacatttctaattctataattgggaattttgtcctggtcaatttggtgttgagagtaattagtatagactgaaattttgaaaaattaccgattcgaaccagcattagtgaactggatccagaccggattcaggattaaaaataggctttacaacttacggtccgaattccaaaatttgacccggatcaattttttcaaaagtaaaactgaaaaaaaattttcaaaaattcaataaaaatttgaaattcaggcccagagaatctaagacggtgatttgtatttttttttcaaaataagcgcaaagtactacaatttttgaatgaattttttggccaaatttttgaaagatttaggaaacgtggtgaatttgtttttttagaacatttgataacaaattatgccaataccaacatttattggtttttgggcaacagaaatttttacaaatttaaaaggcactaccgatgtgaaatgggaagtttattgaaattct

SEQ ID NO: 5272 - DNA, 1962 bp, Heterodera glycines
atttaataaggatgctacatacacatttttgtgtcaattaatcaactttttcacattttgttccacttttcttcccattcagcccgagccgcagaaattgcatgttcgcgcacaacgctgcgtcagccaagcacggtaaacattgcatgaacgtctatagaaggaacatgccgcagtgccagccgaatcggtacaactgcttgacggcaatgtggttgttgtgctgctgctagtgctggtcagtgttgtctcagttgtactttctgtagttggagttgtggatgtacttgttgaacttgttgtggtggatggcgttgtagacgtacttgttgaacttgttgtggtggttggagttgtggaagtagttgtcgaagttgtgctcgtcgacgaactgcttgagcttgttgtcggtgttgtggaagtacttgttgaacttgtcgtcgtcggagtcgtagtgcttgagcttgttgtcggtgttgtacttgttgagcttgtcatggtaggagtcgtagtgcttgagcttgttgtcggtgctgtggcagtactggttgaacttgttgtagagctggatgtagtaggtgttaaagttgtgcttgttgatgtactgcttgaacttgatgtggttggtgttgttgatgtactgcttgaacttgatgtggttggtgttgttgatgtacttgttgaagttgtcgtggagcttgtactagtagatgttgaagttgtgcctgtcggtgtactagttgaacttgtcgtagtcgaagttgtggatgtactcgatgacgatgtggacgaagtgctcgtcgtttcttcttccgatgaatgagaagagaaccagtgggatgaaaccagtgttgtacccaaagacagcaacaaaactaacacggttttacaaaataaatatttgaaaatcatttcaaacaaaattaattaattatataatgtcgattttcactcatttcgaggcacttaaaaaggctggaatgacaacaaattactcaatattggccaaaactttgtccatgacgcatatttttgaaaaaaaaattttttttttctcaaattatttgttcagcctttttttaaatattatcaaacgaattttggataattaatttgcagttaagtaaataaaattaattcgataactaatttctctaatatctttgaatagcaatactgaaataaataaatttcaaaaattttagtgaatttgatattattaaattagtttctattgacatagtttttttaaaatttatatttattgccttattagttagtgtcggctgtttgttgaagttacttagcagaaacaagaacattatttcatttagaatatcgaaaatgctataatgcgaccatcaaaaaatcggacacaaaaatttaaatttcttaaaccgttcaaattaaatatatattattttgtttaagataagttcgctattttaaaaaattttgttttcccagtggtcacttaaataatttctggtttcaaatcttttgaatttaacggtctattttttgattagtgaaataaaaaataaaataaaataatttctatttttatgttattttgcctagtgccagttttctttattaaaaataatgaattaatttgttttgcttttcttcttgcacttttgtaaaagtacagcttatgatcattggacatactctaatttattgttttcgacaacatcgcaacaacaaaaaaatttttaagctctccggcaaccatatccggtaccctacacttttttaaaatccaaatggctcaaatcgggtcgatagcagttcgtacaatggcgtttcgtacaattttaaatggaaatggccataacttttttgttcttcagttgatttctttaaaattggtatcattcgaaagctctacgtatttagaagctattattaagcataagctaagcgattaatcatctcaccaaagagttatgctttata

SEQ ID NO: 5273 - DNA, 1756 bp, Heterodera glycines
  unsure (1)..(1756): unsure at all n locations
attatgcaattttatcataaaagccactaaacaataacaaatacaaaaggactaattaatttctagggttttcggcagaattttaaataaaatataaattttttaatttcggcatttcgtggcggaaacaaatccagttttttgtttaagaagctttgccactcaaatttaatgtgaagccttataaatcccttattcagtgatttgtgtatatatttaatcttcaattatttttggtgaaatgacacataatgcatttcgtgaaaaaatatattatgccaagtatactgtagcttatcaaaattgaaattattcatcaatttaattacgctatcttgtttttttattcaattacataatttttcatagataaatttaaaaattgtccaaaatattatatataatttaaattctttaattaattcaatcgcttttcagccttaaataaatttcgtagtttttaaaacctttatttttattcatatattttatattttatgatgacaaaatgtgtttggtacaaaagaagtttgtggcgccgtcattaatgttattcatttcttgatgacatttctttaatgagtttgttaattaatattcttccttaacaaacataattgacatgtaatgtccaaaatattttttcctttttttgtattcctccatttcaattatttaccataaaaatctttaaagtagacaattagcataaactagagtagacttgattttattttttatatccaatgaatccgatcacataattaatttgttggtgaatatgagaaaattcttagtaatttagacgataatagcttttggaagttttagccataacttttttagaatacaacgaaatttttgaaaattttcttactaatagaggactcttgaggcgctatcgaaagattccaagaatgtttgatttggatgttttagaaaatctaaggtgcattaatattttatgatcgtctcttttttatactcaaatgaatccgataacttaattaatttgttggatgaattaatacatcaaagcacaatatttgttttaatgagatatggtagaaatatgagaaaattcttagtaattgagaatataattggcattagtcacgtgctaagtcgtttcgaaaattcataaagcatcaaaagtgaagtggtcacataaaatggaaaaaaataaaaaaccaatttgttcaactgtttaaatctttcgactttttcctggtttccagaatgtaggtctcatcacttaagtgatttgaaaaaactcacgcatagttaaacacttccattgcttaaatgtgtaaagaggaagcatgacgtatttaaattattaccaccagttttgaaatttcgaaatattcttcaatgtaatttttgatgtaaaagaaacagtaaatttaaaaattttttgaagccatattttcttaagaaattcatatgcaataaatgaaatttaaattgaaatacgaaaaatgtttcaattttttttttttttgctttttcgtcactaatactgaattttctcattcaccataattgtttcattgtaaacctttttctaataatttggcattttaaaaactatgtattcagatggacataaaaaatgtttccgctattttggcttaaaatttcttaattgttactataaaaggaaagcaaatntatgattcgatcaaataattttttaaagaaattttagatttttgaaactatggtaaaagtaaattcaattagtttttctttg

SEQ ID NO: 5274 - DNA, 1379 bp, Heterodera glycines
  unsure (1)..(1379): unsure at all n locations
gaatggattcccaccataaatacagtaccatattttttantatgctttgtgatgacgaaatgagattggtacgaaattaattgagtgtggtggtacacgccgtcattaatgtttttaatttcgtgatatttctataatgagttttttttgtagaggttttagctcctccctttatttatttaaatgccatggaatgccgaatttttcattttatatttccttgatttaattttttgacataatttttcttaactgaaagacttctgtcacgctttttcgtgacaaagtgcacaatgttgtgctttgttgtccgatcggtgattggggaggagtgcgctgggattggagtttcccggaaacgatcaaagaacaaataaaattatttattcaccgcacaattggacaaatcactgatggggaaatgcaattggaaaatggaaatggaaatgcgaatttgggttcatttggggccatttaaatattaacaaaattacataaaaaattgaaaaagtggacagaaattgggcgaaaaatgagctgatcgaacggggggcaataattggagaaatggtgaaaaaatgggaaatttcgatcacaaatgtgggggaggtaaacggagtactttgatcactcaaatttcggtttttaccgcacaaatgaacgaaggagggcaattagtgacaaacaattttacggcggttggacgggaggaacggggcaaaaatagtaatgaaattgggtgaagaaaagttgcgatttgatgaattgtcgcttaatttgtgcgcggggaggggaaaggaacacaaaaacaattgacaatttggaggaaaaggggggcagcgggctgaaacggcgaaaacatgttgtccggggggggggaggaggcccctcccgatcgtagccgatcaatttgatcggctgtcggaacacagcaaagttccgacacttcgcataaacaaaaaaaaatagaatcatttcaatggtcttgagaaaaaataataaaagatataagaatttttataaaatacgttgataaattttataatcaatctcatagattaaaaaaaaatttcaaattaaaattttccgtgagcaatgcctatcggcatcacagtgccagaaatagtttgcatttttatttaattttgaattttactaatcccctggttacgttgataatttaaactatctttaatgaaactgttttatatagagactgtattaaatgcaaaaaaacattttgataggcgcttgatgaaaattaattttaaaaaaattttaaaattgccaaaaacattagaaaaattttttttctggtgaaaaatagaaaaattctataattcaactttttttaatcccaaaacannataatcataata

SEQ ID NO: 5275 - DNA, 2014 bp, Heterodera glycines
  unsure (1)..(2014): unsure at all n locations
gaggcgtttgtgccgtcgtcggcgtctccggagatgtttgtgccgtcgtcggcgacgtcgtccccggaggcgtttgtgccgtcgtcggcgtcttcggagatgtttgtgccgtcgtgctcgtctgagttgcagtttgggtgctttgttgcgtcgatggtggtgctagcgatgatgttggtactaccgtacttgtctaaatggattgagtctacataatgctgccaatcaaaaatggcacccaaggcacaagaggagggcaaagaacggaagaaatatggagcaattttccaggttaaaatttttagaaaactgcacaggagaaatttggaaaattgagtgtaattaccaaaaaacaaccaattagttttcttatactttgcgactatgccgaatacgcaataaatatatgtataaaatacataaataaacgtagtgcgacatttgcggaccgtcttttgcggaccgacatttgcgaccgtcttttgcgggtcatattttctggatttaattttcaaaaaaaaattcttaaattggatgatcatctcaatattgaattttatatgtgatttttcggagttaagcaagttaatgcgaatgaaaatatgaaaaatttataaagtttttccaaaaagttcttttttcaattcctcttggtgctaaaaattttgatcacttcatatcatccttaagtagtgatctgatcaacttgtgcaatgcattagtttataaattcctgatttacaagaattatgttgtcattgataatgtgagcaattcattttaattttgctttttaaagatataaaatatatttttatatcttttatttgttcttgatattaattgttaggtatatctgatcaaaatctataagctctttagactaaggctagtgggtgaaacaccaaaaattttgcgtgctatatatttgtgatatgatttttgtataaagcattttttaatcaatttgcctaataaactatatgtaataaattcgtttagttgtgggtaaattttccgattaaagaaaaaaaagtatgtcgaaattgacatagcttatttgttagagcaagaagcactattaaattatcaccttcagtcattatttcaatttggtgattacgaaaaattatttgaaaattcattttaaattttttttctttttttttgataattttttagtcacaaatgtcggtccgcaaatgtcggtccgcaaaagtcggtccgcaaatgtcggctaacctaaataaatacttccctttcaataatattaagagctaaaaacatttatttggagcggaactgaaccaacacaaaaacgaggcataaaatctagagcacaacccatccgaccttttttcgagtcgagaacttgagcagccctacatacgaccccatattatgaaaactatctatcactgacgcatttttcggtcacgcaccttttccgccggtgggcacggagttggcggttttggtgcgggtgccgggtagtagtaattgttgccactgccaccgccatatactgggggacgcttattgtagccgtacagcgggccgggcactggtttgtacatcggtctacggtagacgggcggtcggtagggacctgtgctgtgcaaggtaaatgtagaacaaaaacagcacaaaattcaaattaataagtcaccgtcctcatcccagtcgccgtagtgtccaccgctaccgtatacggcacctattgggtacttgtatgtataattacaaaaggattgtacgtgaacattttttatactatgtgagtaaactcaccaccgtatcctcttagtccgtcaccatatgcgccaccacctctactaccgtacacaaaggcagaagccaccgttgcgcaaagacaaaatgacaaatggcgaatgagtaattggggcgctaaatgcgccgtcgcgtacatttttgaccaaatatatttgatgtatttagttagggttacagaagtaaaaaagtgaatacccgantataaaaacatttttttatt

SEQ ID NO: 5276 - DNA, 3134 bp, Heterodera glycines
tcatcgcaaaaacactcaaagaaattttcgttttgttttggtgtcacaaaaatctccccaaaatttccaacttttgctctcctcccgtgacagaaaatttgcttatttgtgtagtgttaatcatccaattctccaactgcccaaacatttgattattcattcatcgaaacttttgtcttttaaaaatgccatcattttttggtttaaaaatgccatcgttttttgccttattcacccaatttaccgccattttttataggtgatttatgtgaaattggaaatgtcacattaattgatgaaaaataaagagcattttacacgagttggaatctcgagcaaattcttgaagcaagcaaaacccctcctcctccatcctcatcaattagtgtcggaaaagaatctttgacccaacaaaacatcgactcatcaagaaaataaaacaaatatgaaaggtaatcttgaaccaaaatgtgaaaccagaaaaatttgaagtttctgctgttttactaacggcattattaccgaactgtcggactcttaatttaactttttagagccacatcctcttttccacctactagaatctcccttctctcagtttgaggaatccaatttaaaagttttattttcttaattgtggattaaattagttctaaaatttcgtgttttttcgttttcgttttcgtgtttcattttcgtccaaccaaaaatttttgtttctttttcgttgtcgaatttcaatatgtactttgaattggccaattttggcaatcatattatttaaaagtgatcattttccaccttaatattgtactcaattttctttattatgtccttagaattggccaattttggccctcccattgtcgtgccagttttggcactcctttctgatttattgatttaattgaagctatttaagtgcgttgttgtaggtggcatttccatgatttacatttcctccttttcagtcaatttaattttcttgaagtttttactcctaagatttgtcacatttaaattagatgatctagcattaaaagctatttatgcaataaaaaaaaatcaaattttttaaaatcgtttaaatatatgccaaaaactaacaaaacccaaaaatattttttataagccaatagtccaataaatgttttagagaccacccgaataaataaattcaatcactctttttagaaggaataaatgaactgaatctttagaattacctcaaaaaagtataacaatttttatttattctaaaagtaatttttaaaattttggagaaaatctgtgatcaaaaattttcatgccggctaatatcgcagaaatgaggcacaataaattgaaaaataatccactaattacatctatttaattttagtttcgcttgcgctgttcgttcaaatgccattggcgacacaaacatcgatcttatatttttaattgtatttattcaatcattttgttttgtggtgaaaatattgactttttgaatgtttgttaattaatagaaagttcaaattaaaaaaaaaattcatcaggaaatttaaaatatttaaacaaaaattaaaatgttaaatttttatccaatcgagtcccgtaaaaatataacaaattcatctcatacagaaaacctccgcctctttgagctcttttttcactctccgaccattcgctttcatcccaaccaattgggccccttcgcaatagccacactccgccaaagcaaatatattttatataacgaaaagtcatccgttctcgtgtccgcgcattgtcccattcaaatggttgtccaccgtatttaaaaccaattccaaaattcagacaaatgacataactgacgggcgattcagcactgatgaacgcctaaaggcaaaaaagaaaattcaaaatttggcttatttaaacaccatttttaagtcttccaaatgcttttcaatgtgtgaaaggcccacgcatttgagaacttttgggcgtccgtcagcgcgtggagtgtgaagccacttggacagtgcttggcctacggatgcgccggtgccgtcgtaggagggactctcgggaaaaacttgggaacaataaatgcatcggagtttggcacactcccgaaaaacggatggggatgtcagcttcatcagttgactcaattcatttccattcagatggacaattgcaacaattccttccgaaaggaatggccaaaaatgctttgcgatttgttgtaaaacatcgtaagaccgacgattgttgcaaaaaagcacagtaatttccactttttgtaagagatgacgaatgttgtgaaagaagccaatgacaatttgatcaatgtaactggaaggaagggaaagaccaatttgttttccggcaattcaaaaaaaatttcaaaaattaaaaaaaaaaattttaaattaatatttttgccatccctagtaataaacagggatcattttttatgtaaaaaaagttacgaattatgtaaataaaatatgtataaaaaatgctaaaatatgtatgaaatatatacaaaaaacccaaaatatgtactaaaatatgtaaataaaatttttttaatggttatttttttggaaaaaattactagtaaatggtgaaatagcggaaaataggcacaaaatgccatataaataggctttgaatcagggatggagttccgaggcactaaaaattttcggaagtcggaattccgatgccccaaaaattttcggaagtcggaattcagatgccccaaaaattttcggaagtcggaattccgatgccccaaaaattttcggaagtcggaattccgatgccccaaaaattttcggaagtcggaattccgatgccccaaaaattttcggaagtcggaattccgatgccccaaaaattttcggaagtcggaattccgatgccccaaaaattttcggaagtcggaattccgatgccccaaaaattttcggaagtcggaattccgaccccaaaaatgtcggaagtcggaatttttcaaaaaaaaaatataataaatttttaaaaaaatatttaataggctaaatttttaaccatgtaaaaggtaatttcaaactgtttttagtttatttctatattttttaaaagatcagaatattataaataattttaca

SEQ ID NO: 5277 - DNA, 2531 bp, Heterodera glycines
cggaagtcggaatttttcaaaaaaaaaatataataaatttttaaaaaaatatttaataggctaaatttttaaccatgtaaaaggtaatttcaaactgtttttagtttatttctatattttttaaaaagatcaaaatattttaaataattttacattattttggattttttttttgggaaagttacaccttttttttgcggcgcgctttatccaaagagaatttgagaaactgtggggaaggaagggtccggcggtgccgatatgcgccgccgggaaaaattttgtaatttttaatgtaaattgttaacaaattttgtccaaaaaatggaaaatttagcgattttgagcaaattttcaagaaaattaagtttttttttgagtccggcggtgccgataggtgccgtcggaaaaaaaattgaaaatttctatgcaatttattaacataaattgtacaaaaattgctaattttttgaaaaaaaactcagaaaaattccgaaaaattccgacttttcatcaaaaatttcggaagtcggaattccgaggccccaaaaattttcggaagtcggaattccgaccccaaaaatgtcggaagtcggaactcggaattccgtgccatccctgctttgaatcacttttttgtattttaaattaatttttgatagctcattttttgaaaaaaaaaatcgatttttagggatagattttttaaaaaattttatttttcacaaaaaatttctataaaaattcataaaatcctcaaaatatgtaaaaaaatgaaaatatgtacgaaaaattgcgaattttggattttagggggcatttcagaaaaatttcgctaagaaaccatcaaaaattgcaaaatatgtacaaaaaaaatgcaaaaggtccaaaatatgtataaaaatatgtacatatgtaatatgtaggaaaatccgtaaataaaagtcccaacttttgttcgcaaaaacaaaaaagaaagtgttttcctactaattagagcatggagaatccaggaaaatgtatttacataaaaaaatgatccctgctaataaatgttcgttttttttaaatggtcaacaaaccgtattttaaaatccaattttttacccggcgccatccgtttgattttttatatcacttttattttttaatatttccatcaaaattaaaaataaaatgaaaacaattgccaaattcttacgtgtttacctcacgagaatggtcctgaaaccgaccaaattgggaggaggtggcacatccaaaatcggtgcccttaccatctgaccatttttatccgttagcataagcttttcgatccacttttgccttttcctttgccaaactcctcgcatttctgtgctcttttcttccttcttttggtaaaacccaagggcgcgaagtgtccattttttggtcctcaaatgtcgttccactaatgcatcaaaacgggcacagacaatcgcaattttgtggccgagttcgggacgcacaaaacaatcgaaaacattgtgccaaacgtcgtcacaaagatggctgaaaagtattaaacatttcaaaaattaagtggtaaaacattgtcacattcttattaaactgcgctcagcttcacgcggatgatcggacatagtcgtcggtgctggcagcttcactaatgcgtcatgcacaatcaaacattgtttttcgtatttctatggacaaatgctttaatttcggcttaaatgctacaaaaaaggaacaccaagaaatataatatttacgggttgttgggtttttagcaattattttattactggataactttaaatttttcacgaccatctcattaagaaatgtattttatggctttaaaattttatgcgctttcgaatgggttaattattttttggaaattttctcagccttttttcaaaatttttttgtccataataaatagtgaaaatttgtttgcagaaattttgaagtcgttgattaatatttgaatcaattccaaatcactttcccaatttgaacaaaaaattgaaattctaaaaatatttcgactttttcgagtttggattagggattggtcaaaattggtgtcagattcgagctcagagagattccgaaattcccacaatttttggctaggatccgttttcgcccaaattttcccggcgttcaaatttaaaataattaaaacattcttcgtcattgaaaaaattgtataagaacctcatctgtcctctaaaaagagaccaaatttattttttgacttatttaaatccgtttatgagcatattacaaaaaaaaaatgggaactgaggtcaatgtttgtgattttcgagtgtccgttgtgctgagaaaatcccaaactttgcccgaggggtctcctcacattcattccagtttctttgtccgcccattcactgttgcgcaatcccaccattaagagacatttgtgggacattcgcacagttactgttcaatttgttgcgtgatgatgggtcatttcccaaaaaccgccaaggggtaggaaaataaaaaatgtcttg

SEQ ID NO: 5278 - DNA, 7055 bp, Heterodera glycines
  unsure (1)..(7055): unsure at all n locations
ttttttccaaaatgggttaaaaaattttagaaaatattttggctactctcgcaaagttacataaatttgagtacacacacaaacgggttgcgncgggactgggaaaacattgggaccgggattagggttgggatggatcaaaatctttcgggtcacgacgcagattttggggcgcgaaaaattgggaacgggattcgtgccatgatggctaaaaaattctggtcgggatttgggcagatacataatgggacccgggctgaaatactgatgcatacgaaatttcatacacaaatcagcattttaatgcaattaattttcatcttcatcataccatgtaatttttttttgatttcttttattaatagcgtgattattaataattttttctgaaaatgaagaatggtaaattcattctgaaaattctattacaaaaacatttgtcattttttaatttaaaatttatttaaaacgcagttgaggcgatcagagaccatataaatatattggtcaagttgaactttttggagaatgacaaaggctttaaaaaggacgcaaaaaacatggaaaatttggtatgcaaaagtgtcaatatgttttaaaaaataaacaaataattatagttaaagtaaaaattgatggctaatggatagggctgggaattaaattcacaaatataaacttaaaatataatttttttagatattttaaaggtggattttttgacattttcttttgaaaaaaaaaatttttatgttataatttttttttaattttttgtattttcataagaaagtagtttcttactttttagagcatgtcgaatccagaaaaaatatatattatatatatatttaaatgaaattcccaacattgtctaataaatataaaatttttgtatgtatccaaatattgtaactcgaaaattacagaatgcacttgagaatcagcttatcgccaataaggcatgcttaatcaaggaagatgaggttttttgaataaccatttaaatattaatttttaagctttccacgactaattaagattgtgcaaacctatcacaatgaacgcgctgaattggagcgaaaaatgaagcggtttccaataaacttttctattaaaaatattttctgaaaatttcaaaaaaacgaacaattttagatcattaaatttttcttgattgcttccttttaaaaaattatactttcatttctaagttttctttaattcaatctaaaatttactcattcggaagattaattttccacgtaaatcaaaattttttaagaaacgaaggcaacgaaactcttgatgaatatgaccaaaaattcattgacacattgcaactgagtttggaggaaggcattgactttggaatttctttgctttcattagccgacaaaatgatggaccatttgatagtgcgcgaagaaaagaaagcaaagaaaaacgaacaaatgtcctattataactaattgcctaattaattaattatgtaattaattaagtaattgtttgtgctggtaggatggaaaagggtcattagagcatcggaaaatgttatttttaagtagttacccatgtagattttcgtcgttaattttcagccccgccatttcagtcccaatggaaagggacgtttcagtaccaaatttaaacctttaaaaaacacctataataaatatatccaatcccagaagaggtaaataattgaaaaaacatctgaaggataaaactcaaggccaaatcgtattagagaaggaaagggaggcagaggatgggcgtcagctgtcatgccttatagggaagggaagggacgcatgccacctgagcgcccgcgtgtgggccatttaaacgctcgcgtatgccatttgagccccagatttatttttacagcgcagccatttgagccccagagttatttttacagtgccgccatttgagccccagagttattttttaagtttagccatttcactcccagtgcccacgggatatttcagttctgagacccaaagcctattgagtagccaaagtctacggagggtcattaacattccttttaagtgcattttgaccaacgcagggccgacggagggtcattaacattccttttaagtgtattttcgaccaacccagggcagacggagggtcattaataattattttgagtgcatttctgccgaagcctaagcctacggagggtcattaatcattcctttgagtgcatttctgccgaagcctaagcctacggagggtcattaatcattcctttgagtgcatttctaactaatgcctccgaaagtgtcataaatatccccttaggaaatgtggagtatgttgtgccaaagctaactgactgccattaaccatctttgtgaacatgtctgtccacccgaaactggaatggtcattaattatccccttgggaattcttttggtgcatttctgaccgagccaaagccaatggaatggtaattaataatcccttggatgcattttgactgtataatgcccacggaagtgtcggtaatataccactggaaatagaggtcaaactgtgagtcaatgattaattgagacagtttgcccatgcaaaaccaaacaaccaagtcaaaggacccttttcgaagggacagatagtgtgtagctgttccctattgccggttgactttcaactgtgagtcaaaagggtgattaattgtgacagttgtgcctatgcaaaacccaacatcagatattctgtggttgagacagctactcattttggcaaggtgccaaatttagcccagccgaaaaataagccccgcctactcggtggagtataaatagcctgtcatttccagcaaaagtgcattttttccattcatttggaaattttgaaatttttctgcaaacgactaaagcgctctttcccttttgcttcctcgctctctgcgcactatttaaaccaatttaaccataaccttttgtttcctaccatccctttaaatttttacattccctctttcttcactatttaaaccgaattcaccaaataaaaatataattccataatcttccaataaacctataacaatataatttaaataatattacaattaataattaattacaaaaataaaagttcgtgctcatcctttaattttctacgtatccttacatcttttacctacttacccttttttgcttttgcttttcctctttgctcactatttaatccaatttcaccacttaattttaatataaatccctcaattttaaaaatataaaaaaaaactccaataaacttaattaaatcataaaatttttataaaaactttacttcataaaatttaaaaaaaactttcctttattcatatatccatattttacccaatcaatcaataaaaactataaatatgaagcgtgcctccaaagcccaatcttcatctccctcccccaaaaaatctcaaaccaataaatgcattcgtaaaattgaccaatttacttccaaaagtcttaaacatcattttatccgttccaaatctaaatttgttattgatcaaattgaaaaatgtgcagatccacaggctgaattccgttcatgcgtgcacaaggcggtcgaggaggctattcaagacgcacagaacacacttggcgctgcaaataaggtaggtgtcataatttcttcggaacttttagaccagggagacatcatcctaccaattacgccaattacgtcaaacgtcgtggacgccgttttcaaccagttttgtaaagtggagcaaagcaaaagcaaatacgtcaatttttacggggccccatttgttataaccgtcactgtcctgaacactgatggtctaccccgtcgacgaacgaccaaaggaagtgcccctccaatcttctcttcccaatcacacatcttcaaaattaacaacaatgacaactattgccttttttatgccctggaactgatgcgctactattctctctacaaaagagggattatcacggaaaaccgatggagatggatgaacaataaccaaactactgttcttcgtcaaaaagtactacttttactccgcgatgccgggattccgacaactgaaccggaatacgatgcagaaatatacatccatcaagtgcaagggttatggaacgtcaaatatcccggtgagtacaaaattttcatatttaacgattaccagatacgaccaatcaccaaatctgatgtcaccgactaccaattccccattcttctctaccacaacaacaaccactttgacggcatcaaaactatctccaaattcttcaataaaaattattattgcctctcttgtgaaacttttttcagtaacaaaccccaacattcaatgaattgctcttcactctgtcatggatgtcgggaggtgggcgttgactacccatgcgagccacaacagggatacttcaaaaaatgtttgcactgcaacaactatttctataacaacgactgctatgaacgccacctccacaaggatttgtgcaccaaatttcagcgctgcgaagattgtggggtaatttataatgtaaagtatcacggaaatgtaggtcaccaatgcggagaaaggttttgtcgtctatgtaagcagtttcatttaaaagaggaagatggcgagaacccctgcaaaagctgcttcatccaacccctaaaaccccataaacttaaaccatacaggatcatcgcttatgattttgaagcgacacaggataaaaaagtaggtaataaattcgaacacgaggtaaactttgcagcggctaccatcatttgtaccgattgcatcaatggaaattggaaggactcacttaaaggatcctcttgcaaaatttgtggaccccaccgcacaatcaccttcgcaccattcgacttctcaaacacgatagtggaccaaaaagtcaccactcaacaaccgctacgcgaattcgtccagtggctactctttgaccacaacaaaaagtttccaacagtcgcctttgcacattttgggggccgctacgacatgacgatgatcatcaaggaagttttggcacaaggaattcacaatccggacatcataaagcaaggaaatcgccactacgagctcaaaatcaaggacaatgaacattgcccactcacaattctacacgacagctacaaccttatgcccatcaaattatctggtctcatcaaatcctttggtctcaaaattcaagttagttttatttattgttttaattatttcataaatttggttttaggacaaacaacattttccacacatgttcaagaaatcatcaaactatgacaacattctctcccatcttcctccacgtgaagaatactgtcctgatcaaatgaaaatccccgatcaacagaaatttgacaattggtacaataataattacaactaaccttttaaccttaaggaaaaacttcctgaatattgttgtaatgacgtacaaatactcacccacgccctcgtcgaattacgccgggaattcaagcaactcaccaaacgggacggaaaacacgggggaatcgacattctttggcaagccatgacaatcgccagcgcgtgcgtcaagaactttgcactcaatcatttgaagcccaactcgctcgccatcgtcccggagaaaggctacactcctcaacagaaccaaagtgcactggccatcaaatacctcaactggtactcccacatcaacaatgtcaacattcaaactgcacactcccgctatggtgaatatgtctttaaacgtgagggtcaggtgtatcaagtggatggttatataaaagggactaatgggaagagggataaaattattgaggtaaatggttgtctgtggcatgggtgtggggagtgttttgtggacttggacgacgaaacgaaaatgccgaacggaaagacgctaggacaattaagagagagggaggtaaggaagcacgagattcttcgccggtacgtcgacttggaggttatttgggaacacgaaatcaatgagcagctgaagaaggacaagcaaatgagggagtttttcgacaactggaaggaccactcaccaatcaaaatcagagacgcatttcatggaggaagaacaggaccgatgaaactccttcacacagcaaagccgggacaaaaaatcagctacaaggacttcaccagcctctacccgtggaccaatttctctacaagttatccactcggtcacccaaaaattatcagctttagattaaatgagcaaactgtcaactggcgagctccatccgacaatccatacaagggacttttaaaagtattacttttacccccaaacaggaatatcaatgtgaccgtaatgcccataaaatttgatgagcgactcctctttccactctgcgaaaaatgtgccaaacacatcaccaatgaacacccgaatggcctcaaagacgacaactactcgtgtccacacttcantcccgatgaccgtgcctttgtctctacctgcactcaccttgaattgaatgctgccttggaggtaggctacaccgtcagaaaactcttccatgtcctgcaatacgaccaatggagcgacaacatcttcaaatcttacgttagcgaaatgatggccctgaagatccacgcaaccggcttcccttcatggtgcagcaacgaagaggagaagaaggaatacattgaggagaaccgtcagcgatttggaattttgttagacaacgaaaagatgaaggctgaaccggggaagcggtacatcgccaagctttgtctcaactcactctggggccgcttctccatgcggaacctcctctccaaagcaataatcaacaacgacgaaagcctgattcgccaatataccgacgacaagaaaatcgaattagtggacttggaaatgatcgacgacgacaacgacgtattcatgctcacctacaagccgaaagaggagtttgtcgacgaaaataaatactccaatgttgtcatctccctcttcacgacatctgcagctcgcctctacctctacgatgccctcaaaaaagttgccgacacccccgactgcgaaat

SEQ ID NO: 5279 - DNA, 1261 bp, Heterodera glycines
aatttgccttagaaaaatttgaatttttgaatttagtatgtatcctctcaatatccgctcaattttgttgacttttttgataagattttacgattaccccctaagtttgaaactgaaacttaattacttattttctgtcaaaaagtccctttttaaattttataatatttctgacaaaagtccgctgtcgaaaagtccggcgcctctgctagcatcccgttccgagaatgaaaatgtatattttttggtgtctcgtgctggggcaaagattgacaaattggacaaggagctcacatactgttaaggaggttggttagagaagtgagggaatgctagtagagagtgcagagtgatgagagtgacagacaacgagggtgacagcaacggaaaaaaaccaacgaggcactaaagccaacatcgctcgcgcaacgcaagccaaacggattaagtcagattaagccccccgcccgcctccattaaatgccgtgccagacccgaggaacatgaccaataaaaaggcgatagatagcaaattattaaggttatccccgagaagaagcatacacacacgcgattttgccgtcctattttctctcgcgtgtccctcactcgcaaatgcttttaatattgacgggattcagtttggcttgtttcttgcttttaatgacttttggatgtagcaattagtgaatgtatctcttttgtctatcttttaaaaatgctaaaaattaaccgatttaaaactgacaaagattccattttgattttttcaattatttgggctttttagcaaggctcgggaagccttattctcccatgatttaattccaaaattagctttggttcttaaatttatttttggcgtctttgctttttaattaaagtggagaaattttaattccgcttttgatgcggttgctttcttaaaagatggccaaagcagttataatccactaatggctccattcatttttgttgtaaattaatcgcttaatgcttccaattctacaatttattatttaaaatttttttcaaataaaaaccattgacatcacatatcttataagcagccaaacacaaggatggttaaaaaaaaggaaaattcaattttttgaatttcttattccttgccatgacttttgggaataaccattttggttctttagaatagggttaaaccccgagccctcggggggcaaaatttcgggggccggggacctcggtgagcgacatgtcgggggtcgggccggggggggggggg

SEQ ID NO: 5280 - DNA, 2564 bp, Heterodera glycines
  unsure (1)..(2564): unsure at all n locations
catgcttgagagcatttgtgcggtataaaatttttcagaaaaatagatagccatttttctggaattcctcttagaagccaaaaattctctgggcaatataatatccattgcgcaccgctctccctatcatgcttgagagcatttgtgcggtataaaatttctcagaaaaatagatagccatttttctggaattcctcttagaagccaaaaattctctgggcaatataatatccattgcgcaccgctctccctatcatgcttgagagcatttgtgcggtataaaatttttcagaaaaatagatagccatttttctggaattcctcagaagccaaaaattctctgggcaatataatatccattgcacaccgctctctcctatcatgtcggggacccacgatcgcgtagtgatcaacaaaattttttaatgaaaaactcaatttttatttttaaatgctcgtaaatcttccttttttcactttactcatctgatttcgttagcgccaacaagagtgcgttttatttataagaatgttctgattttggggtagcgacgaaaattgttcagatttcttaaatatatttatagttttaaaatttttttatgtaaaaaatgctaccaaaaactcccaattttcaatttctttttacgccggcacctatcggcaccgccagtccgcaaaattgttcttaaaaattttctcaaaatcgcgcaaaagggattaaacttatagttttgctaagaaattgccaaaataggtaggctttgggtactaaaaccccaaaaataggcattaaaatggaaaataggctctaaaaagcctcaaatttaggagtgtaaaatgacaaaatttatacgaaaagtaagaaaataagccaaaccagtattgagaaatataatttttaaaatttaaatccctgttaagaaaataaataaataaattttggagacaaatttttgagaaaatttttcatttattagggggtgtattttcagaaatttttggaccgattcttaggtgtgtctttttcatttttattgcatttttgttgacatagttaaaatagttttttttcaaaattttttttaggttttaggtgctaaaaatgaaaaaacttaaaaatagttgctaataactcgaaaactagtttaacaacaaccgaaaaaaacttgttttcgtgcgtttaaggccacgtgaatctcaggaaaaaatagtgaaaaaaactataaatagtatccctagtcatagagagataattttatgaatctttccttaaaaactaatttttaaaatatggaaattttaatttcgtggcccttaaaggaattaaaattttattatggccaaatctgctaattaaacaaacaattatggaccctataaacatgtttggtggagcacgacgagctccaatgaatcaggtatttttagaaatttcatatttgcgtcaaattttaaataattaggatgaatttgacacaaaattcaattttctcaacgaacggcgcagtagaaatcgacgacaatattcattggtaaaaatatatttatcataaaatagataataatttaattaagaaaaaaattccaaatatataaatatatgttaataataaatcaatttaataattgccctttaattaaaggattccatcgtggaacagtcagacgctgagggcggggcggcagatctgtgcggtgctgcgctgtgttggcgccgtgcaggcggagcggcgccacaccgatcaatttccattgtgacaacgcccgccgtgccatccaagcgcagctgtcagcaacagcacagtgccaacagcggaagcggcggtaaaaacacacacatatggatgagaaaacactgatctggcaaataaatacataatttgatcagacgataattgaaaacgaaacaaaatttgttgattattttattgagatttaaattaaccaattttaatcacttttggagagcatctgcgcacttggttatgagcataccgaaaatttataaatttgcggactccgctgcggaattggaactcaaaattttgcatacggatcccgtgtgattaatcccgaaaccctgcgatttccaacgcgataactgattgataccccgcaaaactcgctcaggatcccgtcccatgccactctctagttatgagctacattcattgaagctttggcttaataaatggggcgaatatttatttgtggtaaaactcgtgggcgcggaaaatgtggatttttgtaactcagtccagacttcgngggggtccttttttgctctttgtcggcgtgtgtttgttgtcggttgtttggcggnttttccgttttgtttttngtgttcgcgctctcncgtgcggttggggnggntgtngctcgtgtgcgcctgtgtctgttcccgcgcctgcctctgntccgtncnctgctgcggtcccgcctgcgctnggtcgctttcggcggcgcgcgtgccgggctggcaagcncnctccncnncnctnccgnnggtcntccctccatgaatgattcgtgctgcagggcgtttcttttaataaattgcc

SEQ ID NO: 5281 - DNA, 3882 bp, Heterodera glycines
  unsure (1)..(3882): unsure at all n locations
atttgtggtaaaactcgtgggcgcggaaaatgtggcccccctaactcagtccagacttcaaagaaatcanttggaatttcctagaaaatgtatttatataaggctagctttatgcaaaaattcaaaatttttgctctttatagaagtgaaaaaattaacagtaaaataagcgaaaacccgattaaaattaagtgaacgcgctatcacgtgcggttggggaggatgaagcacgtgtgcgcctgtgtctgtacacgcacctgccactgatccgtacactgaagcggtacagcctgcgcaaggacgcattcggcgacgcgcgtgccggactggcgctcgcgctccacagcactgccgaaggtcatccatctaattttttttcgtgctgcagggcgtttcttttcttaaattgccccagggacaataaaatatttaaaaactcgaaaaaacaaatttcaggtgactatgaattttttaaaatataaaaaaaaatttcaaattttattgcaaaaaattattaccatttgcttttctgaacatattaaccataagttttttaatcttgtgcatttttttcaacctttgtagacgaatagagaactcttagagctaccgaaatagcaagaatatttcatttggatgcttttagaaaagtcatggggcattaaatttgtcaaatattttatggtcgtgtctttttttttgtgtttgtgtaaactgcaatagagccgagatttgaatagctaaagaatattttaattatttaaaatttaatgatgaattcaatggtgctatgacgttagtcaaaaaccatcaaatgaaaatattttttcatataacttagttcaaaagcaaccaaatttttaatgcttaatatcattcgatagccataagtgatttcgatcatatcattaattccaagaaagttatgaccaaaaatgttcagaaaaacttggttttttgagtttctcaggtcataactttttaagaacttaaggaatttttttgaaattttgcagaataatagaaaacacttggtgctatcgaataatatcaagaatttaaaatttggttgatttatggcgatgttatgaataattttctgtcaaaaattttccatttgatggttttttgactaacgtcccagcaccaattcaatgaatattattttctaataacgattattttaaaaaatgaaagctcacctctatttttcacttgtttaggcttagcaatgtcatttttggctggattgcctccgatggtaaaaaaaaagttaattaaatttttttatatttttcattaagatgggtgtttacactgttttttgtgccacattgttttatatgttctttggtacttcaaaatattcatttttgggtataaatttattttcataattatagaaaatttatttttttaaactaatcaattaaataataattaatttaaggaacaaatttggtcatttgttttttgttgcgcaatatcgttgaaagaggtgccgaaagtttgaatgaaattcagtcggaaaaccggtacgatgatgaacatgtgcaaattgcagtgaccgtcacatttttggccgcaataattcaggcaaaattttattaatatgatttgcattaataattaaacgttggcacaaaaggcaaaaattaaagttaaggaacttttttaaacgcaataaaacccaaacagaaatgatgcagaaaatgcatttatattaagactgttatcttaccaagtctcaaaaaatgctcagatatgaaaggattataagggaattagcatatttttaagtgaaaattaattattaaaaatacgatttttgtaatcaaaaatctaaaagaaaaatatttttaagatgataacccatatacaggtgcaaattcaatgttttttccattgaaatgatttaagttataaaatcatcattttcctgactgaattttgtgcctttttctgccggctctatcaataataatttattattcaattaatcaaattaacaaacaaataatatgaaagataaaggattattttaaatttcaataaaaattaagaatgtttagtcagaaaatattttaaaatttttagatttattcgaaaatcaaattataagcaaagactgaatcgtggattatttagggtctggtctatttgtttcacgccgacttcatcttcagcttcatggccgatgaccaggtgttggccggcttttctgccggcattggcctgcgcattatgttcactcaactcggcaacattattcactttcggtccaatcggatatgtgccgttgatttgccaataaaggcaagtttaaaaaaatttgaaattatttttttctaattttgttatttaattaataattagagctattttaaaaataattttggttttattgcatccaaatgtagcatatattgggcataaaaatgctcctataaataatattaacaattttaggatgcttcttcttccgcttcacaatccatgcctgccaattttggctcattcccctgtgtcatttgggcttattatcgacgattgaatgggcatcgaaaggtaaaaaaactatgacttttttcgataacgtgttttttagcccggaggctacgcaacccttcagtcactgtcgtcaaatattgtacaaaaattgaatacatccgtggctgaacaagctaattcagcgcatattgtggagacaaatgttgcgaaaattattttaaattgaaaaataatattcgaaaaattaattattaaaaacttaaattgaaatatatttcagaaaaaataaaattaattaagtgtttgccctcattttgggagtgtttcgacgccataaatttaaatacactggcgatttcggtaaatttttttatatgattttttacgtttcactacttaaagcatgggtaagctcctataaatttttgaggttgcttgtgttctgctgttggtgttcacccgtcaatgcatcggtccactcactcgttttcgtcttcgttcagctgtgtcctcggaatttttagtggtcagaaaaacttgttttataaatatatttataattaaattctaaaatgatattcgctatagaatacattttttttttggaatattttcagattttattagccggttttttgtcacgatggcttaatgctgagagactttggcaattagagacaatcaagtttggaaacggaaggttaaaaatgctaatgaattaattgttaaatttctacataaaattcatttcaaaaaaggatttaaattattagtatctctaaattttaattttttattatttaaagttaaaagatataattatattacttgaagatttatttacttttaatttgtgtttagtgcttttatgattacagtacctcatctatcgctgataagttcacggtatgtttaaattcttattttaatgaaggataagaaaaatatattgagaaattttcataattttttttcttcatattgttatattttagcttcctgtcccagacgctgctgcttgatgcatttgcgcttgcactgctcgtgcacacactgcacatacgcgctgcgagcgcgcttgcacgcacgcacaaatatcgcttctacgaaaagcaggtatggcaaaaaaaaagagttaaaatcaatgctaattaaatttatttaaattttataaaaacattggctttttatataaataaaatttaaataatgaactaactatatattctttttataaggaacttttcacgctgagcatcattggcattttttgttcatttctttgcgctttttctccgggccattcgccgttgcgcacccatcacggcactcgggcaggcacaaaaacgacggtccttttaaaaattcaaa

SEQ ID NO: 5282 - DNA, 4210 bp, Heterodera glycines
aattttaataagaaatgggcaaaatgtttaaacctcgggtgggaatcgaacccactcatgcaccctttccgtgggcagctctaccattaagctaccgaggcacatccgcccttatggatcttatcaacccccgctttccgcgttttaaccgcccagccagcttcttccttacattttgaattttttttaatttatgctctcaatttccactttacctgtcgcaccatttgttcacgcttttcttgcatgcactgttgttcatgctttaactgctgaacacgacggtccataccgccaatggttgtcgagcttggcgaactgtttactgctgttgaaccattattgtcgggtgtttcattatttggcaatgccccatacggtccttgctaaaaaattattattacttttgtggtacagttccagaaatgatgaaatactgtattccatcatagaaattttcatatatatagaaattgtataaagccataggcataaataggaattggcaaaatgaccataaaaggtcattaaaaagtttaaaaatagactttaagcctcaaaaggtccaggtaaatcccacaccctcccctttggaaggtaaccatcccatagttttgactgttaatgaaacaaaagtgatcaaaaaccatcagaaaaattgcctgaaatgtgacaccgttgaactgttggtgatgctgttgctgcttctggcgttgttgaattttacgtgccaccagctcagtttgttcggcatttggcactcgtgggtcgaaccaagtcgtcgtcttattgttgtggtcaatgaaatatgcctcaccattggaagcgaagccctttaatgggggggagggggaataattacttttttggcacattataaaatatttgaacatacaatattccatccttttggcaatgggccaagtccgtcaccgggatctaccagctcctggtacaaatttaaatttttgaactttttttttatatataaaaaaacatattgttttattaagaaatcaaaaaaatttctggagcaagcaaatgccatgtggccaacaaaatgccaaaccaaaacatgatcaaaaaaatatgcgaattttcacaatttctcataaaaatacagtactttttgcacaatttctcacaaaatacagtaagacccgctctttctcactcacaatgttggattgttgttgttgttgctgctttgctgggttctgttgttggtgcgcttgttgttgttgctggaatggcatttgttgtgattgctgttgttgttgcggctggacatgttgctgatgctgctgttgttggtactttgtggcatcgcatggagatgcgccagaggccacatgcgggctggacaaatgaggtgtggtgaactgctgggcggacgacgacaacggcgacagctgtgccgtttgttccgcaaaacgtatcgggtccaaactttgactcttgccacgcgcaccggcccaataagccacggatgatgacgagttcaactgcttagcagggctaaattaaatttcttttataagcgtaccgtatttcctaaaatagagccatggtattctattttttaactcctctcaacaggggtgggatctaatttaggggggggggggggtggctctgttttagggaatacggtatattcgtaaccaaatagagattgggaaaccagcaaagattttggcacaatgataccattttggaaatgggataaatgtagaacccaattttcaccagctgtatggcatcccgctcggcatttttttttcatccagtcacaagctaggatttaaagaggattcggaaaaagccgggatactgatttttttcaaggtatcagccggtatttctcctccccatcatttggggcacatgctgcataaggaaggacccattcattcacatactcaatgtattgctgttgttggtgttgtgttgctggaaaatagccggtgatggttggatagttgccaaaaaattgtgtgcccatttgttgttgttgaggatgggcactgttctcaccatcaatcatgatgtggctgttgcccaacattgttgcggttgttgtagctgttgcatcagtaccaccaccaccgccgccgagcatgtcaaaatcgcacgactttgccgtccgatggtggtggtggtggtgctgctgaattgtcccagcagcagcttgcggtgatgacaaatccatgcttggtgcgttaccgtcaacaaagtacagttgcgattgggacccagcgccggctcgataccttcaaaagcatagcgatttaatcaaaaaaaaaaaacatttttaaaataccaggattaaaaaaaaaattcatttcaagggtgactggggaggggaggtgtaatgacaaaatgtataaaaggcacaacgtacaaattatattttttcgaaattaagacttaggcaggttgcctagacttagacaaggccttttgtcagtgtacgtttttccattgaatcggctgaaaagtccaaccaacccagcttgattaagagctctgttgaccaatatgcagtataccgtattttggatacgagttgcatatatttaccatatttcttcgaatagttcttcactttctaccttcaataaagcccccccccctcctaaagggattaagaaataatgcattcctccctctctattgtttgaattacgtcatttctgtgccgcctcctccaccagcagcagcaggtgcattgttcgccatcgatggtgtgttcgcgacactggcacttggtgccaccatcgcattcatggacctactgtgcacatggtgatacggtgcttgctgctgttgttgttgctggtgttggtagtgatgatggttggccaccggattttgagcgtgcggcggatggtgcgcaattggtggcaaaccagcagagccacgtgatctgttccaaatatatccaaaggcatttagtaaatggatgattcgtcagtaacagacaatccgtcaggaatttttattttttctgcaatgctcaaaatcgttacgaaaataattgtccgatttaataataatcaaaaatcgaatgggtttttttttttagtagagtagagctgaccagtacatttagcggccggtaattaacggttttttagtaccaataccggttttcaaatgagaagtaccggtaccaatttttctagtacctaggtaccgtaccggttaagtgaaaatattggtacctctctactcattactattatttttttaaatttaaattcattttctcattattttatataaatcctgtgtttaaaaatcaattttgctgacggaatatccactgaccgaatgtccgggcggatggaaaaaaggctataattaataggcatggcttagaaaggcgaatgtatttggtatattactttacagccctaacagcaggtggttgcttttttaaacatatcaaaacccgagtcttaatgcgattaattaattcgtgtgtcctatcgcctctgaatagtccatcaaaaaatcgcacctatgcgctaattgggccgagtccatctgctgctgctgttgatgctgctgatgtgcagctccaaattggtgacaatgtcgctgatgatgatgatgatgatgctgttgttcccgctcactgtttatcaatgctggcgctataaaattatttaatttttgtaattaattttgggattagcattttgtttgaaattaccgctttgttgcctattatggctgacttccaccatcggtcggcatccgtcagaagcaaaattggcaccgacgcctgtgtatcaaaaataaaattttgaattaagttttcatggaattcaattcattttattttatgttttttttaaatcggttccaataaaacccaagagacaagcaaattttgttttgttttttcgactcctaaatttcaatctcgaatttcgtgccatccttggttctagagttggtcctccccgaccagagttttgctacccgatattttttaagttttccccagccattcctaaaaaaattatcgggtgttttctcccctgatccccggcttttctctctccgggggtcgaaaatcaaccctatttggttttctcgaatttttcagcaatcttttttctgattttcttcactatatataccagaaagtgcgcttgcaccgcctataccgccatatgacgtgtagatgaggccacac

SEQ ID NO: 5283 - DNA, 3579 bp, Heterodera glycines
tgcactgatcagctcttcaatgcttttgttgatgtcacagctggtgttgatctgcacagtgccccgcttcttctcctcaacacgtttctttgctgatgatgacatcgcttttcaaaaaagtgattttccccaacaaattgatgacaaatttgagataaaaattatctgatgaaagaaaatttccctaaaaaattaaattaaaataaaatttaatttcattttagagcaaaattaatttggtttttgattatgacaaaattcagtttgattagttaaatttaagacagaaatgccataaaaatccctagagaaaaaagtatgctttagggcagtgccaatgggaaagcggaaggacagcacaggaaagccctcagcggcaataccggtggcgccacattaaaagaattagtgtgggtgggatttgggattggatttcgagggtgatgaatgatgaggttgggcaggcattgaatatgtgggaatttatgagggggaatggcgactggtacaaattggaggcacaacaatcaaaaggtgtagtactgtaatgatgggatggggtggggcaattcaagatatacctagcggcacaatgtcggctactgtataaattgggcaagaaattcaaccgctcgaattccgaatatatctgctgtgcattttaatgaagtcagtatttgatcaaaatagtagttgacttatttaatttccaagaataatgattttaaaaattttattctatttcctaactatttgacccaaaattttctagattttcccggcaacgcctaacagcaccgccgaataaattttggatctttttttttgttgcaaaatttgatcataaaatggccaaatctggcaaaaaaaaataaaaagctcttcggtgcccctcccgaaatttttctggattcgaaatgcgactttaagtggaattagatccaagcgcgagcattagtttttattggacccattctcgacaccgacgagtgtccacgataatgctgccctttatgatcgagaaattgagaaaaatttaatttattcctaataaaatttgaaaaatttataaataaaacatttgcagaataataattctcttttcaataaaaaatgttaaacaatttttttgatgcataagaaatgataaggaaatagcaaaaacacttaagaattttgatgatgttcaactgaacattaattaatttaaaaaatgaatatgtatatcgtaataatttaatagattatgaaataaaatcttttaaatttagtgtagttaaaattgtttaaaaattcatacccaaaaatttaacaaattagttgaaaagtttttaaatttaatggggccaaatgatatcaaacaaatttaaaaaacaaaaatgaattttcaaacatttaatgaatgtttcatattattcgccaatcaaacacaaaaatttatggaatgttttaccgttttgaatgtagatgtgtgtttgtgtgttgtatgtgcaattttcatcaaaatatgtaatggttgggggcacccaccggtgggcggatgggaggaacaaggatggtgggtggatgatgatggtctgataataggtgtggccaaaatatgtatgacgaattttttttcccgttttttgatttattcagcatcacctccaccatcagaaaaaatggtggggaatgaatgtatccatggcaatgatcaaaaaggtggtgatgaaaaagatggctaacaacaaatatggcccgggcgtgcggccccgggacaatgacgaatatgagcagcacaacggattggacgcggataaggggccaaaataaatatggcatcaaataaatctggcatcaacacagcagcagaatttgacgctgcttgcgccccggtgccaaagaaggtgggggatttagtgggaggcgcgccgtcattgccagcgcaccgcccccgtgcggatacgataatattaatggtctttcaaatttatttttgggccaagccaaacacgccgcgcgagaaggtggaggatttggccccggattgatcccaaacacactctcagagtaaaaatgatgataatgttaatttatgtcctcgagaagacccgaaactagaattcaatttttcatagaaaaaagtttaaatttcaaaaaccgtaacttcaataacaaaatattatttctgaattgatccatataattttgtctttaatccatggaattaatccaaattctcattaaaaaatattttccgctacgaaaaaaagatgtaatttaagttccctaatctatactaaaccatcatcaattaaatttgggtgcgccttaaattttgtgcttgttgagtgagcagtttagtggttactctgtgctcatacatagagagagaccaatctttggctgatcagtgctctttagtgtcgtcattcaaacagttaaaattaccgccatttttagccggtgttttcaaaatgggaagaaaaagaggaactacctgcatctttttacaattacatatattaattaggggggagggagcaatgattattaattaattaattattcgactacttttacatggttgaggggtatcagtgacaggactgatcaaatttgcaggagattaaaaatcattttcgtgatcatttgacgagagaatcgggaattgattagaaggaacagaaaagctacaatcttctttttaagggcgctctccaatttttccagaaaaccaatccttgagtgtgcccaatttttgtgggcaactcgttaataatggattgattgatcacggttgagaaaggcatcatcaattcattcatacatacatataacttttgggggcgaatataatcagtagagttgggaaggggaagtgagaattttgggtggagggggtggggggggcgatgggtggactttgaacgtccgtccgtcgtcaatcgcttgcgaccgccgcgggggccgatcagtttgtgtgtgtttgtcgctgccagcgccgccatcgccgccgcacgttaattgattggagaatggggcgggcgagcggggggcgggggcgggggcggcagagagagctttttggtgtggcgttctaaaccaaacacccaccaactgctgctgatgggcggctgcttgcttgtgctgctccttcacacaggtctttttagcggtttgttttgtttgtgtctgtgcgcgcgtatgtaccacacaaatttatgcaaaatttgacgaaatttaaaaatataagcgccggaaatttaaaattgaagaattttaaaaatgccagcaccagaaatttaaaaaaatttgaagaattttaaaaatagaagcgccggaaatttaaaaaaattttaaaaatacaagcgccggaaatttaaaaaaatttgaagaattttaaaaatataagcacctgattgaaattatattatttttgtcttcaagcattcttataggaaaaaaatttacggaaaactaattttttttttttgtttaccaaattagaaaaaaaactttcggttggttcgcgtcggtacagttacttttgacaaaagaggcaaatttgtgactgaaaactgaaatgagccggaa

SEQ ID NO: 5284 - DNA, 1631 bp, Heterodera glycines
actgctgctggtggtggaggtggttctatcggtgaaatgctgtgatgagttgaccgccccccccccccacatcgcgcccccttcggcccccggggaagacggacgtcccgtaaaaggaggcaaatacggccttcatcttttacccacatcaacactgactgttcaagtgttgtggtgttgtggttggtgcaccgacaaagtcagccagccccagcattgtgtgcgacctggcactgattggcaagtgcatcaatcagatcaatcggagtggatttgactcgtcggtacattttcagttttcccatcccgtgtgtaaaatttttgggtttttgttgaataattttaatcattgttcacgaaccatctcgcattttaaacacctctgatcaattcaaattaacataaataggaggattagggatattgtaacagtttaatttaacaaagcaaaaatcagtgacataaaacagtcatgtcatattttctagagtgccacgggaccgggaccaaaacacggacaactgagtaccgaggtcccggttttgaacagttttgaccgggaccgggaaattcccgttttcttcccggttttcccagccaaaaattcccggtttttcaacccgattaggtcccggtcccggttttgcccaaaattcccggtccgtggcactctaatattttctattcaaaacatatgtagcattcgcatatttgaggtggcaaagaattgacaaccgaatttttgataattttggcccttgacactctcggccatctttccatctttggtcatggttttttaaaaactcccggcccgacatatgctcggggaaaaaatactcatatggattaggtcaaataaaaaaattcagttgaagtacatgttttaataattctatgattactaaatattcaagaaatgatctaatttaatatcttcaaatgctgatcaattattgattgaaaagactgactgattgtgtaaaatgtgaaaaaaagacaaaaaaaaaaacagaatttttaacaagattaatttgtttgaaatttaacaatgatcgaaattggaaaattaaaaaagggaatttttgatggaaaaaaaatcggggacaacgacaattcagcctaagcatggatagattttaaataaattggaactactgcttggaatcaattagttgtcgccctataattggccatttcgtaaaattcaacaccactaatgaatgaatgaatgttggctaaatgagtgcgtgagatttggggacacacgggaggcgggagaagacatggacaacaaatatcggtcggcccctctctaatttttgccaccaccaccccacccggtgcgatcgggagcagcggcggcaagcagtcatcaccagtagctagcagcagcagcagcagcagcagcagcagtatccgctttaatgtgtcatctccaacaacaacatctttttcttcggctgctgctgctgatgactgactactgcctgcccggcgggcggacgagggagcagcggttcgatttatggcgttgtgtctgtgtgtgtgtcgtatgtatagatagatagggaggggtaagggggatgggggaggcggagtttgggggtggcgattattcatcagcaccc

SEQ ID NO: 5285 - DNA, 1353 bp, Heterodera glycines
ttttctctctttctctaaatttctctcttttcgcttgtctctcgcctcgtacaattgtgctgcgagggcgcagcttgtacccgccggaggagtgttatgccaaaattcctttggctcttccatttctgtgcccaatcaattcaatttgccaatcacatttttccctttcctctaattacgccaactgttcccttttctctccttcttttgccccgcccgaaaattgtttaggtgggagccatcggaccaaccccggaaaagcgatcacttttgagatcttttgatcaacttttgctttctccgatttcatccgatttcttttgcttcacattttctttgtgctttaataaaaggggctattacaaagccaactcggactcaataggcgggatcgcgcctagcccctgacttcggtcaggggtaggcccaacgatcccacggacacgcctagtatggtccagctggacggatctaatcttcttttcctaccccctccttttttacccccacaattttcattatttacacatttcaaatattaaataatatttttgctcaaaatattaattaattaattagattttcattgttttttcctttttcttatcaacataatattttgttcgggccattatttttcccattttggccattttcctttttttccactccttaattggccattacttttgcatatacactttccatttggccatttttccccttcccatatccatttctttgcattaaaatttcaatttccaatttttctgtttttattacctcgtctcccctaccgttttaacaattttaatttttgaccaacacatttcgcatttatttgccatttcctctattttcactctcttttccccctcccttctcaaattctttgcagtttaacaattaaagttttattcagttaaaaatcaaatgaaaaaaaaaaaatttaacaaatcctgagagtgtcattaacaccaataacccccgccgtaacagttcactgatttcaattggcggagaatcggcggcattgactgcaaaagcccaaaccgcttgtgcccatctgacgacgacgacgcaggagaagcgcagccaaagtcacagactgaatgccgacaaggaaaaggagcacggccattgccgaaacgattaatggggtgacaaaagggtcccagcgtgatgagtcgacacaggaagctgggccaacagagcaaattacagggctcgcccattcgttaatcccaaagcacattgaagtgcagttgtatcccgcgcaggggatcctccagaattccagacgatccaatgctgaataataatgttttgcgcattaacaccatatgcgactaa

SEQ ID NO: 5286 - DNA, 9223 bp, Heterodera glycines
  unsure (1)..(9223): unsure at all n locations
attactaacatacttaaccaataaccaaaattaatagtaataattaatgaaaagctttgaataataaatatttgaataaatttgtttattaaattaacaaataaagtatcttaacaagtgatgtgttaaggccgtgccaacgattaacccgaaattacattgaggagacaatacgactggacaaaacactaacacggcgctgacattggtcacagaccccaattgaggcaaatggcaagtctcggcggacacggaccacagccaaatggacaaggacaaggacaataaggacaaaattgagcccaaaggacgaagcgatcatccaaatcggccatgccactccgctggtacaaaacgggatggagtcggcacaaaaaacgggattctcccactcttcgaatccaaagcaacggcggctacagtttcggcccgcacacgatacacgccacagttcaagactttcgatgtcttaattgtttaacttgctttaattaataacaatttaattttcctctttttcctctctctcttttcttatttttctctttttttttcctctcttcccttccatgtttttcttttggccggcagaaggaaaactttggcctgtctcatttgcctatggtcgctaccgtatacccgtaccacaagttccatccctcccactccttgttttgcccatcccgccattctgtgaattttgttgcctattgcctaacagctgccccaattcccttccccctcctacgaccaggcagggccccatccctggacgtttggagttttgatcagcgctcattaattaattaatcacaggggaaaaagggttggggaaaagaaatttcagctaacaaatgccagtcccgggacaagacaaaaataaacacaaatggcaaatcacgagaaaagactaacaattaacgaaacaaaaatgcgaaaacgaattcgaagaaacaaaatgaggcaacaactgacgggaaaaatgaagaaaaattgggaaaaacagaaaatggacaattaattaattgtcttcggagggaacgaaaatggacacaaaaatgcacatcaaagagggacggtagacgatcacattgcgatcacattggcaatcatcatccaatcaacgacgaccaattgtttcattatttttattacaccaatcgacgaacaattctttaattacttcatcacttcattttcaaatcaacaattactggagttcaacaaatcttttatttttctgagacacttcgacgacataatttctttaaattttaaatttctcgactacaatcaacaaaattctggatttattttctaaattctggtgttaatcagcgaaacatattccgacaattccatcaaaaacggccgacacgcggagaagaccgaattctttagaggaagatggactaaacgaaggacaaaccgaaagggataaaaggctttggctcatccatcaaaaaaggcagttgcgtaatatggatttagacgccctgcggcgtcgaattgttactctcgagcaagagatgcgtgaaattggtggaactcgctctgggctcccgatgccgaccacctttgacgggacgactgatttgcaggattatttgaagtcctttaatttaatcgcgaccgcccacaattggacacccgcgcgatgtgtgcaagttctcccgctgttcctcagaggatcggcaagggcaatttacgagagcatcgaaccggatattaaagataattggcgaagtctaattgatgccatggcggataagttgaaacaaatgtctccgagtctgacagcaagacagaaattggcacaacggaaacaacagactggagaatcgctggaagaattcgcgcaagcgatccggaacctcgtcttacgtgcttatcccgacaattctctcgagatggactttggaaatttggtgctcggtgctttggaaaatgatgtgaaacaagcaaacgaagtccgacttcgacaattccgttcggaaattgcgcgagatttttttcgggcaaatatggcaccacgactgaaggaaagagtgatgtacatggaagaaccgcaaacgctcgaggaagcagtggcccaggcaaggcgtgttgaacaagttcaaggaaatttggccgatgacatgtggaaaaatacacaagatgcaaaagccgaagttgctttagctgaagttaatgcagtgcgaaccgaattaaatgaaattcgtgaacaacaaaggagccgagagaatccaggacgagatcaacgagaatggcaaaatcaaagcaattcttggagaggaaacaacgccgaaggacaaaatcaatctaatttttggaggggcaatcccgaatttcggccaattcgccgagggaatttcacgccaaggggattcacaggatatcccaggggactcaacacataccgaggaggatttaatccgcgcggcgctaacgcaaacttcacaccgcttggcaacaacttccaaggaacaaacaacaatggaaatttccaaccgaacttcaaccaaaaccaaaattggccaagaggacgtggaccaacaggtcccaacagaggacgcggaggaagtgatgccaatcgaggacggactggctggcgcgtgaacgaagtgaattttccatttatttgtctaatgaccatcatggcggcgatgttcttacccgctgacggacaataccaattatgcccgtcncaaccgacagaagggattactgttactatgagctttccggaggaacaaaattgcactcttccggtggaaaaagcctccactgacggtgaagtcaaatctttacataccaattcggattccgcgagtgtttcccgcatttaaatgctggaatgtgacaacagtcacatgcaccgagtcttttctccgaatcatgacgttggatcatcctgacaagaaaattgaagccgacgcttcagtcgaggactgtcaggcctcaatacaccattcgccgatgaacagagtaagtgagacaagatgggaaagtttggcgccaattcgaaaagagtacggatggtacggcgtgaattgtttcaacaatgtacagacagtgattgaagaaggaaaagcagggattttggatgggaaaagactgataacttcgtggggagactctttaaaaatcgacaaaagtctgggagaagacggcagctggatcagactgccaggagatgtggaattgctcatgtggaaaataccatcggatgaattttggcattcacattttgtgattggcccagtaatcacggaaatttggccaaaaaaggtagtaatcgtggacgagctccaatatacttttccaataagccgaaatcaggaaagaaaatttcctgtgtttggagtgcctgaagatgcgctaaaaacggacaacaatgtttttgtgcatgtcattagtaaagtaaactcaaccaagggagcgcgtccaagacgagagaccgcgagtctaaaacctggacaaagaaagccaaatgtgccgagaattgaaccaacaagaaggccgaatttgcgaagaggtcaaattgctgaaatcgccatgacaacccgtccaactattactaccactaatattccaccgacaattcgtcccgtttctacaacgcatattccatcgacaattcccccaatcgccactcataatccaccgacaacccgcccaatcacaacgacacatattcctccgacgatccgcccaatcgctactactaatattactccgacgattcgcccaattagtacgactaatattcctccgacgattcgcccaatcgctaccactaatattcctccgacgattcgcccaattactacgactaatattcctccgacgattcgcccaatcgctatcactaatattcctccgacgattcacccaatcgctacgactaatattccgccgactattcgccctatagctactacacatattccacccacaacccgcccgattgctactactcatattccaccgacaattcgaccaattactactactaatattcctacaacaatccgcccgacttcaaccattcatagccctattataatcaaaccaacaacgacaatcctgacaaccactattcaaacgccaactaaattaatctctaccacggctacaccaaccaccgtctctcctcacaccacaaagagtgcggatgacaccgctctgaccactgcgtcgtatcattccattcttgatgagcttagaggattggccgatgaagctgatgaggaaggcattttaatttctccgacgataaaagtgacgccgactccatttattctccctgatgaaccaaatgaagaaagcccaaccacagttgttacgaaaagggaaatcccggatgatgatgaatcagaagaggaagaaaatcttgaccacgacaattcccgtcttaattatttgggatggaaggcgcatcggacgaacattcaaaatgcgcgagagaaatggatgcgctactgtcacgaacgaaataatgcgctttccatcgcaaaggcattagctcgtcagatgccagaagacgcagcccgttctctctacaaaagggatgatattacggcattttggaccagatcatcacaacttgaccaaaaatggtcaattgcactttgtaaacaactgaaggctgaggatgtgctatgggaccaaaagattggcgagaaatgcttccgcgagctacccgtggtggtggcaaggcgcacacttttcgtcaagccagggacgcgcgacttgagctataacgggactgaaactcactgcgatgagcagggagggtaacaacccttgggcaaaaagatttcaacaacaatgacacggaactccaacaagccaattcgaaacatcgattgntctcaaagcaacagacaaatttcaaaatccattaattttcttcacccgcggatcaatttttgaatctgagcaggcccgcctggaacagaatctcaaggaattgacgagaaggatcactcggcctgaattgaacttccctgacatagggacagtcgacattaatcagactgaaattcacggaagcacggtcacagacatattttccatcggcgaaatactggcggaaaagatgcagaaagagagcgaaaatctcagaaaaaaggcggaagaaacgattgaaaaaggaaaggcatggatggaagacccaattggaatcatcaaatacatcaaatggatactaatcacaatcgcattcattctaattgtgattggatgcaccgttcttttgtggaaaatcaaaatttattccactttgcttttggcgccaattcatttgctacaatctctggtcaacaccataatgaactgtttaaattctggaagaagacttgccgaacaagtgcgatatccgatcgtgatggaagtcgaactccaggaccgagccaagccatcggcaccacccgaggaaccgttacttgaccaaaaggcttacgtgctaattatcttcctaacatttgccaaattgaacaaacaagacgaaaaaagaaaagatgttacgtcaattttttcatgaatggagtgaaaacaaaggccttattcgacacaggagccgacatcacgtacattggccactcaacggcacaaagatgctttatgatggtccgaaaaggggactatccacaagcaagagcagcgaactcaactcccattcgttttatcggatcggcactcgccaacataaaactgggagattttgaaggcaaatttccaattctcgtcagcgaggatgatagctgtccgtgcacagccataattggaacggatttgatggatttcatcagtgaacagggcgaagaagaaatcggattgaacttcaaaagaggactcgtacgtgttggaaacatgcatctgccaatgatcgccgctgtcaacatcgagaaacaaccgattgaagcacaacttattgagacgcaaacattaccgccgctatctgattcactcgtttggggaaaaattaaccgaagtttgggaccagacgaagtcttcatcaccgctgagcgagatcatgaatatttcccgctgcgagttggaaaatgtctaataagtccaggctcaacgcgaattgtgccactaagattgcttaatttcggaaacagcgtaataaaagtgcatgagggatcgcgacttgcgtggctggaaccaatagctgatggcactgaaattaatgcacagaaggaagatgagaaagaaaacccggaaatgataatgactgacgaggtgtggatgaaattcaaattagaaagtgataaaatttcgccagaggcggactggacggaccagactttggaatttcaaaagaaggaagaagcagtcgcgccaatactggaaagaattcgattaaacgacaccattctgagtcgagacggaattgaaaaacttaaaaacatcatccgacaaaacgagaacgcttttgtgaaacctggagaagtcggactcttcaaaggacaaacgatacaccgcatcgacctaatcgatggcgcacggccggtccaacagaggccctatcgttatcctgtcgcacttcaacccgaaatagagcgtcaagtcaaggagttgctgcgtcaaaatgtcattcgaccatccacttcggcatgggcatctccaattgtgcttgtccgaaagcctgatgcctcctatcgattttgtgttgaataccggaagctcaaccaattgacgaagcgatcgacatattatttaccgaggattcaatcgatccttgatgaagtctcgaggaaaaaatatttctcagtggcggactgttcaagcgggttttttcacatcaaactcgcaaaaggacacgaagaaaggagcgcatttatctgccacatgggactgttcgaatggctacgttgtcccttcggattggcgggagcaccaacaaccttccaacgagccatggaagaagtccgacaaatgtgctcagcgacatttcttgtgtatttggacgattgcataatcggctcaatgactgaagaggaacatcttcgggacatcaatacttttctaagaacgatgactgaagttggattcagactgaaaccagagaaatgcagatttgcattgggagagattcgctatttgggacatttaatttcggctaatggcgttcggatagatccaaaggatttggagccaattcacaaattgaggaaaccgaaaaatatcaccgaactccgatccttgattggaatgctgtcatattttcgaaaattcgtctacggatttgcagaaatacttcaacccatttatgagttgacaaaaaatgaaagcacgacagaatggggaccaccacatgagaaagccttggaggaattgaagacaaagctgatgactgctccagttttggctccaccaaaattcggacaaccattcgttgtggaaacagatgccagcataaaagcaattgccggatgtcttctacaagaaaaccgtgaaggcgaagtccatccgatttgttacttcagccgagtgctaacaaaacatgaaaagcgctattcggtggtcgaattagaagccttagcaatttgtgcttccctcaagaattttcgaccatatttggaaggagctggaaaatcaacagtgatcacggacaattcggctttgacatcattattccggcggaaggacttggaagggcgactcagtcgataccaattggctatcatggcattcgatgttgaaatcattcatcgccctggaaagcggaaccaattttgtgaccatctttcacgatacttggacgacaacgacacacaaattaattggctgaaaattgaaccaaaaatttcacaaagtgaaatgcgcgaggctcaaaaacaggagacggacacacaaaagagacgggaaactttgaagaaggatcaaaattcagaggagccaaatgaatttactggaaaatggagaattactgaagatcttttgtgtgcaatggaccgaggcgaatggaaaatttatgtgccaagcagtcttagacaaagagtgatgaaggaatatcactccgacccattccaaggaggtcacctgggcgagaagcggacaaaagacaaaatccgacgaaatttgtactgggaaggaatggaaaaggacattcaaaaatttgtgagaacctgcgacgcgtgccaaaaacggaaaataattgggaaccaaatgagctctgagcccatttgtccaattgtaccagcgtcacagccatgtgaaagacttcacttggatttgatgggaccattgaagacggcaaaaggcggatttcaatacatcttgatgataatcgattcattttcaaaatatatgacggcactaccactgagggaacaatctgcgacgacggtgacaacagcattcgttgacaaatttctatgccaatttggaattccaaaaatcgttgtgacggactgtggaacacaattcctcagttcgacatttgagtcacttgctaaaacttggggattcaaacaccaaacgaccgtgccataccaccaatcagcgaatggacaagtggaacgattcaaccgaacacttgcggacatgctagtcaccacgactggcggaaaagattgggctgccgcgcttccgatgctttgctttgcatataatacttcgattaactcacaaataaatcattcgcccttctttgtgcttcatagatttgatccacggcttcccagtaagatgctactcgaaaaagacggcgaagagtacaatgacatggccatatacgtccaagagctgaccaaaaggatggaagaagcaaaatctcggatcagagaaagtctgaagaagtgtgctaatcggatgacccagcaacaaaagggcacgaaagaagtccgatggacggaaggaatgcttgttttgagacgcagaaatgacaaaaagaataaattggaaccaaattatgaagggccatttcgcgtcatcaaaatcgagaagccaaatttgcaaatccgagaacttgaccccgatggacagccatttacagtgcacatggaccaatgcaagccgtatttcacagatgaggaagcaagacaggacacagaaacatccgagaatgagaaatcaaaacataagaatgggaacaaaaagatgggagattcaaaattggaagaatcggacgaagaaatgcatgatggggaaacaattgtggcatgtataagtgaggggaatccactggaccaaccaaaagacaaggaag

SEQ ID NO: 5287 - DNA, 2074 bp, Heterodera glycines
ttctttctttctattgctatgtgtgtttgattgtgagagcaaagttctcccttaaaatgacaagaaaaatcatttgggaaccgaaaattaaaaggaatcgtcaaaaagcaaaaatttgacaaaccttcgagcgcggcgctttggcgaaatttctcggcgtggtgacggactggaaatttcagtgttaaaaattgcatggcatatacaccgatgaaaaatgtggacacttttatagtccagtgggcccgatagaatagggggaggaccactctttctgcagaaattaaattgtaaaaaaatccatatggcttttttcctatcgggaccactaaactacaaaagtgcctgccaaatgtgttgtaagacatccaatattcggataatccaaactcagatttttcataaagtcggtcagaacacggagacagacaaaatgtagggaaatttagagtttagtagaaaaactgaacctgtaagtgtgggaacgagaacgcgccgggctcacacttcggttcttctccctttttgtcctctttctgctgccactcgacgattcgtccgccaacggactgtgctcctaaaaaacaatgggaagagttcaacgaaaaattagacacaaattcaaatgtcaaaaactaatttttgagtaacttagtggaaccaaacatggaaaaaacaaagcattgagtggtaaacaaattgaaaaagccaacaactggcgaaacaaactttctcatagtctcgtttgcggtcagaacgatgctcacggcccattttgtgtaggaaaatgtagagaaccaaggaatattatggttttttgctctgaaattggtatttaaaaatttattgcataaaacacattaagaaatttaattactgcttataaaaaaagacaattaggtagcaacactatgggtccactatgggtacgccccagtgtcagacaaaattgctcataacgccaaatagtgcatttgacgtaaatttttgcgcgctatttcaaaatttacactggaaaatgccttttttgtattttttattttgatctgccataactcgcttcatacccaattaaactgatcaaatttggtatctaaaaaaagtttttgaaaagtagaatctttttctgagcgaatgctaatacgattttacacctaagaaaaaagttgtgggagtttcaaattttcattacgttataactcaagtcctaaactgctgatttcaaccaaaatgctaaaactattcatttctttattgattctaaatgtccaagatgattttatacccttataaccaaaattattagaatttgcgaattccgtgttttttcatgtgttagagacatgaaaatagtacgccaaaaggagagaaaaagaaatgcaaaattttaatcactctataactttttagctaacccttttttgctcttaaaaaccacttagattttgttcgtaatttttttctctatcgctatgcaaaatttggtgcggatttaacaaagagaaaaaatgctagacatagaaaagtaaatgctgttttttccattaaaaattgaagaaatagtacgccaaaatgtgagaaattacaaagaaaaagagaaacgacgagatagtactagactttctctgcacagtagagttgacccataatagtgtagcaacgtttaattggtgctcattgtgctaacatctaacaacacacaaagtttcgcaataaaaacccattttccaaataatgccaaaaagagttgcattaatttaatttgattttttgcatagaaaagtacttattttttcgtttattagaccttgattataagaccccttctgcgagggattgaacaaacccgggttaagcaaacacgggtttattgtagagaccggcggggccggctgaaattttgcgtttgtcgtaaaaaccaatcagaattttcgagacaaacgacaaacgcctaatttcagacgacaaacaacaaatttcgggagtcatacgacaaacgacaaaatttttaattctgattgatgtgataaacgacaaacggcgtatactaacgacaaatatatcgtttgtcgtt

SEQ ID NO: 5288 - DNA, 2515 bp, Heterodera glycines
  unsure (1)..(2515): unsure at all n locations
catttgtttgataaattattttttcagctttttctttggaaattttgtctacctaattacccgcaaaaaaatgtcgcacaatccgaaggaagcaaagaaagaaatggaaaaagcgatgtgatattctaaatttgaatttccatggtaatcattttgcttttccttttcagcttcatcgctgccgactgttggctcaaagtgttcgatttgcttccacgctcacagcttggccttggaatttcgatgataagccgccgatttgactatttcgttgacgaacacttcaaaatccgcaaatggacatttgacaaattggaaattcgaagcaaaatcggagagaatggcgcaaaggaaatggaaattgtcaattccgatggaaaagaattgccaatcccacaaaattcgttgccgaacaaattcatcggattcggatgcattttgatcaagtgaaaattcaatttagaaatgatttgtaaccatttctggttttcagctacatcgaccaaaatgtgctcatttttctccgccgttttcaccgttttttcgccacatttgaaacaaaaattcacattggcactgtgaatgttcgcatttcgaagttcgctatgctcaccatttggccaatgttcaaggacaccattcgtgtgatgtatttcaattccatcactcttcgtcaaatgcgccaatttgctccgtcaatgctcaacgattcgccatcccttcgcgttgttgctttcgatgatggcatttcccccgaatttccgcctgacgacagtgccaatgcgacggatggccaagcggtggccaaatggctgttctcacctcgccatgacaatttgacgaaggcgctcagccttgaaaatttagcagtggagcaacaatggttggcaaccatggaacaaatcaaagcggtgattattacccattaattttctattttttttttgcctttaggcattttccgctgcttcttctcctgtcaatttcgtcatttctgttggcttttcgtcgtcctctccgattgattccgttgtgccatttgaactgaccaacgaattcactcaagagaaattgacactgtcaccggaattggttaacgtttataggcttactcgtcgttcaattgcagcagatgatgagggaaaatggatgaaggaaatgaatgaattgatgagaggacaaaagaacaacaaaattggcattttcatcggagacgacggaatcgataatgagtgaacatttaaaaatctgctaattttctcatttcattttgttttttttttattcagtcttctcgacgatttgccggggccgagtggtgatcattgatcagaaacagcaaaaaatgaattgattggatgattttgactgatgcgattatatgtgtcctaaatattgagatcattgttatttaaatgttgttgttgtatttgatttttgctcattcacaaatcaataaattagggctttgccaatattttcatacataaaaaggtgtgtcagtggccaattttgcgaagtgatccgtccggccattaaatcgatgcttttttttttgcttttcaaccaatttttttttgctaacctggaaccatggtctggataaaaatttcctaaataaacaacttccccacaattttgtgcaaaccaagagaaatttgatcatcatttcatgttcataaagttttttgaagagctaaatgatgggctaaaagcaacagacaaaaaaattattcttgaatacactcgaaaaagctgatttcatgttttcatgttctgtatattttggtctgtaaaacttcaaaaaaaagttaggttttcaaaaaaggcactgatcaaaaattctaagaaattaattaaattattggaggaatttaagacagggcaagttttttcaggttaaccactaattagtaacgctgttggggggtctcgactcgaggaaagtctcggtttattcgagattctaaactaaggattttttacacccctaatgagtgtatctaggcaaattggttctaagaaaaattataaaaaacatttttattgaaaaagactgttcgcaaaaaatcgaagtcattggaccaggcaaagtgccttcgccgttggcatttccgtcctggacggcacgttcagcagcagtagcgattgtcgtcaaaatgttcggttggccaacgtcaaaaaactacagccgaaatcaagcaatcagcgacgatgaaagaacaagcagcacaacccatccactggatttctgtgacgaacggatgctaaggattagacaaacatagacttttttcttttatccccaaagtgctccgaaatcaaatttaatcaggtttcgaatgggacaaactccctttccaaggacgggtataccggtttccaaggacataaggggaaaattccattanattcaaggacatttaaaaattttatcatatgtaatgaaaacgattaattttatcccaatgatttatatttttcgccgnaatgaaagtgttgccaatgttttttt

SEQ ID NO: 5289 - DNA, 2119 bp, Heterodera glycines
agttattgtataaaaacccggggaattgtcaaattgattggactcataaagtggcattagagtcagttaagctgccttccgccactttttctaaaaaaaaaaaaattcaaaaattttaaaatcatcaaaaatcttttcggtgtcgctgaccactaatatgacatgtatttcgatccatttcgattttttccaatcagcagctgccaaaaaaagatttgttgacgatattttcttatgagcacatatttatgagcatttaacacatttcttgtttatcaaaatgatcatatacactacacaagtacttaatatcgaattttgtcattttttgcaatttttcctgccaaatttccctttaattaggtatttattcctacattttgcaaaataagtaattttcttctacctctccccctattggtgccttctattcaaaggaattcatcagaaaggattttacctacagtaaatgctcgattagaagcccactctcgaacatagcccccttttggagggggggggggggggggttgaacaatataaccccatggggtctaatcgagtatttaccgtaattccccgtctgtacccgagtatataaagcggacctaatccccttccactcatatctttcaacccattcattccatccacacctatttgataattttttattcagttcacttctttttataattctgcttgattacatttcaaaaaatgtctgacaatccaaaggaagcggataaagaaatggaaaaagcgatgtgatattctaaatttgaatgtccatggctaatcattttgcttttccgttttaagtttcatcgctgccgactgttggcttgaggtgttcggtttgcttccacgttttcaacttggccttggcattgcgctgattagtcaccgatttgactatttcgttgacgaacacttcaaaatccgcaaatggacatttgacaaattggaaattcgaagcaaaatacaacgatggacaatgggcagattggaaattcgaggcaaaatcggagagaatggcgcaattgaaatggaaattgtcaattccgatggaaaagaattgccaattccgcaaaatccgttgccaaaaaaagtcatcggattcggaagcattgagatcgagtaaaaaatgaattgaatttgtacatgatttgtttccatcacattttctgattttcagcttcatcgaccaacatgtgctcacttttctcggccattttcatcggtttttctccgtttgttcgacaaagttgtacatttccactggaactgttcgcattgcggagttcgttgtgcttaccattttgccgatgttcaaggacaccattcgtctgttgtatttggacatcactgatcttcgtcatatgcgccaattggctccgtccattctcttcaattgtccgtctctccaagttgtcactacctttttcgattttttgcccgaatttccgcctgacgacagtgccaatgcgtcggatggccaagcgctgaccaaatggctgttcacgcctcatcccgacaatttgccaaaactgttttttgtccacatttgggaggatacggggaaacaatggtcgacaatcgtgggacaaatcaaagcggtgatttgttctaaatttgttttttcttattttttgtcttttaggcattttccgctgctgcttctcccgtttctttcaacattactgttgcctttatgccgttttatacgcttcctgatgttgtgccatttgaaatgaccaacgaattgactggggagaatttgaaaatgacaaaatcaattggaactgaggacgatgaagatatttttgagatcatccgttgttcagttgaagaagggagtgagcaaaaattggaaaaggcattgaatgaattggtttatggacgaaagaacaacaaaattgatttttccatcaaataccgcggagtcgacgaaaggtgaacaatttttaaaatcccaatgctaattttttgttttgttttttaaggcttctcgacgctgcttccgccgggccaagtggtgatcagaaacagcagaagaaatgaattgattggttgattgatgcgattatatgacataaatgttgatcattgttattta

SEQ ID NO: 5290 - DNA, 1013 bp, Heterodera glycines
attaccgttgaaaaaatgtctgacaatccgaaagaagcggagaaagaaatggaaaaagcgatgtaacaattaatctaaattataatttccatgctaattatttgtttttttagctttatctccgccgactgttggcttgaagtgttcgatttgcttccgccctttcagcttggccttggcattgcgttgatcagtcgccgctttgactattacgtcgacgaacactttaaaactcgcaaatggacattggacaaaatggaaattcaaatcaatggagaaattggacagaatggtgcaatggaaatgaaaattgtcaatgccaatttggattcgctgccaatcccacaacatccgttgccgaaaaaagtcatcggattcagatcaattacgatccagtataaaatgatttgtgatttgatacacacattctgattttttgtttcagtttcttcgatcaaaatgtgatcacttttcttggccattttcaccgttttttcgccaaatgcgcaacaaatttgtcaattgagacagagaatgttcgtatttcgaagttcattatgctcaacatttggccaaagttcaataacaccattcgtctgatatattttcactccatcgcttttggtcaaatgcgccaattggccccgtcaatgctcaacgattgtccatcccttggaattgtcagtttccgtgacggaattttccccgaatttccgcctgatgacagtgccaatgcgtcggatggccaaatggtggcaaaatggctgttctcgccacgtcctgacaatttgccgaagtcactcagaattatgaattcattggttgaccaatggttggcaatcgttgagcaaattagatcggtgattttttgattattcaagtttaattcgttttcctttttttctcctttttaggcattttccaatgcttcttctcctgtttatttcatcatttctgtttcctttccgccgtcttctctttcgtccgttgtgccctttgaactgaccaacgaa

SEQ ID NO: 5291 - DNA, 2743 bp, Heterodera glycines
aaactgcactattacgtgcttttcagtatcaaaggaacctcgtgcctcggccgagctcatcaataagcaccagcgaatgtcgcgtcgcctgcgacaaaattgtgttcgtctctgacaattccacgaaaaatgtcgattgtccttaatgagtcgagtaataaaacaacaggcacgaaactgattagccaaaggacacctgcagataatctgtcactggcgccgatccgacaaaaaatgcgatcgaccggcgtaagtcgcatcgaatcagccggcaccattgagccctcaaatagcgaacggcaaagattaattagagaacagttcgccaatttgagaacccacaatgtgtgcaagtgccacaagggtggccacttgccgcatgaaagtgcttttcccgcccatattcggccctgtcagcaacatcgtgtgggccgtgttcgagccacagcccagcacacagctgttcggaatgtaattgaaactgccggctgacgccgacttaaggtcggccaacgacggatggaacccacgctgaatgtcgacgaacggctaaaaaacagtggtcgaataaacaatcaacgtattattgaaccatgtcaaattcgaacacaaactccggaaaacacattttgtgaggcgatgactgcgcgtacagagaaaggcccattagacaatcgaaagtggcaatttggtgaacaattgaagaccatttgtcctttctgatggtttataaaagggaattaattattaaatgcgttttgtttcggcgtggtcaaccgaccgcacatccaaatcagcaaaaactctacgggtgacctccgcactgatcgtggcacagtttgtctccgcatcgttcagtttgtccaccagtttttgcaggttattagtcgtgtagcgtttgtaccccttcgttataaatggacaaattgtttacgtcacctccccctcccttcgaatttccgttttacttttcgttgggacgtgaattggaaatcgtccgtcaaattgtgacatgccgactcggggatttccaattggtgtgaatttctgcctgtgcccacgaatttcggcgtgcatttcaactttttgcttgcccagcccaaatacgcctccaactgttctttgcaatgttcaatttctcgacatgtcccgtcgtattccgagtcaacgccccgtcgaggcaaaataacgccacgctcgagggcattctcacggtcaaatgcaccctgaaaatgaaaagtgatgcagtgctcacaatcagaaaattcggaggggagggggggggaagttttttttttgctctgtgccaaaatttccaataaatatttccaacaggcaacgcttaaatgagaaaaaaaagcttttgcccatttgttattaaaatgccaaaccaaataatgaccttaaagaagcccaaatcttccaccatttctttgtaattggcactcaaacattcgtttaaaagaggcggtgcactgaaattaatacgtaaaaaagtacaccaataaattaatttttcatttttaaaaacgaacttcgattcgccctgcgagtttatctcttcgaataaaagcattagtttccgagtgtcttccagaccatcgaggacaatgagcaaatctttgattttgcgtttgttatatttgtcagcttcgaagagatttgcccgggagtccgggtgtccgttgctcgaatccatccggtatttaagaccaattgtgtgaattctgaaaattcaatgttttaaattaaaactttttatgcgcaagtgcaatcctcgggtcagtggccacaaagttgcacagggaatggtaatgggtggaaaagagcgttcggcagccaatgctccgcatgatgtgtttgaaaacggcacatgcaatggcagtcccgtcggtgtactgaataattgacattaaagggattaattaacgagtgcttttcagaggaacctcgtgcctcggccgagctcatcaataagcaccagcgaatgtcgcgtcgcctgcgacaaaattgtgttcgtctcagacaattccacgaaaaatgtcgattgtccttaatgagccgagtaataaaacaacaggcaacgaaactgatcagccaacggacacctgcagataatctgtcactggcgccgatccgacaaaaaatgcgatcgaccggcgtaagtcgcatcgaatcagccggcaccattgagccctcaaatagcgagcgcaaagattaattagagaacaattcgccaatttgagaacccacaatgtgtgcaagtgccacaagggtggccacttgccgcatgaaagtgcttttcccgcccatattcggccctgtcagcaacatcgtgtgggccgtgttcgagccacagcccagcacacagctgttcggaatgtaattgaaactgccggctgacgccgacttaaggtcggccaacgacggatggaacccacgctgaatgtcgacgaacggctaaaaaacagtggtcgaataaacaatcaacgtattattgaaccgtgtcaaattcgaacacaaactccggaaaacacattttgtgaggcgatgactgcgcgtacagagagagcgccattagacaatcgaaagtgccatttggtgaacaattgaagaccatttgtccttttctgatggtgttataaaagggaattaattataaaatgcgtttttgttttcggcgtggtcaaccgaccgcacatccaaatcagcaaaaactctacgggtgacctccgcactgatc

SEQ ID NO: 5292 - DNA, 2240 bp, Heterodera glycines
  unsure (1)..(2240): unsure at all n locations
cgtggcacagttgtctccgcatcgttcagtttgtccaccagttttgncaggttattagtcgtgtagcgtttgtaccccttcgttataaatggacaaattgtttacgtcacctccncctcccttcgaatttccgttttacttttcgttgggacgtgaattggaaatcgtccgtcaaattgtgacatgccgactcggggatttccaattggtgtgaatttctgcctgtgcccacgaatttcggcgtgcatttcaactttttgcttgcccagcccaaatacgcctccaactgttctttgcaatgttcaatttctcgacatgtcccgtcgtattccgagtcaacgccccgtcgaggcaaaataacgccacgctcgagggcattctcacggtcaaatgcaccctgaaaatgaaaagtgatgcagtgctcacaatcagtctcacaagcagaaaattcggaggggaggggggggggaagttttttttttgctctgtgccaaaatttccaataaatatttccaacaggcaacgcttaaatgagaaaaaaaagcttttgccaatttgttattaaaatgccaaaccaaataatgaccttaaagaagcccaaatcttccaccatttctttgtaattggcactcaaacattcgtttaaaagaggcggtgcactgaaattaatacgtaaaaaagtacaccaataaattaatttttcatttttaaaaacgaacttcgattcgccctgcgagtttatctcttcgaataaaagcattagtttccgagtgtcttccagaccatcgaggacaatgagcaaatctttgattttgcgtttgttatatttgtcagcttcgaagagatttgcccgagagtccgggtgtccgttgctcgaatccatccggtatttaagaccaattgtgtgaattctgaaaattcaatgttttaaattaaaacttttgtgatgttacctttggaaaaggcgttccaagtccggaattttcctcaataagtcggtcatttttgtcaaatttggacgcctttcgtcggataaaagccactcgacagacttttgtctgcccaaaagcgatttccgatcgctaatcggcgcacagatccattgtcgaagcaaacgttttccaaagggagtttggcatcggtttatagtgttatacagcgaaaaatttgcattattcattcggaaagaggatgcagcaaaggacgaagaagcggaggaaaggccggagacggaaagagaagggataatgtgcaaattggagagagagacgccgtccaacaccctaattatgtaatttaggaagataaatgccaattccaagaaaacgaacttttcattcccattcccctaaaaagcattctcgtgacccttcccgataagatttttgcctttttactcacatatgttttccttcccagaatgcctcgtcctccatgccatttttcgctcctttcacaatttctttgctttcaatgtacggcggaatgtacgcggaaaagcgacgcatggtgacagtgtccacgtctacaaggcaatgcttaaggtacctaaaatcaagaaaatgaaaaagtataaatgaaagtggaatccaaagaaaaaaacgaaccaaagaacggctcccaaggaggacaaacaaagtctgtgacattctgagggcgcggggattgccacgtcgggcgaagccaacatttgacggacagtctcaggccaatcatccaaatgggcaccaaaataattgtcatcgcaaagcttaaaaaaattgccttattatttaaattatttgttttgttggcatttcttccattattccctttttggcactaccaaatgccacccactcactgttgttagtgttgtttcggcacttaaaaactgacgttttggcagcaatgcttcctttgaaacggcagaaagcattgtgctaaccaaagccattgagggggcggagagggcgcccttttcgtagagcaactgaattagtagaaaatgcaaaggttaaaagaaacaatgaagtcgacctggacgggataattatgtgccaataaagttcgcaaattgctctgattggcatcatcgtcaaactcggcaagtttaaacgcggcaattgaacaatcgacgaagcaaacgccgaaacgaagggaaccgcccgggggaaacccacaaaaaaccaacattcaaaaacagactagagacgaagctaattgtaagtaaatatactttttccgccaatgccatcaaa

SEQ ID NO: 5293 - DNA, 959 bp, Heterodera glycines
ccatcagccactttaaatgaatacatctccagcactcatatttctttttcaaatgtcaggcattttttgatttttaggtattttttgaaattaatttaatttttcgaatttttcaaaatcccgcacgcgaccctgcaaattttaaatgcgggattaatcccgcgggatcccgttccgcaaaaaattttaagttccaatcccgcagcgggatccgcaaatttaaaatttccggtctataattgaaatgcaacggttggcgaaaatatttagcataaaaagcaatcagataaaaaatttaatcgtcaaatgaatacaaaaaattacggataaaaaacaagaaacaatttacgggattgatgtctttgggttcacctcaattggcacttcgtggaattggctgacattgggttgcacatcgtccggttccatacattttttcggatttcatcagttctatggcttctccgtgtctttcttctacagccaatcggaaaaaattgtgcaattttaaaaggaggatcagcgtggaaaaggaagcattctcttcgttcatgtttggttgtccgaattgttgggccaaccatttggcacattcgaccatctcacaagtttctttggccattggattggacacgcacatggagagttggcaatttgccaattttatggctttttcgtgacactaaatcagaaacggtttattgtgattagtaaattaaatgttttttctaacctttgccaatgcgtaaaggtgacacgcagcaagagagtgtccctggacatgagtgtcgaaggcaatgctggcaatcaattcgcaaatgtccatggcgtctttaatttgtcaatgagaccggggactctgttcccctgagagtccaatcggcccaaaatcgcttcccgatggccggacatgaacactattccggtgacagcagccacaaaaacactccgaccttttt

SEQ ID NO: 5294 - DNA, 2812 bp, Heterodera glycines
  unsure (1)..(2812): unsure at all n locations
atttgtcgcactgcaaaaacagtttagatgcaaatccacctttctgtctaattgtggcatgtccgcggaaggtgtgtccaacttaaagtcgcgcgcaaaaaaacangtaatttattgcgtattcgatattgctcaattcaaagtccttgacaaagagaagcaaaagacgggccaaattcagtcgacaaacactcggctcatgcacatcggtggtcacttgaatgaaaagcaagtgcaaagcagcacacaattcagtacactcacacaactcatcggacacttttggtacggtcatcagcaaacgtaattgatgggccagaatagccaaatgtacggcatgaacaatgtattcggacctgaacagcacatgcacggccctttcgatttgaccggtgagcaaaaggacggaaaaataaatcaaatggctgccaccttcgccaacaaaatagcgttcgcctgaaggccttaaattggaaataagtggaagttggaattaccatgctgagtgcaaagtgtcgtttggagttggcgaagtgcccgtgccgggtcaacggcaaatttacaatggaacaatttggcccaaagccaatcctcgatggtgccatttatttcaggacagtcaaagccgagaaacagtccgtagatggcctttttgtgcatgtcttggcaattctgggcgttccattccgcgcgcaatttcaggcgtcgctcgtcgtttaacaaatcgctaaagagaattcgttttttgggcaaaggttcctaaaaatacgatttcggcaaagttttcagaatcccgacaagcgatgcacagtgcggattgtttgacaactctttggcctccttggcaactcggccagcctcagccatgtcgcccacacgaaggcaatagaatagcaatgtccaaatagggtatcgttcgaacagtccgtcctatccaatggaaatttggaaaaatgaaaatgacaacgaattgaacctcgaatgggtcacgggaaggcattttcacgttcaaataagcaagaatccttgacaaagtgccgggaatgcctccacggcgtgccttttccaaattcgcttcgatggtggcttcggtgtgagaaataaatctaaacagcggatgaaatgttatcaatgaaacaataataaaaaatatatgctcactcattttgcagaaatttggtgctattgtcgattatatgtcccatccaattatgtgacgatcttttctcgtgccaattttcaccaattgatgacggaaacatggcccaagctttagaccaaatataatcggcttccttcgatttcaaattgctcagtgattctttcacggcaagtagaattaaagccgaggcgttggatgtaagggtttcgttaacctgacaatttacgagaaagaattacaatgggatgaatggtcattaaccttttgtgcaaatacgctctgttcgtgggacagtggcgcattcggaagatttatgaaacgctttattccaccacttgctgttctgtccggttgtgccgagcccattgcccttttgttcacggggccaaacaaactttccccgggtgcaaagcgtcgctccaaaatttgctggttgaggaaggtccgctccgcctcaatctgagctcgttcaatcgtacgttgcacaaatttgtttgtttctgcatccgtaaatcgttcattcaaaacatcagtgtttatatcctcgtaacggtcagaagcatcagccgacggaggcttttcggcaatttttgatatggggagacgggtggatgaaagctgactctgaatgattattttgaattaatctttaaacagtgaatgaacagttccaccaactaagtcctggttggtctttagcgaagcgcccattccgacggccgtcggccgcagtgactgttttctcgaccaaatctcttcactgcgtctgaatacatcgtctaaaccagcgtccaacaaagcagcggcgcatggatgacacgcaaattcgtgaagcgttccaaatttttttttttttttttaacatgcacatgtggtgtagtggttaaactttctacctttcataatttttcgcctgggttcaattccccacttggatagaatattcctcacattttctttaccattattttaattaaaattttaattttaaaaaatattccaacttttttctttcatgttaagcatcctaaaaacccaaaacttaatcaattggtcatttttttgataagtaattgtccaattaagccctaaatgcaaaatctaaattcaatttcccgccgcagaccctccgtcactatccccccaattaactccaaaaaacagcgaattgtgcaccaattggacaattccgcctcagcaattgaacaattccacatggagcatcttaccgatgcgcctccatgggcttccgcaatgttgggactggtgaaccaaatggttggaatgtgccgcgagctgatctccatggtacgcgagcaggacggaggaagcaacccgaacagtgtttttgacgaagaacgacgactgcacagcgttgtcatcgcgcaattgcaggaaagcaacagccaaacgccaactcaacgtgcaaccgatgacttggcgaatgtcaaagaactgatggaccattgtgacatcgaatgcctgccgacccaagtgtacagaatgggcaaaaacaagccgancgacgtccaaggttgctcaaagttgaactcccgaccaattccataccaatttatttttgcgcaacaaaaacaaatcaaaaattttaacaatttttccaaaagtttgttgcgcccctccctatctaaa

SEQ ID NO: 5295 - DNA, 2719 bp, Heterodera glycines
attaagcacaaaaagcccgaaataggcaaaaaataggcattataaaagtcattatagacaccccaaaccaagcggaaaacgcgattctcgtgcttatctgtgtgaatattgttcgaagaaatttaggcatttgcctaaaaacgaattcctagttctctgtccataacttttttgaatgttaggaaaatccggtctcaattattctaaaagtttaaaaatattttccaacaaatccaagcattgttaagcatttcaaattgcttttttttcttttttaaatatatattttaacaatgaaaaattatttaaaaactatttgatgctacatctttttcataagtgttaacctgaaaaattggggtgctagtgcatttcgtaaacgaaatggggtgggtgtggtagaaaaaaaaaaattgtaaaaaataaatttcatatcttggcccaagttaaacaaatataatatttcgtggtattttttaatagatatgggggtattctttcagaatataatattacaaaatttttatcttaagtataaaaaagttatcgtcataaaatttaaaaagtcttatatcagaattttttgtacagaacttttttgaaattcaattaaattttctgaaattttaaaggtaaatagagaattcttagagctatcaaatatataaattaatttggctcaatttcattttatagatttaaaacattgtgtttataattatatatgcttgaccattgcaaaaaacctagaatgttcaatgatttataacttttttatacttaagataaaaattttgtaatattatattctgaaagaatacacccatagctattaaaaaataccatgaaatattaatttggttgaacttgggccaagttatgaatttttatttgttatacatatttttgttccgaacccattggcggatttacgaaacgcgctagcggttttacgaaacgcgcatgggtggtggctttagcaaaatacccatttgacggttttacgaaacgcgctggcggatttagaaaacgcgcatgggtggcggtttttacgaaatgcaccagcacgaaaaattatcaacaaaaatcgactagagagaagataaattttacataagtatagccgtgacagcatctcgaaaccataattatttgtgactatttttggctagttttaatcaataaaacaaaaaagtgaattctgaattttgttcgaatttggattggcaatttagaatagacataaaatgaattctattttaatgttcagtgtgacccagaaaatccctctgttttttcatgatccggttccatgcccggcaattggaaagtctggtttgactagttttcagatttgccggttatggagaagccgaactcgaaagccggttgcttctaaaaatatcaggcggcccagctgatttgaaaatctttggcctctaatcattaccgtctaaaaccatgcaagaggctcattttcacattttcgataaagcattgtggacggggcaaaaaatatttcataaaatctttaatagattgacatttttcaaaatctaataattgtctggcataaaagtgcatggattgcattgtgactgagactgaattagacttaagtgcattagaatgacaaaagaaaaaatattttattgaaaactgaatcagctgactatcaaaaaagggcattgagaaatctgttgacagttgtctggcattgaatggcaccacgcattatcaaatggaaaagtggcattgggaaaagggcaataataattgtctgccataaaagggcatggctggcattgtgacttcgcgatggatttaagtgcacgcaaaaattttagccatgtatttaagcaagaaaatcaacggcataatcattccaatgtttctttttcttcttaaaggactaaagtttctacttcttttttttgctcaatttccctaatatctggtcatttaatcagaaaataaataaattatgtcgagactctttgtttaattcgaccttctaaggaattatgccttaggaattaaccaatttaatattaattatattatttctcccgaatttcccaatgattcaacaaatttatttgcacaattgaatgatcaaatgaatgatgaattgctctctttttgctttcttaaatatgattttccttccccattttgattaatcatcatctctttcctttgatctttcgtcgcgcttatcggcggcgacaaattatttgaaaataattaccttaaaattttttgattaaaaatatttttttgctttaactttttgctttccagacgtttaaaacgaaagaaaagtttccttttatattttttagatgataaaaaataaaatttaaaaaacttttgggtttttcatttcttttttcttgaaaaattctatgttgctccagtttaccagtccttgttccggttcaaaatcgagtcctggtcccggcttttctggtcccggcaactcccgatttgcctaaattcccggtatagttcgccccaaccaaatattttaaggaatttctttcccgatccccgattttctcttccaaaagtcggggagcaacccaacttaaacgcagggagcggatgatacttgcatttgaactcattttgtggtttttgattgattaatgcggttttatttttaaaagcagttagttttttgtggttttgaaaagtttaaattttgcactttttt

SEQ ID NO: 5296 - DNA, 1566 bp, Heterodera glycines
  unsure (1)..(1566): unsure at all n locations
attagaactcgtaaaaaaaccaattttgctnttgctattcaagatgatattaatnnntcaagtgtagaaagaacaaaattccaatcattaaattataattctttttttcctttactagtttttttaaataaaattatgagccgaggtcaacaacaattagccataataatacacacacaattcatttaattaaaaatttcttataaaatgtccaaagtttcttttttgaatgatatattcgcaatgaatttcttaaatttatgcagtaacaattttatttaaaaaataaataaataaattttcatattttattatgatttttttccggtctcatttctcaacccttccgaccttaatggccaaccacccatcgtgcaagtgttaaaaaattctttttcagagatgaatccgatcacttttttgtctgcggtttgctgcttcctttttctggccaaccatttccaaagtgtcgctgctgcttcaacgaacgtgttcgttcagggaaaaaaaagctacacaattaacttgattcttgatgatagggaaggtggttatatacaacaaataacaacaaaaaaagtcaacggaaaacaatgtctgacgcttaatcaaaacctttggaaaacgtaccaagacgatgatgtgattgcattccgtcatggatcgacggacgtaattcaaacaaatcaataaataaaaaaaattcgtattgtggtttggcgaaatgaaaattttccggcctgtctcgtctcgcttacacatttatttttaaaccttaatcttattcaatattctaagattttttcttcttttttttttgttaatttttcaaaaataatataaatatttttcattttcaggcgctgattggtagcatcactgtcaagttattgcgtgcggacacttcaatagacatttctgctgataatactcatctctagtgctgctcggtccaaaattttccgagaccgaaaatcccagagacctagaccgaaaaacccgaaaccgagactcgagaccgagagcaaaaaaccgagacttttccagagtccataatctcgagcagcactagtccttatagtatatctgaacacagagaaagccaagcagcagaatgggttgggttggatttcattttttctcatattgatgcaattctgttagttagttgcttttgttgatgcccctttgggctttgttgcgataaaaaattcttcaattcaaaattttttggtaatattttagtgaagatatgaatcaggttcttttcgactgaaatccaggtcaacgcggcattttggcaatttagatttttcctgacctatatttccgagtgttttgtcaggaaatccaggtccatgttaaacacgaaaaaaataggcaaatgtaaggcaggaaaaacctggatttcttcgtaatatattatttatttcgaatgaccaatgttttgtctaggcttttttaatgtcgaactttagtggttatttagggatgtcatttaaaagatgaattaattgcctgaaacaatatttactttttagattttttgttatctcttatgtattt

SEQ ID NO: 5297 - DNA, 1931 bp, Heterodera glycines
  unsure (1)..(1931): unsure at all n locations
ttaaactgaaaaatcattaaagatataagtaaaaattgttatatttatttcataaatttaattgtacaatttgtgcatataaaaataatcaaaaatttatggaataattaagtttgttttttaaaaattagtttttcaaaatcctcccgttttgttccaaaattgtgtatagcgttcgggtctgatcaattcaaaaatgtgtgtttaaattttgtccttggcattctgctgctgatcagtgccatcctccaacaacagcaattgttccggcaatttcctgctattattgatcatcatttgatcctgatcagtcatatgctgatcagtttttgtccctccgctgatcacttcctcctcctcatcgtccgtctgttcccgcttggcccatggctgcacatcggcactggccaacacagcaaatgccaaagcaccaagcaccaaaatcagttcagtgatgccaaatacggtcaaccattccgtcttggagccctaaataatggaaaaattcaagaaattttcaggaaaaaattttgttactcgagtttcagactcaattttccaatttaattgaacccatttctaatgttaatatctaaacagattctcaaaattccacaataaattgtttattcgagaagaatttaaaaatatatatttcttggcgtagtgattacattttaaaaattcttacggttggcgttagccatcccatcagaattgggccaagaaagccggccaaacaggagagggtgtttccaagtccaagcagtaggccggccaactcaggtgcaatgtctaggtagtttatcacaaagccagaatactgtaaatgcaattttttgaaattttatatctttggccctttgcctgaaatccggaaatgccaatggacagcgtcagaagcgtgatcaccaatttatcatagccgcaagggcaaaagctgatcagcagcaggaaaaatgcttggccaccgagtgccaatgccattgccaaccgtcgacagttcagcgttgagagcagctgacgttgtagcaatgaatcggacagctgcattgaaaaattgatagatggcatcgtcacaaaaaatttttttgtgaataaataaaaataaaattatttttgaaatatttactcatttttagtaatatgaaatggattcgcccgattcaatggcatttaatattttaaaatttaataaattatcaacttgatatgattctgatcaaacctaatgattatacggataatctttaataagtgaatacagcataacttacatgaccgccgagattgatcaccgcaaaatagacgacatatggtatcgctgaggcaaaacccatctagaatattaaataaaaataaatctaaattaattaattaaattatttttgaaacttactgaagtcatctgcattccgagcacgtcgttcaaaaaagatggtaacccttaaaaagcaaaaatgcttttgacaacgaaatggatacgactgaagcttaaacgagtttgatattctgatcagaatagaaattcataaatttattcttgttttttatttgccaaaaaatgcatggaaaattttatttattttttattttgttaatttttgaaagagtttagaatggcataactaataaaattgaaaactgagatttttgaaaaaaaaaaaattttttttgtagaaaaagatgtttttacatctatgacctatggcataaaaatgatacccaatgccatcatgtatgcgccccaatcgccggcaaagtgcccgatcagaatggcccagacggcttttgagcgaacaatggcaccgatcggaattggacgagatggacgacgaatgacggattcttcactatcctgatatggataataataccattttcataataataatttttataaaaattattggcattntaaagccctttaa

SEQ ID NO: 5298 - DNA, 1522 bp, Heterodera glycines
  unsure (1)..(1522): unsure at all n locations
gatcaatgaaatccnttatgcatcattcatttttgcaaatacnaaacncnaagcacttgcnctcgactttgcttggaccaatcaaattcaccaggcncaagtgggaccggaagatattgttcaacatcagcatcatgatgaccaataagagcctgaactgacaagatattaacatcagttatatgatcccgagcttataatttttaccgtgtcttggaaacggcaaaaatgctttcaaaataattatttatcccttaatccgagaccttgtcacaatcaattctcgttatttcatgctaagctgaggccaaaagttgatctcaaggatgtatccaagatcatgtgacttttttttttcttgacccaagaattattctcggagttgactctcgactaatttttttaggctaagatcaaaaatattttcatcgttaaaaatttgagcaattaaatgattatggataatttattgtagcgattaccgatcgattagtctgcctcctgaacctgctaatggccatatcactttcattaatgggcagttgtcgttgttgctccgttgtcgcatgcgcggcaccgcatcccttttttgttgtgccattgtcgtccaccgtaggcgatccctccttgaccatacaaacgatggcaaatgacaaatttgagcgcagcgcatagcaaagtgcgcagcccgcaaaacagatcagtgccaagctgaaccgtttggagagaagcagcgctggaaattggcaatttatttttaaatttacatggtacaacaaaatgccaattttttgtatgcctttatgggtatggagatttttattttttatatacagggatgcaaaaaatatggacgaaaagtggccaaaatatgcacataaatatgcaaataaagtcgtgaaatatgcaccaaatatgcattaaaaagttgaaatttggggtgcaaattaattaaaaaaaatttttttttctcatagagtttatcggttgtttttgcaattacagatcaaaaatttctcgattttcggcagtgaggcttcctgtttacccactcgcgcatccattcagattttgatttcattttaggcataataaaaattttttcctaagagatattaaaatcggaaaatatttgacgaaaaatggcaaaatatgcaaaaatatgcaaataaaagtcccgatttttatacgcaaacacaaaaaagaaagtgtttttcctgctatttagagcatggagaagccaggaaaaaaaatatgcatttgcatgttttttgcatccctggttatatactactgatcttagtctaagttatggaattttttgaaattctgagccctgataaaatttagtcaatcaaatttttatccgaatttcctgcttgcctttagaatttatctaaacccatttttggctttttttttaaatttttcaagccatttccccaagtattacataagtagagaccgacttttgaggcatatgcctttttttctgcgcactagtttcgatatattaagcata

SEQ ID NO: 5299 - DNA, 2083 bp, Heterodera glycines
cttttggagagaaaaaatggacgaaattcgcgcagagattggaaagggagggaattcggtgaagaaaacttacaaaatgtggcacaaattggccaatttgttcaacaaaattcccatttcgaagtcgcagcaaaaaattggcataatttacgacaaatttggccaaacgaagacggaatttttgtggaaagcgaaagaccaaatgatggaagaacacgcgaaaaatgtggccaaattggcaggggacggacagaacgaacttagccgaactttggccaattcaattggccaaatgagaggggccaaacatcggctcaaaagctttttcacctccaaattcaaaggcaccgaaattttggaaaaattaatgggagaagacgcgaattttgcggcagtgtttcgttcaggtgaaagtttaaaaaaattttaaaatgtttttgttaatttgtctcgttcccatttttcatagatttaacttcaaacgaaataaaggaattacaaataaaattttacctaaaatttttggacagtgaaagcgaaacggacgattatttgagagcaaaattaattgtggacaatttggcattttatcaatggtaaataaaaccattggccgttaatttttatttgttttttaatttttcaattttaggttcaaaaataggcgacaaaaactgccaaagaatggacagtcccttctcgagcagcacctcctccaaatcgaacttcgcttggattccatcgccgaaatcgaaacttcggagggaacggaattggcacacgaagcgaaaatgatggcactgaaaatgtcaaaagacaaacttttcccagaagaaaacccaacggaagtgaaaacatttggcaaaagtatgaaaaatgaggcaaacaatgtgaagaagactctgttgatgatggaaatgcattgtaaaatcatcgaagaatttgcggaaaatgagcagaaatttatggacggagttaaaagtggggaaaaactaattaattaataaacttattagtgtgatttaattattaaataattagtttctaattaattaattgtaattaattattagtgattgatttagaaattgttcttgacagtcaacgtttgcacaaaatgataccacgactgagcaaaacatgccaacttttgaaggaaaatgccaaaggggagacaaacggaagaaagaaaagcaatgggaaaaatgagacggaaaagcgggcggaagcagaaaaaggagaagcaaacggacaaaggggcggagaatgcgtcgcttcggacggtaagggaaaactaatgggcaattagtgttaattatcattaattgcttttgccatttgccattgatcactgaagaggaatccgacctgatcagctgctatcgccatttaatgtgtgctgatcagccaatttcgaaatctgacaaaacatttttaatggtcaattcgctttttttccatctgaaattagtgataaacgaacttttattagtcacaaataaaatcaaaagcgacggacggaaaaatgaaaaaatgaggcgaaaggcaattgaaattgaagtggaagtgcaaaagaggcaacttttggcaaaaacggaaaatttggagcaaaaaattgccaaaatttgctatttgacaattatttgggagaaaagcatttcgaatgaattttttgtgaaaaaggcaaaatttggagaacatttttggatgtcaaattcaataaaaaaggtaaatgaattaatttatataaaaactaactcttttaatatttattccatttaatttatttatttttaattaattttttaacagaaagtgtctttttcttcccccgccgaaagtgacgaaaatttggacttttctttttgtgaggaaagtgaaaatgcccttaagctttcacaacatctgatgaatgcgcaatcatttgaagtaacgcaggaaatagtgctgaaccatttgctgagaaaggacagagaattcgctaattttgtgtgtttcaatcgaaacgaaatgccaatgttaagaaaatgcggtaattttcggcggggggttcgatgaccacacggccttcgagaataacgtt

SEQ ID NO: 5300 - DNA, 3420 bp, Heterodera glycines
ccccccctcggcttggccacaaaaatgtgccaataatgcattcgttcctccttttccgtctcactttttcagcagaatttgatgactccgatcagatgcatcgtttgtatttggctttgtttgcctccgatgattctgagttggcttttcgaaatgagacgaccctggccataaaactgatggattcgatcattgccaaaggcgaggaaacggtgctcacttttggcaattacaaagaaattgcggtggcacgggccgaagtgagggcaatggcggcggtgcatttgaactttctgaaggaggagcaccaattccgcatcatttgtcgccagtttgccaatctgaactttttgagccgaaagatggtcgatccgtccgccttttggcttttgcccattgattgttcggccattagtcgcgaggagacttttcgcttgcagcgtgccgtcctcaaaatatctcattgggattttctgcacgaccattttgataagagcccaacagaggatggcattttgagaacggtgcggcaaaagcgcggggcattcgctttggtggccaaactgatcggaggggaaaagctgttggaactgtgggaggacaaagggatccgagcgaagctaatggacacgaattgtaagtgaaaaacggagaccattcagacacttttgcatactgttgtaccgccttaccataaccatttttttcatttttcaacaacaaaaaccgactcttggaccattacgtcggcgctttgcttgcggccgacacgacggaaaattgcgtcgatcgaatgcgcgaaataaaagcgaatgatttaatcgtatggacgcaatggttccaagcgaagcacggagaacaagcggaagacattcagaagcaaatggatttcctttggctgtatttgcgcattacgtacgaatcgtacgaaagcgaatcggacgaaatattcgaaaaaattgccgaaaatatggaaataacacggagaagtagttaattagttaatgggtgggctaattatcaattaacaaacaaacagaactcacccaaatgctttcttcggagcgtcagaattcatcgaatggcactttgggtaaatcattgaaaaattggcgcgacataattaggagggcgttcgacgcatggaattcggcggaatgggacgaatggtgatgcgacatttgcggcgctgacatttgcggcgttgacacttgcggcgcagacagttgcggcgctcagtcaaaacgacacttgcggcgcagacatttgcggcgtgacacttgcggcgccgacacttgcggcgacgacacttgcggcgccgacacttccggcgcccagtcaaaaggacacttgcggcgccgacacttgcggcgcccagtcaaaaggacatttgcggcggcgcaaaattcaacgaccccaaaaatatttcaacaatttattttcatttaaaacattgataatgactctctcagtcccattcttcaaagcctttcatccctaggcgctattgcaacgcatgaatgtgattaattatatcagcttggtttttgttttccttatggtcaaaatcgatgactaatcgtcggatcgcttcatcatttctcaaatatttttttaagcgtggcctttcagcaattccacgagttgggtcaatttcgtaaggtctcagacggttttgttggtgttcttcctcatttttgatggcgataatgaaccttattgaaattattttattacagtacccatttatactttgaaaatgatgtgtgtggcgaagtgaaacgttttctgaagctgttatgccacctaagaaattaattattaataaaaatgaataagataagctttagtcaaataaagattaacaaatttaagaccccaaaaaaaccaaaaataaataagttgttttttgaaaaaagtaatcaattcagaaaataaaaaatgaaaatatataaaaagacccattcacccttcgactccattattcgtacgctgctgtagaaaatttgatggaaaattaaaaatcaactgataaaattttatcaaataccacataaatttaattttattgaattaggcattgttaaaaaataaactattaaaataacaattctgttaactttaataaattgttgaaatatttttggggtcgttgaattttgcgccgccgcaaatgtccttttgactgggcgccgcaagtgtcggcgccgcaagtgtccttttgactgggcgccggaagtgtcagcgccgcaagtgtcgtcgccgcaagtgtcggcgccgcaagtgtcacgccgcaaatgtctgcgccgcaagtgtcgctttgactgagcgccgcaactgtctgcgccgcaagtgtcagcgccgcaaatgtcgcatcacctcctatattatgtttttagacattggtcaccgcttattatttccaatttctttattgctattaaatggaattaaaataatttatatttttaaataaatttgtccgttaaacatgagctgcatcatgatggatacaatggaaaggatgccgtcctttgtaataagtgaataaaatttgaataattacataataaaacaaatttttttgttaaatatttttttagttattttaaaattttgacaaaacttctaattatttttacataataaatattttaatatatttttcacattttattaaaaaaaattaataactattgattcgacgttttaaaatagcatattatgcgattttgccgagttttgccaaatcaaatatttatgcaattattgttgttggcatgcgctaaatctgtgaaattgaccaaaattatttttgccccatgttgcggcaaaaatcctataaattaaatatcaaaaattaaattttaatgttaaaacaccggactagtagcgttttgctacaaccagccgagcctcagaggacaattccctttttcgttgtaatttcatcgttgatttatattcgtaggttatcaacacggcaatccaaaagctggaattttttttaattctgcatttcctcatacattctttttaaatcattttattcattttacaatttagtttacgtcagcagttctctacgtcagcaacttggccaaatgtttcgtgccgcttttgttgcccgtcccgtgcgattccaattccttgtcgaacattgccaacacagtcagaatgtcttccgtgatggtctgctccttctcacaacgattgcctggcacatagtcatgcctatgacaaaaaatccgaattttcgtgatattttctcgaaatttggcaccttaagaccctcgaaaaaaattatcaaaaattttttttttgaatacttaaaaaatgcccaatttttcgtgtaattttctcgacttttggctccttaagacttcaatcccgaaacttgagcttaattaaaacgaatta

SEQ ID NO: 5301 - DNA, 1449 bp, Heterodera glycines
  unsure (1)..(1449): unsure at all n locations
ttttcagatggtcaactgcaacaacaaccactgcagcagaagcaacaacagtcgcaacagcagccgcggtacagtgcgggcgggagcagcagcactttcttcgaggcgatcagaagtgccgctgaagagggacagcagcaccaccagcaacaacaacagcagcagttgctgcagcaaaaacagtcggctccgcccagttggcttccggtgccgcccggcttctcgccgctgttctcttcaacaaacagcaccaccaccaccgcgcacaacaacaacagcaacaacaataataataagagttccaactgacattggacggaccgccgtcgaagcgattggagggaacgaacgaaccgaacactgctgcagacagataccataccattttttgttgtttatttgatttctttcaatgcactcaaacaaaacacacaaatgttgtgttgtgctgctgcacttttgaccgtgtcccttttcttcctttctttttgttcgctctttttttgtgtttgttgtccttctgctgctgctgcaagtccatgcgccgctcgctctttgtttcctttgcgtataaatgagtcaatcaccgccgccacctaaaccgaatgtgatttcccccaccctctctcccttatcctatcgtattcctttttctatcccatatgtcccctttcgcaaatcgttatacattttgaaaatttgacccgtggtggatgtgtattgacgattttaaagacgaaatgataaatgagatggagtttccgagcccaaaaatgtcggttgaattttaaatttaatttgttgatttgaagaaattgaaaattatttcgaaagactattatgttaattatttgngaattttgtcagcataatcaatagagctcgacttttgaggcatatgccttttttctgcgcactagtttcgatatattaagcatataacacattttccacttggtttgagccttctacgttgacttttattatgcctttttttcctttttcgggattttcgtgccttaaatgcctttttggcattttgcattttagtgccttttttggcgctttttccgaaaaaaatcgattaaaaatgcaataaaatctaaaaatacaccccctaagaatcgaaactttttttcaaaaatacactcctaagaaatgaaaaatttttcaaaaattttttttgataaaaattctaggattaaaattttccttattctaagaagctataaaatattttaataatcatttaatgaccaaaaaatgaatttttttttgattaggttttacgtgttttgctctctctaaaaatctttaataaaacatttttaaatgcctttttcatgccttttttgggattttcaagcctttttatgccttttttcgattttttggtgcctattaaagtgcctttttggtgatttttggtgcctttttagtcgtgttcta

SEQ ID NO: 5302 - DNA, 3600 bp, Heterodera glycines
gagatgggaacgaattgttcatttattagccccttttactgttgaattgagtttaatttttttttggaaaatgtgccaaaaaaattatttaaaaaattctatttatcccccctggcacataaatggagactggtatattatttttcaacctcctcagaagggggtatataattggaggccggcagattaatggagactggcatataaaaagagtatatacggtagacggtggtgtgcaggcacgtggttgcccacgcgcacattgcactttctgaattttcctgcatctgcgggctctcggtatactcgccggtgcatgcagaaaatcatcttaaaattgctaatcgaggatttctcgcagtgtaaccgattcctggacctcgagattcaaatatttagaatagacaaagcgttgagtaagaatatccaaatatagggcatcatatttgaaggcgcaagtgtagaggcgcaaatgtccgcggcgcaagtgacgattttgctgagcggcgcaaatgtcgcggcgcaaaagtcgcaacacggcaagaagcaacaaagtctaaaataggcaaaaatgaatgaggagagagtggtgccttaatgggtactctttgcgtttgtatcccccttttgggtcaaatttaatttttcagaagcttagccagacagtcagacagtgcactatttccttcttaatttttctcacctcttcccttttcccacacacaatgctgccagccagcacacggctgcttactgtctacccttccacccgccgcagcccctcgccgcagccccacgttgacagacagtcagacagtgcactatttcttcctttctccagtgactaagctgaagaaaagaaggaaatagtgcactgtctgactgtctggttaggcttttgaaaaatttgacccaaaaggcggacccaaagcacattagtaccgcaaagtcaatggaaatgatcttacaattagttttggtattgtattgaaaaagttttggttcgagaaattgttttgactttgaaatggagtttttttgtttttgtaattaaagcggatgtcaattatgcctcttttaatggatacggtttaattggatggatttatcgtacttattgtttgttttgacaaaaagaacggagatttgagtcccagtgattggaatgcaggagaattgagtcccgatgattgcgatgccgaagaatccgtgaaattgagttccagtgtttggaatagtgaaggattgagtcccagtgattggaatgctggtgagattgagtgagtccctggaattggaatgatggagaattgaataaagtcccagtgattggaatgtcggggaattgagtcccgatgattgcgatgccgaaggataaggtgaggttaggtcccgttgattaggatgttggtggattgagttccggtgattgaagtgctggtgggttgagtcccaatgattaaaacgcaggagaatagagtcccagtgattgaaatctggtggggttgagtcccgacgattggagaaaaagcaaaaaaaaaggatgcgaggccgcgaagcggccgagccagtcgattttatcaaacataatcttacaatacaatcgtactacctagcgggggatgcgccgaaggcgctgaccccgctaggtagtacgcacaaaacactcgtctctcatggaaaagagcttttacctgtcaaattctttggacaaaagaatggagaagaattgtagttataaggcattcataaattatttaaatgacaaaaaaacatttcgccatttaattaaaactaataattccatccagctcactgtcttgtcagttttccaatccgaccaataatccatcgcccaaaaagttggtttatttagattcattttaaaaacggctctgtttacccgttagctcttgttctttttctcgtcataacttttctcaaacgtttttgaacaggaattcgtcatggagtccgctggcagcagctcacagccaattttaaacagagatttgcaaattttggtcggcgagcaaatatttactgggatatgtggtcctggccaatacattagcaatggatttttcaatttatttgttagttttttaaaattatttttgcttttgattcatgcaattttaggaggcgggaccgactgttaaaagctctgtcgtctcagttcttagcaaaatgactgtttttacaatgaatgaatgccgggcacagatttcgtcgccaaccgacaaaagggtccatttttaatttattttaaatgatattttgtaattccttatttttcagaagtttctttgtatcgactttcgaaaatcgtcggggtatttgttcttaaataagttggtccaaattatgaatgaaagcaaagggaaattcttcgaagttttgcatctgatctgtctgaaaggggtttacattgagcgattgttcgatatttttttgatgctgaatggttaccattttattattttgtccaatttgtattttttttgaacctccctttccttcagatttgaccatcattaatcttccgtacgaattcgattccttttctcgcaacggggaaaccaaaatattggacaaattaatcggaaagaatgccgcgacattacattccattcaccatttggtctatccgttccaattgttcccaaacattcgcaaccgaattgttgcgattaattccgcaacattaaggacagggacaatggaacgggtgagttttgaatggtccgagcgggtgagttttggaagctcagcccctcgaagaaaaaagaaaagaaacggggggggggaaatgagcgcacataattcatttctgctttctaataatttaagtcacataaattttttagtgttatggattgcttaaaaagggctagaaaattgttagttggtcatatttccaaatttttaacacatttccaaaaagtaaaattttttgagaatcccctaacaataagatatttgaaaagtagatattttcaaaagtgaaaaacacaattaactacccatggcattatgctccattcgcctgtgccttaattttctcactttttaggaatgcgatttctttgccttttacatggatccgagtgattgcccaaaagaacttttgccgcccaaatttggaggcatttcgatgagtatcagcatcaatcggtgcaaagaagtgttccgctcaataaaacggttgttcctttgagtcatttttcggatcaccgcttttgaattgttttttgagagcattgcaacgggacaaactccgttccgaaatcaccaagctcagactgttgtccaccttcgattttgatgaaaagtccgcgcagattttactcactcaaatcgaacgcattcgcagcactttgccaaaagtgcgttcactgaacatcgaactgagagcagtcgaattcaatgcaagtttatggaaattggaaaagtgccattttgaaagtggtgccggataaagcgctgtttcagccgaaccaggacctttattcgaacgacgacttcgccgactccaatctgatcccatcctccgcttccgcttgttcacatgtagcacttttctttttgaattggatg

SEQ ID NO: 5303 - DNA, 2684 bp, Heterodera glycines
aaaagatgtccatccgggaaagtgtcctgttcaggtcggcaaggcccgctttgctcacttccaacgccaaattggagttggaagtgcacgagggtttgtcctgaattggcatttattgcttttgccggtgccatttcggcataataaatgactaatgactgacaatggtctgtctgctggccaacagttcgagcgttgagaggaatggacgatttgagaaggtgttacgccgtttgtgagcaaatgactgtttgtcaaaactgaacggggcattccgtcggagtgtccgttcgttggccctccgaatgcaccgaccgttcgatttcgaccccttgggtgacgagtggcatttggaccgcctcgacggagtctctcttttggggcagcggcaccgacagcctttcgttggatgttagcatggcggccctttcattctcatccattcccatcagttcggctgtgatccgaacaacctttactaaatccaatcacttcatccaaaacaaaatatgggataatcttttgaaaatgcttaaaacaattcacttgttccaattgggactttgacggttttaacggcttgaagaaatagccgaaaaaggcgcagaaaagggaagtgccggacaggaagagaaggaacagacgccaactctcctcctcccccgccatatcggagaacaaatcaagcaaaaatgggttgagctaaaaaaaacaagcggaattggcaaatggaaaaaccgccgatggcacctttccaaaaatggccgtgccaatgccggaaccacagacggcgatgcccgtggccaatgcccttctctcggaaaagtattggccaacaattacaatggcaggaaggaaaatgagaccgaagccgagaccttggaaatgtggggaagaaacgggtaaagaacagatgcatcggcaaaatacacacctccaatgacgccaaaacataaatagagaaccggaagggcgggcaaaagagcgctgatcagaaaaccaatggcagcgataagagatcctccaaatggggatgaatgcattacggtaattgctaccgtattgcgactaaggacaaatgactaatcagtgagtgatcactgcttcacctgaaatcgcgacgacagcacagccaaaattgttggcaagagccgaagctaatgggccggaaaggaggtaaaatccggccaaaagggaagtgattgcggtgacgccgttactttggaacactttttcccaccgcggcaccaaactcgcgctgactgaacgcacgatgactgaaaagagccggcggggggggggggtgaaatgacggcacctgtgaagataatgccgtccacgacggcattggtgcagaagctggccaacacgaccacccagccgtaccccccgtcgggggccttcatcagtccggcgtcctccagccggtcctccatttcgtcgatcatcgccacgtccttcaaagagtcgccgacccttttcctctgctcctccgccgcagtgccatcttcggcccctctctcttcgcgtccatttccaatgggcatcccttaaggaaattcgttttctttgctcaattttcattttgcgactgttgcgaaataaaattcaatcggtcggacggagtttcgtcaaattgttatcagatgcacgcaaaatcattcactcattccaaaagactcttttggaggaacgcaagcaaagaaagggtccaacagatggggcaaatgggcgataattctttattttggtctgtccaaacaaaaaaaaggccacaaatggcgccaataaacattagcaaattgtacgaaaagttggaataatttgcaaccatttaaatgtatatttatttatttattcatttgaatcgaaaagctaaacaaatggtcaaatgataaggcgggggggggggagacccttcacattcattcgccggtgggacaacaaaaatgaataatttgtaattaatgtgacagttggcggacgcattgaaaagggcgctggggcgaaaattggaggatggcccaagcgaagtgatcgattctcagcagcagaaacagaaacatacaaacgaacgaacgacgagaaaatgggggagacaaaaagggaaatgataaattgaaacgagaaaattgaaaatgaggtgataatcggataaagggggatttaagccgaaagaccctcatcagacaaagcgaaaaagagcaaagttcgctgacagaggagcccaacgaacagagaaaattagcagtgaaaagcgtaatattataaattttaacgaggaaagggaggggggggggcaaagggagtggcagccgatggggggggaatcgattgctttgccgaaacggggaaggcataaaatcattgtttgttcaccgccactaactttttgaattttcaattcgatgagaagcagcaaaaaatgcttctcctaaattaaagaacgattgagttgacaatacaagagaatgggcatctcatgaagagcaaaaatgttttctaagcaattgaaaaagcgatgcaaattgctaaaaagcaccaaagaatgttggtgtcaattagagaccggacgggatcgggatcccgcgggattaaattcgggatccgtcccgagcgattttttaaattcatcgggattgatcgggatcggatttccatcgggatcccgaaccgggatccct

SEQ ID NO: 5304 - DNA, 4341 bp, Heterodera glycines
tttgctcgttgctatgccattagtgaatgaatgcatgcaccgacttagcagtttggtcatcgtgacagaaaggccgatcagagtgacagtgacaatgccggtaatataccgtttcctgtaaatacatttgagcatgaatgcgatggggcgggattctcgcttcacttaggatagaaatgtggaaccatagctgtgcatggggagtcagacaaggactcggaaattggtcccccgccggctatttattttgctatcgattacttttcacaaattttatccggttgggaccatttttgcttttcacctttttttgcggcgcgtttttttttaattttgaggatctggggagggggaatccggaggtgccgtttgcaaaagttttgcccataaaatgaccaaattttgtcaaaaaatttcgaatttttctgtctctagccctatcctttttatattctcgcggtgtttatattctcgcggtgcgaagaatcttgctcaaaacaaatagatcgaaatgctcaaccctttctatgctttttttctctctccttttccttgacttccgcctcgggcgatcgacgcccactgaccccatgcgatcggcgagcgacatgccacgtccactcttgcacaggagcagttcgtcccccccccctcctccgttttctccgtaattaaaaaaatttcaaacagaaattttcttcttagaaaatttatatgtatgagagattttctagaatttttgaaaaaaacttcagcgaaatgaattactgttttttccaaaaagtagctgaaaaattttcaaattcttttcttgaaaaatcttgattttggacagaggcgcaactgtcggggccgccaaagtcggacggcaaatgttgggactccccacccttgcacagctatgattggcactcgaccctacgaaatatgtcggcatgtatttgttagcaaaaggccaaaaattggcaaccagttccaataactaaaactcacagataactgatgaaatggctatgctccccaggttcgcgactttcggactcgacacccaataaatcgaagagatcaagatggtagccacagtcttggaaaattttttttttcttgaaaatttcgaggtgaaatttaaaaaaaagcaaattggtcaatgtttttgaaaattttgtacgttttttttataattgattaaaatttttcccagcggcgcctatcggcaccgcgggaccccagtgtaccattatttttttaccatttgaccccaaagtggtaaaaattgtctttttttgcgcaaaatcgctataaattcctgttttttttgtggctccagcggtgaaattttttgaaaaacaaccctggtaaaaaaatatagcccgaaaagaaaaaaaaatgccctccccgaaatttttttctggatacgtgcctggccgggccgtgtacaattttttatcggatttgagcaaaacggcccggtgatttttgtaaatacccgttgtttgactagttttggaggggtgcaccccaaaatcacaccgttagaaatttttttttaaattttcaagcttaatttttttcaaatcttaaaattttttatatgcaaatttggttaaaaaaaaattttttttggagagttttcgaaaaaagttaataatctatcataaaaaatagctgaaaatttttcaattttctttgctcttataaaaaaattataagatttttttcttgaaagaattccaagattgaaaatttttaaaaaatttctagtggtgattttgtcctgttcccttttggagagggtggacccgggaactagtttttgaaaatgccagcaccgtctggctaatttgaaattttagtgttgcttcaatattatattttcaattaccccttttcaattggtcttcccgacggttgacaatgaccgcatggatttgttggcccataaaaatgaggaggacacatgcgagaacagcaagaatcagcgtcagtggagggatccacaacgaattgccaatgaacggatgaaccaaccaaccacggccgggccaacttggctaaagacggacagtgtttttgaattaaaaaaatcatttatgcccaaaaaacaatatttgaaagttctagacatttgctagaagacatcttaaagcaaacctaaacactaaaaaaacaactcataaaattaattggttttatttggttggcaagtaaagtttggcaaaaacattggtgagctacgagcgcagcgagttgaagcaactgagacgaaatgatcacgagaaattttttccatttttaaaaaaattttccaggaaaaattaagccatttaaaagagccaaatactctttgctacaaaaaataattgggaccgactaaaaaatttttttaaattagagctatgcccctcgaaacagctccccatttttcgagaaatgcagaaaatagatcacggccataggctgaagaaataccgaacttcatttttcaacactcggaagttgcgttgaacattcaccttagttgtgttggtgcccagaaaaacgtccagcaaattcatgcacacgatagcgatcatcacttagggtagtaggaaattgaaacaaaaagtgtgataaagaaacgttttttgatcattcattaccaaatttgataaaaattctaaaacacaacgcgaatctcacccgaaaagtcactgagcacctgtcgcacgtttgacggaaagtagcagctgtttcgaacttctaagtttgggaaccaattatattataggattttctcgaattatatgcccgggtatattatttttgaacgccatcagaaagggggagataattagagacgggtagactaatggagacaggaagattgtttttcgacagttatttagtggaaaatttttgatatttatccaaaaatgtcatcgcgtcaaaaaaagcatttttattgcatttttgctaaaattttctgaattttacatgaaaaattcgaaaatgccaaaatatttacaaaaaattgataaaatcccctaataagcttaaaaataaagaaaatcatgagaattttatttccataaatttgaaatttttcgtttgataacaaagaaagtaggcactaacgaagtaaaagaaaaagttacggcctaataaactgaacgttattcattggatagcaaaagtcgattggccgtgtaaactgcagtattatctcttcatttataatgaatcatttaattcatcatgtttaacttttttcccacatgttaaatccatatgaaattatgcatatcgatagaaaaaaaaattctacgtcgataatacattttcctttttgtttatacgttagttaaagagttataaaataaaacataaaaaagtttctttttctctccttttgcgtttcgacagaaatattataaattttaggcggggacttttcgacagcaaagaatcgaaattccccaccccagtcgatggtttcttcatttttgcggtaatttgccttttcttttttccctttcctttgccaatcttccaatttgagccgaaattctcacccccgctttgatgggacaaattcgacgaacgatggggcaaagccgaagataagcgaagagaaaaagataaaggaaaggcaacaaatgattaagaggtggcaaacagtacgtttacaggaacagtcgaagttgccagaaggcaattttcaaaaattacgaagaaaaatgaatggagtggggagggggagggaaggaaatgtaaaacaaagtgatcgaaaggcagaagggaaaataaaaatgatcgaaaaacagaaggggaaggcaaaagccaaactaacagatcggaaagagggagggaatgggaaggaccaaaaaataagagtgaggcgatcagttagtttgaagaaaaataaattttataaggaaactagcggggtcagcgccttcggcgcatcccccgctaggcagtacgattgtgttatagaattatgaatgataaaatcgactggctcggccgcttcgcgccctcgcatcattttcttggcttttctccaatctctgggactcaacccaccagcaattcaatctctgggactcaattctccggcattccaaacactgggactcaacccactcaaatctccgacattccaatcactgggactaaacccaacagcatttcaatctctgggactcaaatctccggcattacaaacactgggactcaacccaccagcatttcaatcactgggactcaacccaccagcatttcaatcactgggactcaacccaccaacatttcaatcactgggactcaacccaccagcatttcaatcactgggactcaacc

SEQ ID NO: 5305 - DNA, 2328 bp, Heterodera glycines
cccccccaacaattttttgcgccaatccaccatcatttaatcactgggactcaacccaccaacattccaatcaacgggactcaaccctccagcatttcaatcaacgggactcaatctcatcaatccttcagcaacacaattaccgggactcagttctccgacatttcaatcaccggaactcaacctcagcaacggaatacagaactatttaaaaggaatccagaaattgaaatataacccataaatcaaaacactatggtgtacatttatattgcttttttatccatcaaaggatttttctttcattttttattactatcataacatgctttttattcaaaacaaatatcaaaaaccaaatcagattcttttcatattataagcaaggaaaagtacaaaaaacttttttaagtaacaaacctttttcattcaaacgaattctaatgaatttttttaatcaaacaattctccattatcgtttacataagcaaaacaaaagctttcacatcaaaatggaaatcaattaacaaaaacgaaaatttagacaaaaaataataataacagcaaaaccacaaattttttcttacacacaataacagaaccttcatataccggattttccactcaaacaaacacaaaaatgtgctcattattttattaattattttatataataaaagatgggttataaataaggaagggatgcgagacaaatttcccattatctctccctttcctttcttttactctcttttcttttccattgcaatttactctctttttttcccactccctccttctcccacacacacgcacgcgtccaacagactgctgctgcacagcagcacgcgtctgttcactgtctgcccctcccacccgccgctgcccgcatagacagacagtcagtcatacagtgcactatttcccaccatccctccctctaacctctacatcctaggaggagaaatcttttaccttctttttctgtgctatttcttttgccttcttcttcttcttaactatttattttcgtctcttttctttatattctcttctttttcaaaacaatttcttttcatctcttttcaaactcatttttaacgcaaaactcaaacaaaacgccacactaattcaaacagtgacacatacagagaatcaactttattatataagataaattataattaaatgccatccattgtccctttaggtccgtcccgttccaaatcaaatggcatcggtaagtttttatttcgtttaccgccaccacttttcctccatttgtcggccataataccataatattgaataaaattcattccagtaaaattaatcttttggattctgttccttctttctcagattcaatactttctcataaagatttcttttaaatatttttaaagatttttgttgaaaaaactgttagtttattattactagggcttctttttttaggcaaatgcctgaaattttgcgcacttgatacgcaaagataagcatgaaaacgcattttccgcttggtttgggatgtctacgatgacttttataatgcttatttttcctatttcggggtttttgtgcctaaggtgcctattttagggtttttgaaaaaatccttaacaaaaatgcaataaaacaaaaaacacacccctaagaatgaaccaaaaaaaatttcagaaaatacacccctaaaaattgaaaaaaattttcaaaaaatgatcccaaaatttattttatttaaaactaagttcttaccagtgcatttttactcccgtttttggttaaaaatttccgggagcgggatcgagagttcaaaattttccgggacgggagtcccgaacgggaatcccgtaaaaatcccgctcccgttaaaaatccagttcaccgaaaaaagcgggagtcgggagccggactcccgaaaatcccgcgggagtcccgatcccgccggtctctaatcaaaacccttaaaaattgtggtgacttttattttaattgtttactcaaattaattgttttcattgggcagaaataaatcacaaagttttttgtccgcttttattaattgccaatcgtaaaagggcatttcaaacgacaaaaaaagggtccggaaaatgccacctaattcggcaaaaggggcgggccgtaaagcctcgtaaaatcctgaaaattaatttaatcaagtaggcaaatttaatagtcgtagaattggccgaaataaaaaatgaattagcatttaacaccttttttcaaaatttggggatggggacgccgataaaccaacggaaaaatggcgaagatttggaggccgcggcaacggattttcaa

SEQ ID NO: 5306 - DNA, 1301 bp, Heterodera glycines
cgcattttcccgcttggtttgggaatttttcgaaaacttttataattcttatttttgttatctcggggttctttttcgtaaggtccctattttcgggttttgaaaaaattctcaacaaaacatcaattaacaaaaaaacacacccctaagaatgaataaaaaaaatttcagaaaatacacccctaaaaattgaaaaaaattttcaaaaaatgatcccaaaatttattttatttaaaactaagttcttaccagtgcatttttactcccgtttttggttaaaaatttccgggacgggagtcccgaacgggaatcccgtaaaaatcccgctcccgttaaaaatccagttcaccgaaaaaagcgggagtcgggagccggactcccgaaaatcccgcgggagtcccgatcccgccggtctctaatcaaaacccttaaaaattgtggtgacttttattttaattgttttcattgggcagaaataaatcacaaagttttttgtccgcttttattaattgccaatcgtaaaagggcatttcaaacgataaaaaaagggtccggaaaatgccacctaattcggcaaaaggggcgggccgtaaagcctcgtaaaatcctaaattaatttaatcaagtaggcaaatttaatagtcgtagaattggcagaaataaaaaatgaattagcatttaataacacctttttcaaaatttggggatggggacgccgataaaccaacggaaaagtgtcgaagatttggaggccgcggcaacggattttcaatggaattggcgacgaaagatgaacatgatcaatcagaaaaaccttctcaaaacattttttgtaatttatacaccgctggacacattacaaatcgtaacatttagaattataaatattttatttcctttttatctgttttagagaatatcattttatgataccagtgcatattttctataatccactagcagttattttgaattttctgtttgtttgtcagggcacagatttttatgttttaggtgggttttctatgcgcgggaggaagtttgggcaccagaaatttggacaccgggaagtttgggcactaaattaaggatttatatattttaattgtctaattgcaaccatctaatttaaaattttaactaaattaggaatcgaaagtttttgaacgaatatccgctcaattaaccatgcttattttgctatactcattacaatttattctatatcaatctcatattaactattatttgtatcattacaagattcagtttgttcaagatttaaaatttataaatttaaa

SEQ ID NO: 5307 - DNA, 5454 bp, Heterodera glycines
  unsure (1)..(5454): unsure at all n locations
tactgataatatcctgttcaccccctttctcacacaatgttcatttcgtacaatactgaacatgcatgaagatatttgcaccttctcgntcagcagctgaaattngagcggattttnagaaggaggcgaaatttatcgatcgtcaattaggggaccactgttgggccagtcataattacgaacgacaaaacggacgacaaatttagcacattttctcagaacatgtcgttacgacaaaaacaaattatcgtttatcgtccaaatacatatacagttttgccatttgtcattcgtaattatgattggcctctgctgaacttacgactaaacatgcatttgccctccccgcaatagtcttcttctggttcgcaattctttgtgcgtggaatgggaagtcggagaagaattcgattgacttccatgctgttacttcaaaatgctcattaatcaattactgtttgactgtttgtttgggtattttttttattgaaaattgctttctcaattaaaatatgcataattccattcaaaaatgacctttcaataatccatgttttttactttgaattttggttttttttctcttttttactatttttatattgtaatcttataaaacactcaactgaaaatattgcatggttcacaaacagtatgaatggcgtaatacattttttcttcctaattatttttctaattcagagttgtgactcgaaatttttaaaaactcatttggatagtaaaaaatctttgtgcaaaaataaacaattcaaaaacttattttagtacaaaaaaactcatcgttattaaggatgatgttatgtccgaagataacaaattaaataagtttatttgccgaagaaataaataaataaaaatgcagaaataaattggagaggtcaaattggtgggcacaataacaactgaatgaggggaatgggagggtgaagatggcgaagtggcgtggggtcatacacctaatcaataattacttccttctctaacacctcccctcttaaattcgaaacccgaaggtttaagcctaaatttttcatcctggagaataaaattggcgcggctttttaactcgggttgatcggcggataaccaatggtgaattggccggctgattttgttggggcggatgaggcggttcgacaaccggcggtggctcttcgatttgaggtgcctccttttcggcttcttcttccaaaagatggcgtcgccttagctgattcgcgtgccgatgaacgagtctacgcagaacaggcacataaacacgatatgtgggcgatttgtgaagcctctcaacaacttttccttgcagccattccgtcttgttgtttcgataattgatcagaagaacatgatcatttggaaagaaattgatcagttttgatccatgcttccgatcaaaattttgagccattttgtcggtgtattttgattgtccctttttgaatgagttttgatcaaaattttcggctttttctccattcggatgaacgagcgacaatttcgtgcgcaattttctgccgaaaaataattgatcgggtgaaaagccatttaaggcaacgtggggagtggttctgtaggagaacagcatcttttcgatccaatcctttccacctttggacattttcttcatcgatcgcttgaaggtgtcaacgaatcgttccacttggccattcgattgtgggtgaaatggcggtgtgaaaatgtgcttgattccaaattctttacagaatgtggcgaattcggcggatcgaaattgggtcccgttgtcggaaacaatttcctctgggattccgagccgataaatgattgatcggagaacaaatacggtggcataagcagaaattgtattcatacgatagacttctggccactttgaaaatgagtcgatcaaaatcaaatattggtgaccgtctgagcaggggccagcaaaatcgatgtggactcgctgaaacactttgtccgtcgttggccatggcgaaagaggcgctttggtcgggtttttctggcccagttggcactcttcgcacgtgctcacaactttttcaatcgccgagtccattcctggccaatacacgtgacgtcgagcaagtgctttcatgcgcacaatgcctgggtgagcgatgtgcaatgccttaaggatgcgactgcgaagcgaagttgggacgatcacacggtcctcatacagtaggcaattgtccacttcaaaaattttgtccctttttggaaaatatggactgatttcagattcggtgactttggttggccatccgtttcttaaaaattgaagaaccatttggagtggttgatcattggccatggctgaagaaatttcggtggttgtcactgggatttgatcgattctgttttcgaaaacagaatttatgaagcaatctgtatcagcacagatgtttgctatcaggatgtcttcctctggacgcggataattagcaatgagccgggacaaaacgtcggcttggccaaatgatgtggtgttgacgtagcgaatttcaaagtcgtaattcgccaaaatcattgaccagcgttgcaggcggctcgcggcataaatcgggatgccctttttagagccaaaaatagccaataaaggtttgtggtccgtttgtaaaataaattttcggccgtacaccatgcggtgaaatttttgaacggcaaacacaatggccagtgcctctttctcaatttggctgtaattttgttgcgctgctgtcaatgtgcatgctgcgtgttctaccactttttcctttttgtcggggaatgtgtggcttaatgtggcgccgattccatctttggacgcatctgctgatacgacgattgggcgtgccgggtcgtagtgggtcagcaataaatcggatgtaatcatttcttttgctttttcaaaagcattttgctgttcagaagtccaattccaagctacgtccttttggaggagtcggtcgagcggtgcacgcaactcacgcatgcatttgacaaatctgccataataattcaaagcgcctaaaaatgatcggagggtgcttttgtcgatcggtgcgggcattttccgaattgcgtccgaacgcgatgggtcaggacgaatgccatttgctgacacaatatgcccaaggaacaaaagttcgggctgcaaaaatttgcatttgtccagttggatgcgaagaccatattcttttatgcgtccaaaaagagtgtacagtgccgtgatgtgttgatcaagcgtttttgtggcgattaatccatcgtcaagatacgcgaatacacctgggataccggcacaaatttggtccatcaaatgctgaaatattgccggtgccgatttgactccgaacggcaggcgttggcattggaaaagccctcgatgtgtgttgatcgcacacaattgcttggattcttcatccatttccatttgcaaatacgcatcgcgtaaatccaaatttgagaaaaattttgcgccattcagtgaggcgtaaatgtcgtccggccttggcaatggatggcggttcaattccagtgcgttgttgaggccagttgagaagtcgatgcagactctcgttttgccgttcttcttttttacggctaagataggcgctgcccaatgactgaaatcgattggcttaattgcgccaatttgaagaaggcgatccaattcggcattcacagcttccatggcgccatgtggaattgggcgagctcggcaaaatacaggctttgcatcagaccgcaaaatgagatgcgcctttgcctttgagcagtgtcctagtccttcttcaaaaacttccgggaaatctttttggagtgccgctttaagcgttgacacatcattgatcgatttgtttggcggcttcactgccgaaaaattttcaatcattgtcgcctgatcagccgatttgctggacggaaataaaatttggcggggaatgatctccaaagcttcgatccacggcaatcccaataaattgtgtccgacttctccgctcacataggcgatcagagtttgcggtggtttgtcggaaaattggacggtgcagatgaatttgccaagcaaggcgaatggctggtcattgcagtttttggcatcgatgtcggatggcgtcaaattcggttctcccaactctcgccatgtttgcaatgaaataattgtggcctgagcgccggtgtcgccattcatggaagtttgccttccattaatcaaaatgcataatttccaccaccgtccttgagtcgtgccgacatgcagacaatttgcgtcgactttgacagtgtgaaatgccctgtggttgttcggtgccgcctttgctttcttttgccggcaaattgttgaaatgtgtccttttttgttgcacttaaggcaaatggcgtccttgaatgtgcagtcggagcgccaatggtcggatttgccacatgatccgcatggatgcgtcggttgaccacgcgttggctttccgcttgaattggcatttggagtttgcctttgattggagccgccgctttgtctttgcgctgggtcggcccattgccgtggccttgtgcgaatggcgtttgtggcaattggtgggttgaccagcgaaagggcgctctccttgacaagctgaattgcccgaagttcctcctcaattttcttgagcgaaatgttggtgccatttttctgagcgtcctccaacattttcagtgccttttgtcgcaaatcgtgatgttcatcgttgagcgcgatgatcaaaataatgcacttgagttgttcctttgtcagactcagatcggcattttcacatgatgcgttgatctgcgcaattagtgatgaaacatcttgtccttgttgctgtcgaattttgaaacactcgtagcgacggacgaacagcgagcgggtttcagcaaaaaggcttttgaggtgtgaaatcgtttcgttccaattcacttggtcgggctgcgttgggctgatcgtgtcccgatatttgctgtactcctcctctccgagtttgccgaggagaagtcgcacttttgaagcctctggcagagtgcttccatcctcttcgatcaatttgccataccgtttgaaccagcattcaaaggtagtgccgacctcgggattgtaatggaatgacgatatgcgagcatcgatagagcttgccaaattggcattgctcaaatttgcaggtgcggcgttttgtggtgcggcattagtgaccatttgttggagcgcatttagcaattgttgaagctgttgtgcgtccatggccaaatgaagagaactgcacacggcagactttaatctcacacggagagaaaagtttttgaagatctgcgaaaattagaaatcagcacgagatttctaattttccctcttgagcaatatcaacacgagataaagctcggaattgttgttgccaggtgatgtgcagttgattgctgactgcgccanaaatttgt

SEQ ID NO: 5308 - DNA, 2188 bp, Heterodera glycines
cgttaacactaacactacttttgtcaagagttctatcctggttgacttttttttaattaatttttttttgtgattaatagggtttttaaacaaaaatacccataaaaattggtcatcattggcaaaatttaaaaacaatttttctttcgttgaaattaaaaagtttaatttttcttgactaaatcatgaaaagtaaatatttttcaaaatatttttgacaaaatataaaaaaataaataaaaatttcaaggaaattcataaattttttggtgaaaatctcttagaaaataaagtttaaatttaaaattcgcccggcgctgcctatcggcatcgccggcaccccaaaaaacctaaaaatattgctcaaaatcgaaaaaatttataatttttggacaaaatctgttagagatctatccaaattttcaaaatttttcccggcggcgtctatcggcaccgcagcaccgccggacccctttctcctaaaattctttagaaacgcgccgcaaaaaatgatttgaaaaacaaaaaacttttcgggaacaagggtccggcagtgtcagtaagcgccgccgcgaaaaatttttgaaaattagagaattagaatgcattttttaacagattttcaccaaaaataaccaattttttcgactttgagcaaatttttttaaggaaaaagaagttttgggggcccggccccggatgaaaaatttgaaattttgacaatttttacagattttcattgaaaattgttcatttaaaaatgccttatcgttttaattaattctatacaaaaatatttatgataaaaagaaataaaaaagtacataaaattattattatgaataataaaaattttaagctaagataataaaaaaaaatttgactttatggtataaggcaaaaattgaaaaaccccgaccccgagcgatttggtcgactccgaccccaaccccgacgcttccaaccccgacgcttctccccgacggtcggggacgcaaccctagtgcccattgtcgctgccggggaaatttggaccaatttttagtcaacagagtgaaacaaaagtcgggacttggtcgggtacccaaacccgttaaataactccaactctgtttatttgctaaaggagccacaaaatgtatttgttgccacagtatgactcacaaatcagtgttttaatttgaaatgtttttgttttgatcttttgattttcttttaaattatgccattaatctgttgcaaatttcttttttattctttttccattcgatgccaaattaatgaatgcattggccaacataaatttcgaatggtttctcttttttgttccttctcttctcctcttgtccatttcaaatgcttaagcagcgacgcgagagcggcgagcaaaaacgcttgtgcgaggggggcaaggacagtaggcaccgtcgtggccgggctgtccagcttggccgggctgcccgggggttcctggggccccggcgtttccgggttggccagggcttccggaaggaccgggcggtccttgtcctccggggtttccgggctgtccggggctgccgggctggcccggtgctcctgggtttccgggaggtccaggtgggccgggaattgtcgtgctgaacaaaaacattcaataatttttattggctgagttcgattctctcgccttttgattcctggttgtccgggttgaccgggctggccaggtcctcctggttgtccgggttggccaggctgtccctgaggacccggtgtggctagggggatggatttatgaaaccgatcgtggacgatttttgtttagctaaggtaatctttcgcgttattgcattttgtactaatattagggatacgccatatgaggtggagattgttttttttctacatagggatagtatgaaactttttttttctaaatttctcattaaatgatttttgcgtcaccccttgtcaatcattttgatatcgacccagcacctatgtatacatatcccgttcttaggaaataatgtacataagtagaagctaataacccattgaaggttacccgcagagccccaaacaccaaatactggtcgcatttgtggcttgatcattcgtgctaatatttcctaactcttttttagatataaatgcactttgaaagtatccgtttgtctcgaaaaatagcggctttactttcgca

SEQ ID NO: 5309 - DNA, 3478 bp, Heterodera glycines
tgatttgagtgtacagttgcgggatcaccacgagagtgcccaaatcgcggccagcgaacaaagggaagcaattccgactataattttcgcttcgtgcattttctttcctgaaatttgacttctgttgcggagggtttagcagaagaagcagtgaattatgttctgttttcaaattgctgcgctatgaatagtgagtgaatgaatgctttccaccgaatttcgtctctcttttatacgccctttctgaggcggacccatcagaaagaacgtgctttccctttttttcctttttcgtgtcgtgcaaacgtttcgggacttttcagcccctcaattattatcggagctgcgctgattgtgcgcatgagcagcgaccgaagcttcgctgttcttccctaattaggaggcaaagagaagagaagcgaattccgccagcggagtcagtcgcccttccccgcctcgtaaaaatgaggacgggttgtcaacgatgctttgtctcccaaggacattttgcagactgtttgcccacgggcaaaaactaattatttttggagaaacgacaaattggagaaggaatcatttggcggttgctgatcacattgaaaaaagaaaattcaggaaggaattgagagacgagagggattgagagagagagagagagagagaaggaggggtgattagtcattgaaacagccaaacaaccgtcagccaattaattacattctgctaatgattggctaatgatagcactcccaactgtgatgacagagtaaacctgtctttaacattcgatgcatgttttgtaaaggtatgttgggccataagctttgatcatttagtgtgatatgccttgcatgatttataattttgctcagtatttttgatagaaaaatttttattctgttgattctgaataccgaatgtgttatgtaattgaataataattaattcaataattaattgctttttcataccaattttttaaattttaaattggatccgatgcctaaagtctctctccgatccgatcgaaagcttctgtattcctggtacataggtatgtataaatagcattaaactgttcaacatttaaaaatataataatccaataactgctgaagagtgtttccctctcatggccacccgtttctttcgtttcaattttggcacttttgtggcgctgatacattccgccaaacttcgttgtctgtcacaacgaaatctgtccaaggaaatatttaagttaagatgtttctgctgctatttgtccgccactgttcgtaccggtgataataagtaacattttgcgacttgaagcatctgtgcaccgtgccgcccatcatcacgtcgtggcccaattcgatgaaaagtccgccgtcgtcgacgcatccttggccaattgcccttttaaaaacacgacctttgccgctgcccggcattactcacccaacactttcttctggccctcctccgtgcagtggtagcggatgtgcttgtccgcccatgtttggcccggcttgaactccccttcggtgccattttgcccttggcagcccaacactacgccaaacactccttttgttggccattccccaaactcacactcacttctgatcacatagcgaaccttgccgctttcagaaacttcgcagctgtgccttttcgtcccaattaaacgcgactcacccaaaagaattgcgtcgtccgttgaatttaacagaaaacacccttaggggccttttgatcgaattgctcaaaagggcatcattaccgacaacagcaactcccgtgtctttacaagtcactttgaaagagccgtttttgaaagtgtcgccttaaaagtgccaattttgggaagggaacgattcccttcacataccaacgtcataataaatgctattttcgaagcaagtcgacccttaattgttataatttgtgctataatgtgtcatttgctctgaagacaaactctgttcgtaaagtgccgtgttgccactcaccaaacatttgtgccttgtcccattccgaagaaaagtgcgcccgatttgaatgactgacatatcctcggcaatgcaagctgaccaaggcggacaacctttcggacaacaccaaaatacccaccaatgacctcggctgtgccatttttgcactcgtagtgaaagttgcccttggtgaaagtttgtccgtgctcaaaaatgccgacgccggtgatcaaacatggcaatggcggctgcagcccgtccttggctgaagtgaagtgacttatgaccaaagcgtcgacatttgttggaccaccgaccctgtgggatgaccactttgtcttgggaactgttcgggtcgtcccctcgggcaaccaaaatgatcactccctgaccatccgccgacgaattgagacgatcggcacaatggcaaacggatatgaccagaaataatggcaaaaagatggaaaacaatggaaaagagtggtgaaactggtgataagacaatgccatgggaagaaagaattgtgacggaaaaggcgctgcgtttgattaacaattggcagtggcgggggggggagggaatcgtcgtaacggccgacaaattttggggaatgagaaatggagaagaaagaatgaatgaccttcaatccaattcattccaaatgcatttctttgatgaaagcgaaaacaattcagcagcactttagcagccaaaagtgaggaaacaaatcaaagagagcgatggccgagaaaagctaattagccgttaaacagttttaatgaggtcgacaatgttcgggcgaagaaatgacggcccgtggataatttggaatggattggacagagcacaaaagcacagacattcatcaattgtccgatttaaccctctgttaaagtgaaatctgattaagattacttatgtaaatgaagtgtttttgacatcccccaccatcccattctttactcccccccccccctcacttctttagtcgcccaccctctccgtcccctctcctctccctcccctctttttcccctcgcccttccctttctttcccattacccctctccaattctcttcacaaaatccatccttcctcgctttccttggtccatccgttcactttattcattctttcatctcctttttttcatttattttataatttctctttccaaaattaaaatttatttaataatataaatgaaaatatccatttaaatttgctttttatttgtaagtttaattcaaaaaacacatggaatcggtaaaaatcaccgagtcattggcttataagggtaaaaaagagaagaaataccattttatgtgcattaggttcgattttcagtgaaagagacaagtggaaacgacacttttgtcgcttggaaggcgaagggttgcgcggtgttatgggaccaggaaatgctgcgcttggaattggacggcacggcgaaggagcggaggttgggcagaagaagcacagacaaagccaaagcgg

SEQ ID NO: 5310 - DNA, 1329 bp, Heterodera glycines
ctgagccgaagaaagggtaatggggcgccgagagatgctgtgcagccgaggaagacggacaagttcagaaaggaggtgttagtgccaaagaaatgcatcgtgcacgtaatcggaaatggtggtgagaacatccgccatttgcaggtgccgagaggcccaattcgtacagcgaaaagcattcattcaggagaaattcggggtcaaaatgcactttttgggcaacaattatttggagtacccaaacggacgcactttggccataattggggacacggaggagaaggtggaaagtgcgcgggaccacgtggacagggaattcattttgaagagatgggaggcgagtgaccgacggacggacagaccgccgaacattttgggcaattttaaggcatggaacacgggccaacacgacaatgttgaggaagaagcgacgacctacgaagaaatttaccaattgtcaccgaaattcgcactgcgcgaggacctcgaattggtgatgaagcaaattaaggtgtgcccggcaaattataagcaaataaaacgccacaaacacttgaggaccaatccggcatcgtctcctattgctaccgccaattcagcacgggccatcgtccgattattctcagagggactgaacaggcagtggcggaagcgatcaaaatactcaaaaagatggagcaggaatggccacaacagcgcacaatgggcaacagccgagcgagaagtctggacgaaatctcaatcacttcggtaaaatgggaattaattattgaaaaataaattaataacaacccaaaaatgggttgaggagaacgataaacaaatgaaaactttcagttcgtcgagtcaatttcaaagcttaaaatttcgaaaacatccgaagaagcggcgaacaatggcgaagcaaagaggaaagaagcgcaaaagggcgccaaagggacgaaaagtggcggaaaaacggcgccagggggaggaaaaggtggaaaataaaataataggacagaatggcatttggggttattaacggaatcgcatttggatttattattaattgccagaagcaatgaatggcgacagcggagaaaatggcaaagacaccgacgaagccgaaaaagaaggcaacctgaacagatcggcaagttggcagaaagagaggcgcaggaaggaaaggtgaggaggcggagaagagaaaaaaacaacgaaaataattgggaggaaacggcggggggcgggggggggggtgaagcgcacccattaattaaactttcaattaacacttaaaataaattttcattctaagcgatagcattgccaacactttgatgggaa

SEQ ID NO: 5311 - DNA, 2459 bp, Heterodera glycines
  unsure (1)..(2459): unsure at all n locations
gaaaacggacggaggaatagagattgagagagattggatctttttgaatttgaccaaaaatcgggtcactttttgctgtttngagacgattcgccgccgccgcctccgtcgccgacaaaaaggacggacggacgcacacatttgggaaatgtttgtgaaaaaaaatttttttttttttttgatttaattaaattagcaaattcggggaaaacggtaggaaaatggaaaacgaaaattgggaaaaatgggggaaggggaagaaaaaacaattaaatagttaatttaaataatttgaccaaaatgatggattgattgataatcacagatttcagaggaggaaatgtatgattagaagagaagcgagtgatgtgatcttttttgggctttaggtcatttatgagcagcagggctattgttagtgtgtggaccagggggacctggattttcagactttttatgccggaaaacgggtctgagtttttgatgaaaatttcattaaatttctattcaaaaatatgcccaaaatttggtcactcacattaggcaaatggtgatcgatcgttcaataaagagcgtgccaatttggctttacttgatcagagaaaagtgatcaattctttgccaaataaaaaaatggacaggggaaggggaagattttgtcacaatttaaaaaagcttattcaaaattactagaaattttcaaagaattaccaaaaatttttgtcatttcctttgaatacatgtgccccaccaatgtattatttgactgatcagagaggatgaaatgaataaaggattttgtgatcagcagaagaaagacgaagtagaaaactgattatattatatgtaggtatgtgccaatgaggtgatatataaaaagacggatttgatcaaaaaaagctatagaattgattttggcacattgaccgatcagacagcagagagtgctttgatcttgatcgatcagtattcgtgccaatgatcatcagaaccgaattcggccctctgcttctgatccggtcatcaaaaacgcgactctttccgcgctctgccgccaccaccggcgccgtgccgcgcgcgttggtgccgctccagcgtccgcgtgccgctgaacagctcgtccagctgatggctgcgcattgccgcaccgctcgccatggtcgcggccgcggcgggacgaggcgcgggcggagcggcgatcgcagcggcagccgagtccgcgtcgctgtccagcgacgatgatgacgaggacaacgcgtacccagagcggttggccggtgcggagaggcgctaataaattaaaaaatgaattaaatatttcgaaaggccattaatttttttttttgaaagagccattttgttaaaaatttctcaaaatttcaaaaatttaaattttgaaattcttagaaaatgacgcctgagggtagtataataatttaaaaaaaccttcccttgaaaaattcgaaaatatgagctttactagttagtagtcatctaatttaaaataaaatttctttcttttccgtctcccactttgttaggcgcagctgcggcgccagcgccgttcgccaagccagcgccgtaaatggactcccgtcgacgctccagcgcctgcaatgtacgacggttgagcgtcatggacgtctaaaatttttcgaaaaaaaatgttggattgggtttggatatattggattaattagttatggatttattgggcatggatgaataggacttggatgaatttcacctgtatttgacgccgttttgcgccgcccccactgccaccgcttgtggtcgcgtgccgttgcgcggccgccgccatcatggcaccgatgccatccccggcaccatcatcgcccgccgacagcgcgaagaagcggcgccgaaatgctgcgtccagcgtgtccatgcggcgctgctccgtcccggcgcccccacctctacggccagcagcagcagccgcagacgcaacgccaacgcccgctggcggcacagacgctgctgccggcatgcccgctgcgtcgccgttcgctcgtccgctgttccgctgcggcgaagctggaggggttgtaagatagcgcggacaagcttatatacagtaaacaatacagtatgaccattaggtaaaaatagtaattaaattttgattgtattgcaagttgaccagttgccaagcacagtgaacagaaaaatggaatgcggtgagaaaatgccatccttttgaatcagcaacgatgtgacaaaccgcaacaggtgtctgaaaaaaataattagaaaaaaaaaattaaattaaaaaaaaattaattctattcaaaaaaataaaaatttaaaaattgatttccataatattaaaaccattaaataataaaaatttaaataaaattctggtgtggttattaaatattataccagttaaaaaatcttaaatttaatttaaaatgaattttaaatgaaaattt

SEQ ID NO: 5312 - DNA, 2632 bp, Heterodera glycines
actcgtccagcccaatttgcatccgttcaacctcctgtgagtccaggttaataggcctaaggtaccttgaaaattttgaatttttttttttggaatttctatgccataaaattagtagtacttgttgatcatctcgcgccagaatgatgcctcgtccgggtcaagataaacggtgtcgaactgcttgaacggctcctcctccatccaatttggcgagtccattcgctaacaaaagtaaaaatttttttaaatcgaatatttttaattagtcccacaacttagtaattttttaaggtttttgtgccaaatataaaaatcgctaaataaaatttaataaatcaaaaacttaactaggctaaattttgaaaaatttttctgttaaattaaaaaaactgagaaattaaggcccgttatttacgtcgccggagaaaaatttcaaattttacatatttattaaaaaattttaatttttcattgagggagaccatccaaagagttacatgtgcttacaattagcacaacaaagataagaccaatagtcagcgccggatttatggctccgctatgttttggcgccaaaagttcaacgcttagttgtccaattacacttgttgaacaaacgtacttgttgttgggcttgtggcgcccgttgatcaacaagaccaacgccaaccgctgcagttggttctggtactgattggtcggctcgctgctgctgggcgctggcgacagcgcccaattcactggcgccacagtctccgccgtcccggcgccgctcaagactagccaatttacgctcaatttgttgaagtccctcgtcgagccggcgcactgcggtggtggcatgggatgacgcgttggcgccgccggcgccgaacgcgtgccgcacgcagcagacgacgcggcacaaattgccgcagcccagcgacacttcgccatcctccggcgcctaattttatttttaaatttaattgagaaacaaaaaatttataagatttttaaattatctaagtaaaaatatttatttatccgaaatggaaaagaaatttatttaattaaataattgaataaaataaatatttactttaatatttgaataaaatatcaaatattaaaagcaaatttaatgcataataaataaataaataagaaattaaaaataaatattttagtgttaaatattaatcaacaaaaaatatttttaaaaatagtattcagaaaattacaaaaaagacataaagattttcaaataatataaattaatattaataaataaaaacatgttatttcatctcgaaatttaatttaaataaaatttgatccatcaaaaatttttgtgccccaaataatttaatttgttaaaaaaataaatttaataaaaaattaagaggcatctaaaacgttgtcttagccaacaatacattatgatgtgtgccgttgtggtggtgatgttcgcccgaatttgtgctgctgatcggattttcacgtgtgccccagctgacggtgttcagattgcacaacgaataaatgggcaacagcatatacctggaaaatttcggaaaattttttttgaaatttttgaaaaacactcggtcagttacatgctcgggatggccaagaagtacagtgcacctgacgggaggtgtttaatgttttgacaaaatgtaattaattgagctgctactgatgctagtcgagagtgtaaaaaaaaaaaaaatttttttgccaaagctcgaaaaacgaaaatttgaccgtgaggttcgaagccgagagcctcccccccccccctatcaaaaaaaatccatgaaatttcttgaccatgaaaaatgcttatgaccaactaactatcaatatgtcttagattttccaaaaaaatttttttagtttttgtttgtaaatttataattaatttgggtcttacaattagtattttttttttggttttagttttacaaaaatttttagttttttggaatttataatttttttcgtcttctttttatataaaaaaaaacattttttgtctgagtttttccaaaattttagtttttcgcttttaaaaatttttttgactttttaattggtttttcctggtttttttatatcaaaaatttattagtgaccatccccaaatgcgttctaaaatgaattttcaaggccaaacatggaatcacacagccaaactcgagcggatgtaacagagcggcgacaaacctatatacagtaaacaatacagtatgacattaggtaaaaatagtaattaaattttgaatttattgcaaattgaccagctgccaagcacagtgaacagaaaaatggaatgcggtgagagaatgccatccttttgaatctgcaacgatgtgccaaccgcaacagctgtctgaaaataataattagaaaaaaaaattaaattaaaaaaaaattaaatctattcaaaaatatagaaatttagaaattgatttcaataatattaaaacaattaaataataataattttaaataaaattctgttgtgtttattaaatattataccagttaaaaaatcataaattaatttagaaatgaattttaaatgaaaatttaattatatatagcaaaaaaataaaataaaatatgtatgataatctttaaa

SEQ ID NO: 5313 - DNA, 1831 bp, Heterodera glycines
taataattttaaataaaattctgttgtgtttattaaatctacctcagttaaaaaatcataaatttaatttagaaatgaattttaaatgaaaatttaattatagtttcttcaaaaaaataaaataaaatatgtatgataatctttaaaagaaaaacatttatattgttgaaaatgatcagcatttataattgaattaaaataaaatattatttttaattgcgaatgtttttttattttttcaaatgaaaaacaaacaataatttataaaaaatattctatgtgaatgttttattaacttaaaaatagcgtaaaaatagtagttttagttttataaaactaattgggcagcatctctaaaagcaaatatttatatttgtttgaaaaattatcaaccttaatatagttaataattataattaattaaacaaataataaaaaatgtattaatttttttttttggttgttatccttgcatagagaacattttttattaaacaataatttttttttaaattatctggataactaaaaatattataaaaaaataaaataaaaattattaatttcaattgtataaaattatttttggcaccattagcatggcgaagagggcgccaatgatttgtgccatcaacaattgcttgtccgttgaacaggtcaagcaacaaatgcagaagcacagcacgggcgtggtgaccacgagcagtgcaaggcgtgtgtcaatgttgaaagagatggaaatggcaccgaccacctcgaaaaagttggcaaaaattttttaaaaaatttaaaccaatcccacgaaaccctcgctattcagagtaaagatttttataatttttagaaaatcgttggaaattttaagcgaggcccgcaccattccctagtcagagtataatttttagaaatttaagtgaggcccccaaatctctcatcagagccaagatttttagaaatccttgaaaattttaatggacgcccttcaaacaacccgttttagaaatttaatgaatcaaatcctgtggaaattactacaacaatttttaaaaggaacattaaattaaaaaaaatcaaaaaaaaaaaataaataaaattgttaattaaaaggaccattaaaaagatggtgcctggcccgagcacagaagagaacaacatcaccaattgataggcaatatacctaaaataattgcattagttaattcattttatttaatatattaattggtattgattataccgtatatgctctaattatagcccatgggggattatttttcaacctcctcagaaaaggggggataattagagactgggggattatgatagagggattctttttcaaaacacctcgtagactgggggataattggagactgcgggattaatagagactgggctataattagagcatatacggtatgcatttttgtttgttctttttgaaaatttagtcatgatctcgtggattttgaaaaacatatgttgtttagcaacggttgagggtgggttgttgtaaaagaggcaagtttttggtaaaattaaaaacaaaatttcattaaaattccaattttataattcatactatcttttttcccccaattttttttgacgtaattctcatcagttaattttattttaatttctttttattttcgctataaaattggattaaataaaaatttgttggattaaataattcaaattttctaaaaaaaaaaatttaattaaaaacccaccaaattgtgacggattcgttcactttgaccacatttcggtagtcccggagcagagggatgatgttggccattgttgaaggtatccaccgccggcg

SEQ ID NO: 5314 - DNA, 1446 bp, Heterodera glycines
ggcagggtctttaattcctttttaaacagtccaaaatgtttaggcttaactttttttttcagaaacttatcagaagcgccccaaacttcgcagggataccgaaaggaaaagaattaacctgttttatcacattagcttgtcatcagtttttataaaaaattttcaaaattctcgagtctcctattattttatttttttttcaaaattttgaagggcgggggggggggcgggtgatctgaatttatgagtgagcgtatacagaagatgttgatgacatactttaaatggcattttacgcggaagtgaaaaggtaaaaatgatcgggctataatgaaactaatcagtgatcagaggaaaatcaccgaacaaaaaagtgatcaacctgcgagaaaatgtgattagcggagttttcatctgaaattaaattattagactcgtaattacaaaaaattcagagatcgcttccggatttcatatttttatccggcaaattttatagtaaatttatttctctttttaaataaagcagaatacatacgttttgtttccatttataaaaaaatatcaaggctcagagatgaaaagaatgatactttgatgggggttaacagctgtgctttatctctaggatttcaacaaaaatccttaaaaattccaaattttgaaccgcttttacggttcatccaaaatcccattgttttttttggctaataaaatttccaataaaaaattctcaggtggccaaatgggttggaagtgtccaaatttcggcacgaaatggccacaatgggctggtcactgcaaatcaaccaactcgacgtggacgagtggcgttatcggagcagagaaaagtggacatgagaatggaattgagggatggatgaatgggacaatggaataagagcgatttgcttaacctttttttctcacattttaacactttttgttgcaaaatctttgcttttcatttttattaataaaaataaattaatattgaatgttttttagcttttggaaatgtatttgtgctgatttgtttttttcgaagttcagataaaatgattaattttaatgagtcgttcaaattttctatgcttactagttctgctcgagactgaaaatttcccgagacttaatgcttacgccataatcattactgtagtggcaataagaaatttgcaaaatgggacggtccccggatttctgtgttccctctccgtggacctatgaaaattgctcaatttttggcccattcccatcccattcatctgcaatttgttgtaaatgcaaaatctgaaaatttggattgattgccatcatacaattcaagcggggggggggggtcgaaaaatttttcggactttttaatgaatttgttaagaaaaattccaaaatttgcgaccccccccccccgcttgaattgtatgatggcaatcaatccaaatt

SEQ ID NO: 5315 - DNA, 3791 bp, Heterodera glycines
  unsure (1)..(3791): unsure at all n locations
ctttcataattttttgcnntgggttcaattccncactnggatagaatattcctcacatnttctttaccattattttaattanaattntaattntaaaaaatattccaacttttttctttcatgttaagcatcctaaaaacccaaaacttaatcaattggtcttttttttacaaattctgttaacaaatcgcattaaaaattacaaaatttttcccggcggcgcctatcggcaccgccggccctccttgtcccccaaaagtcttgagaaaaacgtgccgcgtaaaaagcggtgttgaaagcaaaaaaaggtcattgatttacattaatttacatggccggagaccccttcgcaaaattggaaaattggctgctgaccccttgttttgcaataatctgaattttgaggtctatatctgaattttagtgttctttatcctgaatttgaaaaaaaaacttggtcaacctgaatatacatatacttctgaacaattctaatgctaaaaaacaggtactcgcgcgaaaactgaataaaaattttgtatttggaaaattttgtccaaaatttgaattgacgaacgaacggaccaacgaagtgctaactttggagaaaaaagacgacaattttaattgtgtgttgaagcgatgcccaattggaaagacaattcaatgggaggacaaaaagacggacaaattgagcaatatcaactttaggttttatagtcgcacgaattgcattgggtgagttgcaacagcttttgctataataatcaattttaattgcccttaatttatttagtccattgtctccaccaaatgcgggtcaaatgaacgcaaaaaattgtctgaaaataaatcctgggctcagcggagagcagaagaaaaagtgaaagaattattggaaaatgacaattgattgatcataggaatggaaattgatcggataatgctcctcttatttaattgttgcttctttcatttaaatgaatttaatttgttttgatttttgtgaattttatagcggaaatgaaaggtttaaaaaaatgaaatatggtttattctaatgtttaaattttcattcttcctaagacggaattgcgtagcgaaattgccggaggtgacaaataaaatgtaaaccattgatttttgaaaaaataaagtttatgcttttgttcaaatggtgtccattcttgaaaaaaatattcaatcccatctcggcaaggcttggtttttatatttagggatgacaattttatttaaatttacatgaaaaaatttaaaaagaattattattttagctgatcaaattgttcaatcagatttttgatggctcgatcattttccaaatatttggtgcggggtacttcagctactggacgtgtctggtcaatttcatgtggtctcattttatttctttggtattcctcttcagcgcaaatgtagaggcgcaaatgtgtaggcgcaaatgtggaggcgcaaatgtggaggcgcaaatgtggaggcgcaaatgtggaggcgcaaatgtggaggcgcaaatgtggaggcgcaaatgtgtaggcgcaaatgtggaggcgcaaatgtggaggcgcaaatgtggaggcgcaaatgtagaggcgcaaatgtgtaggcgcaaatgtggaggcgcaaatgtagaggcgcaaatgtagtaggcgcaaatgtggaggcgcaaatgtgtaggcgcaaatgtagaggcgcaaatgtgtaggcgcaaatgtgaaggcgcaaatgtagaggcgcaaatgtagtaggcgcaagtgtggaggcgcaaatgtgtaggcgcaaatgtagaggcgcaaatgtgtaggcgcaaatgtgaaggcgcaaatgtagaggcgcaaatgtagtaggcgcaaatgtggaggcgcaaatgtgtaggcgcaaatgtagaggcgcaaatgtgtaggcgcaaatgtgaaggcgcaaatgtagaggcgcaaatgtagtaggcgcaagtgtggcacaacctataagttttatataacgtaatccaaattttagatgatttggatttaattattcgaaacaaagaacgcatacgtaaatacgcattccttgttatttgattaaatggtcggaaaattgtaatttgttatcaatgtttactcctaaatccctaattgtatccccaacttttttacttgaggataaagaatcattttacaccgtcattccatttttggtaaaatgatgagtagggctcggaattatatgcaccaaaaattgcaaaatatgcacataaatttttccaaattgagggtgtaatttctcaaaatttcttccaattcgttaaatttaagttaaaaatttcgaaaagagctaaatatggtataaaaatcatttttgaagaaaaaatacaaaataaagcatttatttaataattttggcgaaaattgagtaaaaatcgaaaattttcaatgtttcgacaaaattttgctaaaaaaatgtctttttcggaaattttttcggtctttgtggtcaaaacggccaacttagcagatgggggccgttctaatagaggttttttgggaaaatgtcaaaatatgcacaaaatgcctaaatatgcacaaatatgcaaaatatgcatatggaaagtcatcctagaagcttccaaccgagctaaaaacatgtttttcgtgcgttccatgcctcccacagtccaggaaaaaaatatgcatgtgcatataattccgagccctaatgatgaggtttctttgccaaatattttttagtaaaaaatattttataaataattagaagatggtaaaaaattaaattatttaagttatatttaatgatataaatattttattgtagaaaatataatttagttaattaattaatttgtccaattggacatcgcttcagcaaccaattaggataatctcgtccttcctccaatgtcagtttttctcgagtttgttcattgaccaattcaaatggcacaatttgccctgatgggggtaaacgaaataacaaaatgtgactggcagaagtggtggcacggaaaaatgcctaaacaatgggaaacgcaaattaaaatgtgcagacgaagggtgccggtggcttggacattgcggatgagtgagtgatgagtagggatgggatttttaggggcgaaaaagtccaaaataggggcctaaataggggtaaaaaattcgcgaaataggggcaaaaaaatcatttaaatgaatgattttctattttttcttggaaaatttcccggttcccggacaaaaaccgaggtcccggttttggcaaaaattcccggtcccgtgacactctagattatacattaaaaaattttacaaaccaatagggtccccccctttttgtttttactttttgataaaattcaaaagaccccttctttaaactagcgccgcagcctgtttttgtctttagcccttttatcaacgatactcacaatgaattttacataaaaaacaatggaaatggacacattttcgaacaagcaaaggtcaagaggtacataaaacaatattgaactggcatagtgccaacagcatttcggtcacataatcgcatcaatcaaccaataaattcattcattcatttctactgctgctgctgaccactcggnccgggagaagcggcatcaaaaagactgaaaaatgatgattcattcatgtttttattgcactttattccatttcantgttatttagccaatggcattttatgattcaaatncaatgccttnggctttttgtaccatatttatgccattcaaaacaaaccaaacacttttggaa

SEQ ID NO: 5316 - DNA, 1293 bp, Heterodera glycines
ctaagcatttgttgattggactcataaaacaacaaaaatattaattttaaattgttcaccgttcgtcgaattcgccatctttgatcacaatgtcaattgggttctgtcgatcatccattaattcattcaatacatttgcccaattttgctcctcccatccaattggacaacggctgattgcaaaataattccgctcatgttgttccagtgtcaattgctccccagtcacttcgtttgtccattcaaatggctcaatatgaacaatccgcttttttcgtgtaattgtgaagtttacgtaaagacggaaagtcattggtgaagaagcattggaaaatgcctaaaaatgggaaacacacatacaaaaagacaaattaagaggggaaaagtcaccgctctgagctgttcctccatcgctgaccaccttttgtcaccacctagcgcacgcattgtacatttgagcatcttcggtacaccatccggacgaggcgtgagcagccattcggtcaccgcttggccatccgacgcattggcactatcatcatcaggcagaaaaattattgggactttgttctccatttcaaagtaacgaagtgatggacaatcggtgagcagtgacggttccaattgaagcaaacggggaaaagcgatgtcgtttaaattcattacacgaatagaatcgcgtagcattggaaaaatgttgagcaaaacgaactccgaaatgcgaacatttgcagtgaaaatttccaattctgttgtacatgcagagaaaaaacggtgaaaacggcggagaaattcgatgacattgtggtcgatgtaactgaaaagcaggaaaagtgatggccacaaatcaatttgaatctaatcaagtttttacttgatctgaatgcgtctgaatccgacgacattgttcggcaacggaatttgcgggattggcaatgaatttccttcggaattgacaattcgcatttgcttggtgccattctctccaattcggtggcaaattcgcattgcgcccaatgtccatctgcgcgtttcgaaatgttcatcgacgaggccgtcaaagcggcggttaatcagtgcaatttcgaggccaagttgaaaaggcgcaagtaaatcgaacaccggcagccaactgaaaaatgttttgatatccaagtgtgaattttggtcaaaaattgagaaaatgaaatgcaaaaaatctaataaacgtacggaatttcagaagacatttgcagcaacaaaatgaccggaaaatatagggagaatgaatgaagagaatggaatgaggaggag

SEQ ID NO: 5317 - DNA, 2232 bp, Heterodera glycines
attttgtaggaaaaaacctttttatggtaaaatggaacattttaatctaaaaatatttttaaattaattagttttcgctctctctctctctctcttctctgtttctcatgctctgatattattggccagtgttatcatgtcatcccatgggggcggtatcttttctttcaccgatcaagactctttctgtgttcttctgcctcttcactctctctcagttgtgccagatactcccgcccatcgatcggtctctttgtcctcgagaccgattcggattggggatcaccttttgtactttgaccattggattccaaataaagagtgatattttgaacattgggccaatacgcattggcaatattatgtacgttctttgggctcccccccccccccccgcgcgtaccgactgaaatagggggacgagactcggcgagactaattgtaaataactgcacatataaaatgaaaattttattaaataagttaaacaaataaagtttaaaattattattaaaaggaattaaaggaaaattgtcatatcgaagaatggatgaaaagaccgaaatggtaaggaaaacgaacagatagtaaaaagctatagtctatcgataaaccaaaacaaaaatggccctaagagcatgggcgaaaaatgagagtcgaatgagtaattaattgtaatattatttttgggtggattttaatagtgaaattttacattaaactgcgaacacaggtggctcgacgaacaacggatcgaaacgagcagaaggagagcgaaaacgagaacggcacaaatggctgccgaagcagtaatgtcagcctaggaaaacaatgagtcaacaaaatttgctaaatatgtactgttttttggtgaaggcgaccggtaagcatttataaaggcctaccaaaatggccccaaaaatgccgaaacacaatccacggacgaaagcagcaagtaaaagccaaaggaacgaaatggcaagcagcgaaatgtaattttcggaagtatgagcattagccccgtgtggaagacaggtgttcggattagtacaaaacaccagtttccaacaaacgagcaaaaggcatggcacggcaccgtttgccattgtttcccacacagtctcggccataggatcaagaatttcttttggtaaaaatgcaaaaataaaaaaatattaaagtaacggaacaggacgacgaaaaactgagaaaacatcaattaaatcaaagtctccgtccactttcactttttgaacacttcatttgcattttttgccttcttccccccccctccccgactttccccttcaatttcataagaattagcccaatctccgacgacatctgctaattctattcttttattccgatcacaaaaaaagagagcaaaggccgaaaaagcgactgacggcaaaagctaaaggcgcatattgttggccgaaggggctgattggacgactaaatggccaatgtgttggtaaagagataaatgcagggcaattaagaaaatagatcgcctttcgtattctgaacattggaccccaaatctttcacaagctctatattagcctaaaataataatgtggaactgtaaaaaaaaatatagataaaaaactacgaaaattctgccttttttgcgattttaaagcgacaattttttgtaagctgcttaatcacttagaaataacttagatatatcttttaaacagttaaggctttcgaatgatcccatgtttgtcaagtttgatcaacaaagaaaaaatataacggagttggccagacggagttgacccctaccgccccccccccctccccgccccagttaaattcattaatttgtgatatgaaattaacaaatttataaatcgttcgggtatttatttctctggtgaattatttcactggattgtatgccttacaaaatgaattcaaataaaactattaaataataagcacataaattatattatttacaattacgacacaaaggctatattttgtcaacagaatcatctcaaatgcatttgtatcaccggacgaatgccaatttgcgagcttccggcgttgttttgtaaggtgaagggttaaattatacacacgacgaaatgactgagatgatgtgtacaaatttgcacaccgaaattgcactttcgatgtctctgatcagagatgatcgatcattaattgatcgtcctccgattagtaattagtcatgggtcgtcaagatcgacg

SEQ ID NO: 5318 - DNA, 5950 bp, Heterodera glycines
  unsure (1)..(5950): unsure at all n locations
tgtccatgctgacaatgctagggctgttcgttgtcggagtttgtggcaattctgaatcgaacnaagaattgttggcttgttttaacttcatnttatgaaattgttgngacctccagccanttgaagtcggcgccggactgacgccccggaggcattgacacctttcggatgtgccgtgccaactcctccagttgaagtgatcaccgaccncgaccagcgtctcaccgcccgtgttcgactccgcttccgagtcatccgacgcgttttcgtcgtcgctgccggacgaacttccgctggaggagtggcgcggactgcccaaacttttggtgtgtttgcgctgcggacagcgcaatgaattcgctgcaaagcgttgagggccgccagttgacgaggcggaaacggaagagggagaagaacattgcaaagagtgcaagtgatcattgggatgactgaacggggcaaataaaaggtaaaacaaaacgaaatggacacataattatgcagttcactgaattcaattccaactgctcacatgatctgttccgcaagttcaagcagttcttcccgtatttcctccatgctttcgatggtgcatccgtctttgtctttgtgctggctcagtcgcccgccctttttgctgccatttgcccttttcagctgtttcggggccgcttcatgcgccaaaaggcggtccacaatcactccaaatgaaaccttaggcaaacaaaacattaaacgatcgggctaattaattcgcaagagcatgtaccattttgagaacggacaggttaaagcgttcagcaagcagcagcattttctttacaaatgccaaatcggcgaattcctaaaaagctcaaattaacacaataatttgatcattggttctttgaattcaaatttcactttataattaatatttaaacgtttttaaattaattttaaaacaaaattttgaatttaccgccatcacttcggtgcaaatgaatcgttcgcattctcgccgaagagcggggaattggacatgccttgaggcgtccagcgcctccaaaaaatcttcaaaacattcggcctcccggacaataaccgtgttgaaataataatgtgcaaaaacctaaatttattaaaataaaagtgtaaaaattacaaattaattattctacattttgtatctttcccagcaattccttttcatccaatccatcgccaaaacttttgagattcttcaaaaaacggtcaaaaacttctgaacacccaaattggaaaacgtgtcggtagagagtgtatttgtcagtctgattgtgagttttaaattagaaaaatcattataatcaaagtatggaagtatggtttagtactttgaagtcgaaatgttcaacgtctgggactttaagtttattttggcgaaatttcgtcgagaacaacggcacagagtgccgagagtttgtcactttgcggcgactcaatgctgggcaaatattgcagcggttggaacaacgaagcgggcattctgaaaaaggaagggaatactgtaagtaaataaataaatacacagtacactaattacatcactaaaaatgataaataatcataatttgtcatgcaatacagttccgtttcttcctcacttcatctgcacccgtacggtgatctgcttgccgacgtggtcgtggatgaactcgctgaacttgcgctgctcgtccctctgccgtccccccagcccttcgtcgcttatcggcgaccatccgccgccctttgtgtactccaagttgcgcaatggcatattgtcgaagagaatgccctccgagtttcgaatggaaatgcttaacattttaaatttcaataatttattggcatttgggcgtgccaatttgcttattttttgaataatttccatttttcggcttactttcccccgctcagcttaacgtcgcgtgccggcccctccttgtagtagagggtgatgttcactttcctttgctgctgttgttgctgcaccatctccaattcgtcgtcatcgccgcccgatgcgaaatacgacgagtccatcgaaatgtcgccctcactttggtcgctaatgtccgcaggcaatatttcctcctcgcaaatgcgcaaaagccaagtgaattggacacctaaggcattttaaatttattatttggagaacaaacaacaaaaaaatgacccaccattgaaggcagtgcaaaatgccgggctgacattcaaaatggcagattcaccggcaccgatcagtctgaacagtgtggacaacaataaatcaattggattggtgtaactgttttaaaaagctatttgtcacgccaattattgtgtttaaaaactttataataaagtgaccaccgttccgttattcgcactggccaagtgtaacggaaggtgacaaattcctgctgctgctgctgctgttttgtccgttgtagatgttgtggttgtcctactttgctatcgccactaactgctgccactgctttgctttgcttctccgcaattttgatcctcaaagaatggctaccgtaggcgctctgtttctgttgttgctcagcagggtactgtacccgggagacaaaaaaacgctttgaactgccgcacgaattctggcgttgaattagcatggatttgtccgctgtagtaagcggcggttgaggtgaagttatttggtagtcgtctgaggcggctaatgaggtaattatatttgttgaggagggactgttgaggtggtgccggtggatagaattttctggcgatgtttgacttgccattgaaagtgatttcatttggtctanaatattttattggctttattatcgcatttaaaaccataaaattcaaaataattacttaatgaatcttaaatgagtaatctcttatttatgatgcacaatttgccatgaaacttttgttgtgatttgtgaatgaaatttttcgattgtccacgcccacgcgatttttaaactcgtgaaaatgagaaaaccgacaaaaaaagaaaagagtaataaaagccccgcggtccatttgctgcttttgttgccaacaatggcagaagcgaacggcaaaacaccggacggagggaagggacgaaaataacgccgaagggaaagaaaaacgcagaaaagggaaaattggcacggcactgaagggaaagaaagtgtcaaaaaaaccaatgtcaaaaaaggtaaatggagaaagaaaaaaaaggaaagttaataaaaagtattgaaatttaaatttataaaattaaatattaaaaaaaaaatatttataaaataataaagggaattaattggtaaaagacattttcatatatgtatataagtaataatctctgattctcaaaattaattaattatgagtgcttctccatctccattttcgattttaatccccccccccccatttaccgtgggcttacaaaatttatttatggaaaatccgactttttttatctttcgcgctctcccaaaatggtaaaaaattgtcgagaattaatgattgtgggaaattaaatgccaaggcaaattctggcaaaataaattatgccgtaactccaatagagtaaaaattatattttgtctaaatttctcagattcaatggataaaagaaagaaaaggaattaatgaatttccaattggttggtttgtccggtgccaaacaattacataattacgaattgtgaaaatgcattcgttcgttcgtcccctgctaaaattgcggggtggaaaaacgaacaaaacgaacaatttgcgccctccccgccgccgcggggaacattcccccgcttccccgcacgcttttaagaacggggaaatgcccgcggggaattcccagcgcattccccgtcccacgggcagcagcagaaaaacggaaaaagaaaggagaataaataaacattttaagcggaaggaataatgagcagcggcagaagcaacggaaggaaggaggaaaaggaaattaaaatgtgggacaattcaaaataattataaaatgacataatgcgtaaacagcgggatttgagatgattcccacttttaaagtgaattgatccgatcgaaaaacgggaattttgtcctcgccccccccactccctcccgcacaaatgtttgccatttcattccattcaacaccctcttgccctcctctcttcccctcccctcccctcccccccccatccatctccatgggagacgatgatcgtgatgatcatcactcttcccccgcccggccagtaatgactgttttcagcggctattatttgagcagatgtgtgatgaagtgactgaaatgaaatgaaatgaattgggcgggggcaacggatgcgaagggattcgaagggatgacacatcaaacgacggggggggggagggacatggagggatttttgccatttcaattgccaattattttggcgggtcccttttgagtgaacaataaaaaaaatttcacagaatgttgtgagtaatgcgcaagaaccgtgtatttatgtgtgcagtttctttcatgtaaaacagtgaaaaatgggaaatttaattagtcaattagcgagggcgtaaaatgaaaaatatttagagagagagagagaaaggttgagatagagtggagaatgagacaacgaatgggtggagcgattaattaatcggtgattgagccaacatatgtttgggtgagctgatcagaaagtgatttgtaaaaggattatctgaagccaaggatcaaatggtcagaatttgatcagtatggcgtggattttagttagttaacttattttttctctacagccttattatgatgagacatgcacaaaaaacatatttttagcccgaaaattcttcatttaacatcattatttgttactaggaataattgttttggattttcataactaaaacagttaggtcactatttttgattttttgaaaacccccttaagaattaaacttttggaaattcaaaatttgaccccaaaaattctaaaaatttggacgttttgttgtgttttttatggcaaaaattctacaaccttcttgatttgaataagtgacataacaaagaaaaaaatcgtttataaaattaacttttcactgcaataaattatattttttcgttatttcaaaaagaattgaattcattttcaatcagtgtttaaaatcttttttgttcaattttcattgaaaaaatgtttaagtttaaatattattgaaaaaaaaaaaattctggtcagtgttttcatcgcttttatgtcatttatttcattattctgtagttaactattttgggatttttagtaactaaaatccgcgccttattgatcagtgaatgtccaaagttcaaatgatagaaactgatcggtgaatgataatctctttgccctaaataaatttcataatgtgaaccaattttgtgatcatactttgatgaaagagaatgtgttctcatttgaaaagtatcttcataaatttaaattcgatgaaaattgaaaccagtttttataattcaaaaattggtcaaatttggtcaatttatgaccaaaatgaaaatttaatttttctactttcttcttctgaccaatttcacgttcaaagcttaaaatatgttgccaaaagcaatgaaccgaagcatttcccattgatatcaatcaaaactgtcacttccgatggcttcaaaatagaaaattcttatgccatatgatccgtagtttttccccattttcgcttttggcgaatcggatcacatttgttgcatgtttaaaaaaaagattggaatggactgctgatcaaaaagtggcagaagaaagttaaatggtgaaatttgtggaggaaaagttagtgagctaattaataaatgaaggatatatagcggcaaaacaactgggaaataattgtgtgagtgtcggatggcacgtgctctcggcgagagggagaaaaaagggggaaaagg

SEQ ID NO: 5319 - DNA, 1759 bp, Heterodera glycines
caaaggcaacccgtcgccagcagcagagcagccacaacattcattcatttatttagctgtgtgttggtgtgtgaaaagggcttccattctcgacattctcaattacaccattgtggtgggggcacaagcagacataattcatggtgggattttgaattaagatccatgaacgaaattatggtaaattatgggttattttaaaattatttaattagttttggcattttaaatttttcggaatgtttcaaagaatggatgagcggttttcactgagagagtgtcaaaatgataataaaaatttggagacaatcaattgcccaaagggaaatgttaatatggagaaaaggaggacgacaaatgacaatgaaaaaaagggggacaatggaaaatgtgacgaaaaatgacattttaaagggactcgtaaggaacagcttaatacaaaggaaagaaaggacaaagccgacaattaagccgatttaaaatgggaaaacgaaaggccaatgaacggagaacaaacgacgaaaagcggcggaaatggagaagaaacgaccgaccgaccccaaacagcgaaagattccgcaaattttattggatcgttctgacaaaatgagcggcgttaattcgcattgtttcttattaactaatgaaattgctgcccattaaaaaaagagagtccaatgaaaaacaatcggtgacagtgtgacgcgaaatcgcgagcgaaaatggtttcgcgtgttacgacgaaagtcgccacaaattctttcgtcagcataaaaagacgcgtggaagaaatcccaaacatttctgtcaaaaaacgattttagacagttgggaaggaaaccgtcggcggaattttagaaaataaaatttgaaatgccaaaatgaatgtttcaatgcattaaaataattggtgcgttaattttgggctaaaaaatgcaaatgtttgacgggggaattcttttggcttttctggaacagcagggaaatgaatgcattcgtatggaaaaactcgttctgctgacgtgggaaaggcggtggataaagcgaatgataaaagaccaatggaattgacgagggacgaacgactcaaaaggggggagagaaaagcgagagacgacacatgcccggggggggcaacacaacacaatcccgcggcgttaaataaaacaattcgccgccgtcaaatggccgtccaacggaccaactccccgcttctcccccccccccaacatctgtgcttcatctcccctttgcttctgcttcttctgctggtgggtgtgatcattaggcaatttggagggaggagaagaggacattcagctgaacaaatgcataaaaaggctgggaaaataaaataggctaatgggcaaaacaaaaacatatcgcccattggcagaggaacaaaaagcaattggaggggggggaaggagtgcattatgagaaaagaaagatagaaaactgtttgttgttatggccaaacaaaaatggcaatttgccaaagggaaacacaattttaattcgacaaaatggcaattgaatataaaaaaaaccattccattttttggtagggggggggggaatgcttctcaattgtcagcccatcattttcattcgcttcccctttctctcccgtggcagcacgtcgtcaattttcatagaattccgagaaatgtgcacccaaatgcataagtgaagtgagtcatgtgacagaaggcaatggaattataagctcagcccatcccccgaaaaataaattcct

SEQ ID NO: 5320 - DNA, 4030 bp, Heterodera glycines
gagaaaataaattgtcaatccccaatatttgttttaggcaaaaatgtccactgaaagtgaccaactcggccagcagcagcaggaaagggaacagtcggccgatttggggggactgaacagcgacagtggcagcgaaaagaggcgactgcgcgtggccaaaacgtttgttctgccgcttcttcattcacttcttcgggtcctggcacttcagcatacactgacgaaaacgaacaaaaattgaagtcaattaatcccctgattttgtattccgctatgataccgtatcgttttcccgtctctaccaattctcttttataattgtttgtattcatttgacggtaaatacccctcctcttccctccttcgctcacttctgttcactttgtcatttttctcctttttcctctgtgaccccacttccaatcaatatttaatttattgttcgccctgtccctttttatttgtttgaataaacttttggtttattcactgcggacttagcggcgtttcccaattgcgtggttttctcaaaaatctgaattttagattctaagttagttttagttgaaaattcttagaaacttttttggtacaagttgccctttgtacgaattgccaattgtacgagttgcctttgtatgttgccttttgtacgagttgccatgacacctcgggggggggggggaactaaagtgaagttaagtatttgagtgccgaaaactcaactaattaaaaaagatcaatgccctaaactttcaggcatttccttctttaagatttcaatcactcaaatgaccgcttttctctcccttctttcttcaattaaagtcgctacttttggttcattttattttttatgattaaaatgaataaatcgatttacaacaatcgtactcggaaagatattacaatgtcaaaggagagaatgtaaaagttttcccttcctcaaaaacggcatattttcctgaagaaggcattcgccacccttctctccctaattgtgcgccttctttcagcttttgtccgttgttttgttagtaggacttttttctcggcataagttttgacagaatgccggagaatgatcgtttgtgctctgaacaaacaaacacaaattggttgctaaatattaattaataaatttggcaaatatctcttttctcactttgtttccgactcgtgcccattgcttcttccatttcctctccctgcttttcctctccttccctccgcttttcttcctcctccccctcctcctcatctttgtgccgttcgtctctttcttccgtcgctttttcctcctctttcctattgctttgctcgcgtctcaaccgtcgcgcagtcaaattgtccacaatgacgcggttccacagttttgtcggctcttgccgcgatgcttctcccattttgccgtcaattaaacggcgaccatctgctgacgatggaagttgttcattttgaatatcatttattttgataattattctttaattgcgtctgcttctcgccctcggctcattcattcatttattcattcacctgtgtaagtaatctgtggcttcttctgtttgcggttgttgaacagctcatcatccggttgctgatggctacgaaattggggagccgacgaggagggcggcgatgcgtagaactcgtaattctgtgggaattattaattagccctaattaggagtgcgttggttttcttacctccgtttgacagttcatcatccccaacattttcaaggttttttatttcgccgaaatgcacttttgaatgagaacggtcttttctttctgtgatttgtggctagtcacactaagcatttaaataccaaacaaatgtctgagggggggacaaaacaaaatttcgaaatttcgtaaaaaattcattgtaaaattagaaaggcattgactgtttgtaactaaatttagtacaaaacgaaaagaaagtgagagaaattggatcaaatgaatgaacggacgaagaaagaatgaacgaatgagtgattaggtaagtgattggcagaaagacaaaagcgaaaaggcaaagtgatgacgacgaaaatcgcatctgacagtcacacaaatgagcagactttggcgaacgcagcagcgaaacgaaacgaaggcacaacgacgccggagagacgaacgaacccatcaattaattaacattaattgccacccccgctcaaaagactgacaaataaaacaatgggccaaaacattgggggggggggaggagaagagggaggggagggcacccgatgaaacggacggcggatgggcgacgaaaggcggcaaaatcaaaggcagtgattcattcagtcatttgctgcgcgtgacttttgaaatgtttgcgctgacgtcactgatgcactttaacaaatgttttaccttccgtcgagagtgatcagtgattacaggcaaaaatcgtaaataatgatgacaattttgacaaaagttttcaaacaaaataaacgaatcttttaaaattaaacataaaaaatgaaatattttattgttttaatttaattgttgtttattgttttttacataaattaaatttcttcataaaagtctagaacggtagaattcattatatagctcttaaatacgatcaaaaaatgtttgaatttgttgattttcatctccgattattcggctgcatcaattggaacttttcacacgaaaaaatgggctgaaattcaaaataaaaatgatagctttttaagcattcccaacttttaatgagtcatttccgtcggcaattttattgccggaaagaggcaaacaaccgaccctgtccttttcgcttgttgcagttttgcttttctccagtaatttgttgcggaaatggccgcaattcgctcactgtgagcagaatttttttctaaaattttcaaagaatttaaaaaattaagaattaaatattttgaaaaaaattcaatgatacgttaatctttcttctctttggctgaaatggccaaccaaataaatgcgtattcagtttaacccttcgtatttaagtttttctgggctggtgattcccccccccccaactctgttccatttgccggtgattcccccccccccccccacccctccatcttttgtgccatttgccggtgattccccccccccccacccctccatcttttgtgccatttgccggtgattcccccccccccccctcccctccttcttttgtgccatttattccccgtgcctttcgccctttctccgcttcggttgtgccgttagttcgctttggctaagccgtcggatggttccaatgaaaacggtcaatgcgctgttctttttgttggctgtcatttcggatggtgctcctccggcggcggagagaatcgccgcgttgctggcggtggttcggtcctatgatagaaaagcatcaaatttcgttaccgtattattagcttttggaattttatttttacgatttctcacttttcccctggcgcccagccaagcgaagagaattgggttccaacaaacggcggacatcgccaccaaatgggcgaccagcggacacaaatagggctgactgaacaagaagtgcggttccatgcctaagggggcgaatgcgaagcgaacaaaggccaaatgcaaaaccgaagtctttggccaaatttacggccgtcagagggccgttgcagccgacgaacgcgacgaccatgccgagcaaagtgcaattgacgcgcctctttctgagagtgccattccattccatttgacaacaatcgaatgaatgcttttcctcgccatttgcccacctgttaatcgcatccattcgctgcaaattggtcaaagtcttgcgaaactgcacattctgtacgatcatgtccttttgcactttgcgcagaattcgcaaatggcaaaaagtgatgacactcaacggcacaacaaactgaggaaggagcggtgaatgttttgcattagcaccaatgagaatgcctaacttgaaaaagagcacaaaggcaccatataattgccgacgcgattcgct

SEQ ID NO: 5321 - DNA, 3738 bp, Heterodera glycines
tcagcagaaagaaattccgcgtagatcgaattctgacaatcgtaagaattattcttacttataaaacaattaaatgtttattaccgatttgtccgtccaaaggccattaaaacgcttccattggaaaacaaaccgaacaaaaacaaaagggcataagcgaaaatgatggcaattttgatgaggggatagctgcaaagcagttaattgtggtacaatccattcattgcttgtttttgggttgccttgtccaatcgtcgatgccgtgggcggcgatcacttcggagagatggacacattccaacaagtgccattgggcattcatttgaagttcaagaggctaaattaatgtcacgataaaagtaattagctgtttgctttaattttcacttcgctttcattgttttttaaaaattggccaattttttgtcgtacagaaattgatgaattcatttgctgaatgatgatgctaatttattagttaaaattgtcttttgaaacagaagaaatgctacggaaaaatattgtcaatttataaatatattttattttattatttatttttaacggattattttgcttttgaattttttatgaattaagataaagttataaaaattgtatttttatttatgtatttggtcgtaacttaaattgcattggaaaaggaaatgattaaattgagtgagacgttgaggaaaaaattgcgatgagacgcccttaaaaggggggggggggcaaagcaattgaaaaccgaaatttgaaagcatttgctaacgtcgagggaagagagtctgttttcccgcttacttagtgattaaaattgagtttcaaatggaaaaatagtttaaaaagaattttgtttttcttaatcgatgcaattatataaaaaataaatcggcaaattttgcatttgtttaattacccaaaacatttaacaatgaggaagaagtgaatgaaaggagcagcaaatgtttacggaaagagaacaaaacttttaaattcgaccataaaattaccatagaattcgctctcttaaattgttgtgccaaaggcaattggaaattgtccgtccctcggccaattttccgttggggcgattgaatgggcgcacaattttaagcggaaaagtgtttttgtttcgaagcagcgacagacggacaattagcagaaaaaagggtaaatttgaatgagtaattacgcacagattgttttattttatgcatgaaaatgttgagagcgaagcgaaaaagttattttgaggtgaaaaaaaatttagaaaaggtgccaatgtcggattttgaggatggaaaatgccaaagttggcaaaaatacgaaagcaacaattaccgtagcaggatcagctgatgcatacggtaaaaactgaccgaaaaagggcgaaactaattacccaagcagaatgaaaacaattttttccttggaaaatttcttaaggctattaaaagaaattccgaaattcccccgtggaaacataaacaaatgaaaagtttagggactctttgagttcccaggaacttttttatttgcttttttgatcagtcataattcgtttcatttccaaccaattaaatcaaaattttaaatttgtaatttgtattttttttaagtgaatgctgctaatttgtgagcgatctgacgcactcgagaaaaattatgataacttaagtcccaggctaccgtttaattaaaatgttaaataattatttaagggagcggacccacagtgacaacgctttgttagacataacttgagacttagaccgctgagaaaaaaattatttttctatcgatcgaaaaatcaaaatgattttgtattatattatcctaattattagaattaataaatttttagttgatcataatgtttatcttaagtattatagaaaatatcttttaaaatttccgtaaaatttgcgttttcttttttgaaattcataagattctctgctgataaaataattgaatgatttattttaataataaaaaatcactcacaattacaaccaattgttttgattatcaattcgttcttaaatcatagcccttctgctgatcactgatcaccctatctttttcctctcttctcaatgattattccgtttggcttctgttaaatggtcaaaatttcggttgaataattactttgaatttaattttgatcagcaaacattgcaaacaaataacagctctaaaactcccacaaaacccaacttctgcttttttcccatgctttgttttataaattaatttttaatgcttttatttatttatttttattatttttaaaaatatatattttcggcaccgaatgcaatttgctatttcattttttgttgttgttgttaatgcctttttcatttcatttccgtcacatcgtccttttacaaattaaatttccaccgacgaaattacgaaaaaacgcaacaattttttcgtctctggcaaaaaaaaaacacaggcaaacatgaagaaaaagaagaagcacttgaaaatgaggacgacgacggcattcattttcataataataatgaaaatgccaaaaaacggtgggggaaaggcatttgttgcaattaatcaaaaaaatgtacatacaattgatgaatcgtagtaatgtaacatttcactttcaaccaaagtaacgtcaaaacaaccgtaatattgtttgctgcctcgaaatggcaatgtggccacgccaatccatcgaccaattagcctaatggatttgatttataataacttaactgggtcattaacactaattgacattaattaattaaaaaacgcatttttgccagttcattcatcgaaattaatctttattccttccacgtgtcatctgaacattgtgcttttaagttgctttctttcgcttctcttctctttttcgctttccaaagtgaatgtcatttctttattcgatctgtcaatcgtcggattttgtgcgattaattttattaattaaggttttgtcattctttaatttccaccgcttactcatcgcaaattgcaatggcacttttggctgcccatattcattccgtccaaaaaataatccctttcttcggcactctgaattaataaacattaattagcttctgtttgattttggcattcgctggtcttcaattatcaaatattagcgttttagttgcttgaaaggatttagagtggaattctgctgctgctttccgtgaccaatttacaaaatgaggaaggcaataaattgtaacggaaggctaataataaatcataaaggagcaaagtgaaatttaaaagatatttaatatttattatccatccaatgctttctttcgttcattctttgcctccgttttttgtttgctttaaaaggtaaataaatttccttctttttttaaatgaacattttcaattaaaaattatgcattttaatttcctcttaattccttctcatgaatttttgttggagcttattcttctgtgtttggaattggcacaaattctcaattccaataaactttgtgccaaaacccttctaagatatttaaacgaattttcgaaaatcaaacaatttatctttccgttcatttgtcgcatttaaaattgaaaatatcgctcgcactttttggccttttgtccccttttctcgcttattcccctttctttctcttttctcctctctttttcgtttcttcttttaattcaccatggcaaatgaaaagccatgaaaagagggggggg

SEQ ID NO: 5322 - DNA, 929 bp, Heterodera glycines
cggcggcaaggggattatccccaggaagaaagaatacggcacgtaaatcccctgtaaattggcacgccatcccatcacgaagtgggaaaaggcgcccatgcccaatccgcaaaaagtgttgtcccccgcactcttctcggcatattgccccaggcatcgtccggcgttacaatccccggggtttttttatacggcggttttttaaaaccgcgtcatttgaaaattccatgttaaaaatagacaacactttctccatttccgttttacaagtgaatgttacaagaaatttttagaatcaaaatcaaaattgctaattcaaaaattctaaaatagatgctaaaatttattctgttttttcttcaaatgataattagcaacacattagtttgctaattaattataaattattttaatttatctgctttaaattaatttttcttttcttgataataaaaaacggaagaaaaaaaagaaatttccatgctcataaaagttcgcagaaaaattctataaaataagtcaatgttaaaatatttgcaattcaatgaattggataaataagtgctaattgcttttgttcatttaggaaaaatttttcccgcgaatataaaatcatttctcaataaaaagcattacgcgcatttgaaggcgtccattagtcgtaattggttgtttaaaacagagatgaaaagtgccatttttgtcaactcattgtcaacagatcattcattcaatgttcgagcaaaactaaggccaaccatcgaaggaatggcaaaaataaattggccattcgtgtcggatgacatcactcttcgccccatccgcacattcatccgccaaattcggcggattgtgcgcttatctgtgctccatttcgtcttatctcacttatcccacccacccattaatccgtggcccattcgtcctcc

SEQ ID NO: 5323 - DNA, 6346 bp, Heterodera glycines
tcagtggcgaaaccgcggacacaagagggcgatggtcggcaactcctcgttggcgcgggcgagcacgacaacaattcgggaacgaatggaatgggcaagacaggggattcggaacggatggataattttgatacttaccgatgaaaatagtttagaaagaaattatatttgacatattttaaatattaattgtaaactcaattaaattttgttgcattttaacattcaacaaaaaaataaaaataaataaataaaatgcaacaaaataattagtaaattgtcggggacaattttctctcaggaggggaatggtatctctataattaattgtacattagatatttcttattttctgactgtctgattttgttagtgcctctgatcactctgatcaactttaactccgccccttctcgtaatgtggcccatttcctagcgatcacctcaattcattcttataaccgggatcacatttaccccgatcccctccccttccgtcctgtacggatcggggtccctttcccctttttactcattacattagcatattgtatttcttggatccgccttcggaataaaggacattattccatgtgtatactattattgtacggggaaattagggcccacaattagaacggacattacatagaaatcaatactaattaaatttttactattttgtttggtttctttttttgtgttttccttattaattaaggtctaattagttctgtccccaaaattagtttcttttatttatgcataaattgtggctttcaaattcgctttgctacctgagcttgtactgctccaaccccatgcatgaatctggagctgtacaagctcagtgagaattcagagttcaaatctaggtccatatttgggctgaccgtggctagtttactcagaattatgtattgtaaattcagtattttcaggtcgtattacaaaaacttttgcgtggtggttaagaaaaatgttatttttggagactgctttcaaacttgactttccagtaattcaattaatattaaataaattttatttagtttgagttctaggcctgtgggggttgatctcctgtccaaaaatggcaactcattatcgataataataataatggtaagggattttgaattatggctaaattttattcattagaaaaaataaaattttcgaaaattttcggggaacaaaacttatgctacaccatattaaattgtcttccacttaattgttcatcatatttcgctaattaccacctgaaaagttgggtgcgcaggcgaaggcggcggtgccttataaaaagattcgtctgaaagttgctcaatcattggttcgtcctcgtccatctctttggcaatttgcccaatttgaccattttcgtccccaatgccattttcctgcacaaaattggtccaaaatcccgggctaaaatttaaatataaattttttaaattttatataaaaactaacggattttggtcattcaattcggattggtttggcttcacctcgaaaatttcaaaaaagaaacaaatcaaaaggaaaaaaagcccgaatttcattgcttctaaaatttgttactttacagtaaaaatagaaaatgaagttatattataaaaatgaataaaaagctaaaaaaagccaacgagtgaaactcttgatcaaatgggaatcaaaaaaaaaatgaagaaaagggcaaatgccaagaaaatcaaacacatgggcatggacaattgttggattctgttaagctatttctgaagaaagtcttcaatttagcaagcataaaattatcaatataaataatagtgaatattattttaatatttctattctcgaaaattagaagaaatatttggatattattttttattttctcattattgaagaaaatgttattttgtcccccgaggtgagaagggaccggtgacagaatatcaaataattaataaataaactatcgaatacttatgtcggagttaaaatacagtatcaaacaaaattagcgacaaaacaaataaaaatctaatgattaaaattttatcaaaatcttgaaaaaatttgaaaaggaaggaaagaatgagacagaataaaaattcgggaatcgaacccaaacaattgtaattcccgatggacttcaaactctcaagctgcgagaaagccataaaataaggtgcgttgacgctattttgcgcaaaacaaaaagaaattgttacaattccgggttctggatttggtcgaaatgggtgtctgattcgtgttcaatgctcccgaaaacccacaagttttgggctcgaatttataacatgagaccggatttttaggcacgaacatttttcaaatagttaccgaaaataggcacgaaaaaggtgaaaaaaggcataaaaatgtacaaaaacgacaaaaaaaggcacaaaaaggaaaaaggcagcaaaatttacacttttggacaaaaaaattttcttaatattaccacaaaattcacaatttttctttcgcactgtcaaaacaaatggatatcatgtttttctggagtaaaaaaatgaatttttgatcaagtttgaaaaaaagttatgaatatgtatagattataggacgacacccaactcgttggcaattttgtaaatgcgttgactatacatttcagtctgtagtaattataaactgcggttagcacttaaattcccattttccagtcaaaaaaacgagttggggtaataaaaacgagttgggtctttttacgagattatatgggttttatatatttttttctgcgcatattctatgaagaaagttgctaaaaaatagcatttctacgataaatttttatgatttgagcttttagtccatataaatccatatttagggttatcgggaataaatccatatttcgctattttttcgtttttgtccatatcttagccaaattttcgcaagaaaaaaaggcaccaaaaagtccaagctagaagattcaaaccaagccaattaaaaactcgtaattcatgtatataagtcatagcagattagcaaaaaaaaaaaaacatatgcctcaaaatccggtccctatttataacagtattacgcacaaactacctccctttttcattttaaaggctaatagaggacacttatttgttagggctattgattgtacaaagatggttggatttggttggcaaagaaaaaagttatagccaaaaacttgggctcgcacgaaaacggcctggtccgctgtaataccgtacttcctaaaatagagcccccgggggctctatttttcaccccaccccctcaaaaggtggggggctttatttgaaagggggcactaatttagggggcggctttattttaggaaatacggtatgttgtattacgcagaaattaggtacctctctttttcctattgttcactgttcttcactataaaagtcctggcttttctctttgcctctttcactctttcactcactttttcttttccttttgccgccgcaatgtcttcaaaaaagattctgtatgtttttctttttctctttccttctctctttctttttatccctcttttctttctctcattccgtcttttcagtttgttcggtgtgcctttgttggtcggctgttgcgccattctttggatgtgttgggactacgccaaaaaacgacacgtcaaaaaaggacgacgacggcgacccattgacgacaaaaaagaaaagtagcaaaaattaataattaattaagtttataattgtttttcagctgcttcatcccccgtggcgattggcggctggcggtctttgcttttcttgcgccttctcagcttggcctcgaaattgcactgctcagccaccgatttgactgtcttgtcgatgaacactttaaaacgagaaaatgggcattcgattcaatggacatttggcgcaaaatcggagagaatggcaccaaagaagtactaattgtcaattcgcatgggaaggcactgccaattccgcaaaagccgatgccaaagaaaatcatcggattcaaatgcattacaatcgagtgaattggacatttatgaaaaattggctaacatttctcgttttttttttcagatacttccaccaaaatgtcgtctcctttctccaccgttttcgctctcttttcggctcttctgggattaatttgtccattggatttggctcactcactgatcgcactgctgagtaccttatgtgcaagctttggccattgctccggggcaaagtctgcggcatggaattttggccagcggagttccgatgtttgcgacagttcgccccatacattctgcgcgactgtccgtccctgcgaaccgtctgtcttccctactgtagtcatttcgacgagtcggatggccaagcggtgtccaaatggcttttgtcgcctcggccggacggtcttccaaaagtgttccgttgcgaattcgatttggctgagatgcgatgggtgtcactgatcagagaattcaaagcggtgatttatttgttgatcattattttacacaacttgctattacttttcattctgtccatgtttcagtcatttgcaaatgcttctcgccatgtcaatttcatcattgtcattcgcttttcctgtgccgatgactccgccgttgcgacgttcgatctgatcaacaatttcactggggagcgatcgacactgaaaaggcttaacaaagacaacagcgacgacaataacaatgatcgttttctgctgattcgctgtccgatttcgcgagatgagtgtaaatggagcaaatgggaaaaggaagcgattggatgggaattcgacaatcagtggaacagaatcatcttctcaattaaggactatggaatcgaccattggtcggctatttgaaaatttttaactgttttttcatttttcatttttttagttgctatcccggtccgagtggtcatcagaataagagcaaatgaattgatgggacaatgtgaccgattcgctgaattttgtgtccttttaatttgaattgtttgtttctaaattgaaataaataataaaattccttgtctatattatttgccatctgtgctaggaagccattgaaaaaacaaaaatgtggcgccgggggacccaaaatgggggcaaaattttttgaaatgaggcaaaaagggaacgcataaaattttcaaatttatttttcatttcaataaaaaaattgaaacaatttggacaaatttattagagcgactttttagcaactattttaaattattttagcttttgaaattaaaaaaaaattattttttcaactatttttgcttatgaacaaaaaaattgcctgagaatcagggctgggcgtaattacggattacggaaattacggcctttttggaccccgtcatgacggattacggatttttgggatttttccgtaaagtcttattaaggctacaccctaatttgagttttggcctacaaaatagggcgttttttgtcgctttgcgttaagccaaatcagtattgggacacatattttttaaactttaaagtttaaactccttgtcaagaaataaatgaatttttgagaaaatttttaatttattaggtgtgtgtttttttaaatttttgggtcgatttttaggggcgtatttcttttttattgtatttttgctaataaattttcaaaaaaatgttaaaataagttttttcaaaattacttttttgactaaaattaattttttatcctattttgaagcaaaatcttttacaaatgcactaaaatcttcaaaattttcctctgcgttcatgccaaatcttattaatatgcttttaaattgcttataaaattattgaattttttaaaataaaacttgaaaattatttcaaaaaaattaaaattttgaaaatttacggattacggattacggaaaattacggggttttttggtccccgtcatgacggattacggatttccgtaattgaaaatccagttacgcccagccctgctgagaatcgacctaaattttttttcaaagaatacaccccataggaatcaacttttcaaaaagcaaaaatcctggctatgatttagcggacaataaaaaaaattttacgcctgaaaatcttaaaatatgtttgatttatatttattcaaacgaaatggataaagaatagtcagttttggaaaattcacacattttttatttcaaaaatttaaaatttaacgaaaataacaattcataactagcgttgtaaattatatggattaacatattttttctgcgcatatgttacagtcatggtcaaaggcaagggcgtagccagacccttggctttggggggggggggggatgt

SEQ ID NO: 5324 - DNA, 2229 bp, Heterodera glycines
  unsure (1)..(2229): unsure at all n locations
ttacgaccacttacatttttataataaattcactgatacaaggattagattatgatatttgctgaaaatgtatttatattttttatacattttttttatggctttcgaatggtatcattcattanncgttataatgcttgtcacatggttactaaaagaaatgaattatatcncattttggggtggtcatatgtttacgaccataaacttaattcataaaaaatcaatattcacgtgatttgatcacagcctcaatacggcgaggcatagagtttatcaaattgataattgggtcaagcggaattgagttccaggcctccaaatgccaagttggggctttgactgaaagtgccttccggcgattttccgcttgacaaagtgccaaagattttcgattggtgacaaatcagggctcaatggaggggtacgaaggaggggaacattgttcaggctgaaccagcccggcaagcgcagacgccgaccgccaggaagtcgccgatccatattttgtgggttttcgggaataaatccatatttcgccatttttgcctttttagtccatatttcggccatttttggcaaaatttcacaagaaaaatgcaaaaaaaagcgaaaaatacacccctaaagatcgactttttggaaatttttacaaatacacccccaatgagtttttgttgtcattttggcatttttaattaatattttcaccatttttttgcgaacttctctttttttaaaaacttggaggtgttttttatacaacggacgacaataaaaattttgcatttttaaattttaaatccattttttttggttgtctattgtatttcttaagtttacttaagcaaatattgaatataaaatcaatgagaatttttttgtttgaaatgtgatttgaggatttttgtggctttttgagaaattttgaggatttttgaggcttttgggaaaaatcgtcagaatcttttaaattttgataaattgacataatgtttgacaattatttaattttttgggttttaatagagtatcaaacggaaatctcacccaaatttagccagaaaattacaattttttcgaaatccacaaaattatgaatttttttaaatgaaaatctgctaaaaatatggtcaaaattctcaatttttcccccaccggcggcgcctatcggcaccgcccgcccctcaatctccaagtttttttggaaaaagcgccgcaaaaaaatcaacttcgatttttcatgctcagaatctcacaagatgcttatttcgaacaaaaaaattgctcaaattgtcatggaccatcgaagatataacatttgatcattttaaacgtgttttgaataaattttgtaaaaatgaggctttttgacccaaaatgaggtttatttgcatgccaaatgagttccctctattacaaaacaaacaaaaaaaatagaaaatggcagaaagaaaatttattaacaaataataatgtttatgaaattaatggattgaaaaaaaaacagagagagaaagagagacagagaagagagagagagaagaggagagagagagggagagaaaagaggagaagaaggacagagagaaaagataagaggagagaagaagagagagaaaagagatcgagactgggagagagagagagaaacgaagaaagagagaaaattgaggagagagaaaaaagagaagagagagagaaagggggaaagagtgaatgagagagagagtgaaagtagagagagtgaagagaagagagagagagagagaaggaatgagagaaagagagagaaaaaagagcgagaaagagggacgtactgggaatgacaatttaattatttaaaacgatgacttttcgcgtttatttttgtgtttaaatttcatttttgttttgttttttgttcatcagttgttcttgagatttctccgatttttgtccttttttctctcttcatgttttaaaaataaattattctccaatcgccttaatttgccctgatcgacagtgtttatcagcagacgacttttgaccacgaagtgccgccaatttgtaagacaacaattctcttcaccctctctccgcttcacatcaacttcgttaaatcttgactaagcattcatttttgtccccgtaattgtgtttctgagttttaattatttgaccactcccatttccctcaccaatcgaccgaaagacaatcggtctgaccatcccttttcccatccc

SEQ ID NO: 5325 - DNA, 854 bp, Heterodera glycines
tagagttgagcggtaatcggtaattgcaaaaaaaccggtaccggtactgaccggtactgcaaaaaccggtaccggtaccggtaccaactttttcaaccggtaccggtaccggtaccggtaaaaaccggtaattttagaacataaaaatttttggacaaaattttccaaatacaaaatttttattcagttttcgcgcgagtgcctgttttttagcattagaattgttcagaagtatatgtatattcaggttgaccaagttttttttttcaaattcaggacatagaacactaaaattcagatatagacctcaaaattcagattattgcaaaacaaggggtcagcagccaattttccaattttgcgaaggggtctccggccatgtaaattaatgtaaatcagggcgcgtatctttcctgatttatcagatttgtcctgatttgaagggtccaaatctgataaaattaaaatgtcctgatttgtcagatttgtcctgatttggagggagtgacccaactttgtcctgatttcttaaataaacttacaattttgaaattttatggcataatgtcactattttatcaataaaatataagatttatgacaaaatttggttatttttttaataaaaatctgttaacaaatcagaacgaaattacaaaaaattttccggcggcgcctatcggcaccgccggaccccctgtccatcctccaaaattttttgaaaaaatgcgacgcaaaaaaagcgtttttaaagcaaaaaagtcgtcgcttgacttttaatttaattacaaaattggcattttttggtgaaaatcttttaacaaatcagaacgaaattacaaaaaattttccgg

SEQ ID NO: 5326 - DNA, 1845 bp, Heterodera glycines
  unsure (1)..(1845): unsure at all n locations
gtttctaatcgaatctgacgcttgtacaagaactcgtacgaaaatgtccccggtacgaaaacgaccctgaccgtcttcccatcacactctctctctctctctctctctgtctgtctctcacctgctgctgttctctcttcttgtcctcgtccctcttcgtcctccgctttggccgcgttgtctcatcacctcgtcgtttcttcccgagcatttccagcggaagttcgctgaccatcgtcgacactgagtccgatccttcgtcgttctgcaccactgctgtgtacgtccctgcaacaccaccacccaaagtgacactccttttctgtgtttgccttttcctcaccggaatgttctgacggacagaagcggagaatctccagcataaactcagtgacttcgaggtcgtcgttgaatttgttgttgaacagtgtgaagtcgtcgcccgtcgctggcacaaatgcttttccgtttttcagccaattaaacgatggcattgggttgccggcgtacgaaccggccaaacaaacgcgagaaccactgatcgcttcctgaaaggcgcattgacttgttcacttttgatcttcccctttttacaatgctttgttttggctttttgacaaattccggtgctttacgcttttcctcccttttttgaattttgcttgtccccggcttttcctcctcagtttctttgcttcctttgacttccgttgcttttcttggctcattcttctgaatttaaaggacaattatttatcacataaaacaaatgaaaactaagggtaccccaaagacgataagattggcttctgtagatggttttacggtagtcttagtcaactccaactccaatttgtaccgacctgtgaatgtgttcaattttcaaaaaccgtagtttctcctctcttctcccctttttctctcgctctttccccttttcactttttctcttctccccctcctttctccaattttccctcctctctctccctttttctcttttccctctccactctttatcttctctcttgtcccttccccctctcttttcccccttttgctcttccacctgcgtctcctttctccactttgttcacaataagttttgcttctccgcgcggcatctccaaaagtgccttgtattttaatgatgttcgtgtgttcagtaatttcccatctttgtaccttcaaatgattaatatcgaaatgattggttaattttgtaatggtttggcctaattcccaccattttgccctcattagcgcctcttttgcgtttttgtccagttttgcgcccaattccactcgtatttggccttcagtcgcctctttgtcctccaaagcattgtcaaatccgtccgtctttttctcttcttccattgctttctttttctcctcttcattactcttcgtcttctcctcctccgcttgctctttctttttgtcttctgtcgctttcctttttctctcttcttcttcttcctttttctcttctttgtgctttttcttttcctcttcctcctttcttttccgctctttttcttcttccttcttcttctcttcatcttgctttttcttttcttcttccgctcgtttcttttccattcttttcctgctctcttcctccagtcgcttcttctcttcctcctcctttttctgtgtctcttcctcctttcttactttctcttgttcaatccgtttcctctccgcttcttccatcattttttcctcttgctccttcctctccttttcttctttctctctcgatttcttctgcttctcctcctcctcccttttctctccctcctttcgcttctcttcctcttccttttgttncatttcctc

SEQ ID NO: 5327 - DNA, 1619 bp, Heterodera glycines
ttcgattttgcgcctgccggcgattccatcaatgtccgatagtcgtcgtcgtcttggatgcctagaaataacccatcaaattgctcggcatcaccagcagactgaccagagtcgagctgactgcctgaaaatgccgtcgatgactccgaatcgctcccttccgccaatgccagcgcttttttcggcccctccggcgttgttgtatcccccctcagcgtcactactccatccgcctcccttttgctcgatgcttccgccctttgtcccccgttttcttcgtccgccgacggtcgtcttttatttgccattacaaaaatttcgtcgctttgttcgctcgcttcgctgatcaaaacaccttcaaaatggaaagaacaaatgatcaattacgacttttaaaaacaaatttaataatgtgaaaagcaaattcaaacgcttgcccggcaatttggcgatgattttgtacacctaaaaaagcagtgattagcgctcattaacaatcagtggattatttgttcaataataaaactcacatatcgtcccgtctccaacacggaacggtcaacgaatcttaacgaaaaaagcgaaatatgaaagaaaaatggccaacaaagaaaggcccacttgttcctctcagagttgcttatttccagccaaaattccttctcggacgccaaaacggacacttttctgcgatgaattcctacaaaaaaacaaatacagaaaacaatcgaagttgagggaaagtgcgcataccgtacaccatggccctgtccacttttggccagctcagcgtgcatttcgtctgcgacgggtccacagcaatttcaggtttgctgaagggatgcgcagatggttatggcacatcggaatttgccattttatcgtactttggtctagagagaggcgggattggctccgaattggataagatgagcgaagtgtccgcagtcgcctcttcctcgtccggcattaccacctccaccgactcgctgggcaccgattcgccaatttcgtttacagccaaaattctaaaagccatccaatgtcggtgaaatgatacgtttatcggttaattgcctgaaggcataacattcgttggggtataagccgacgatgcgcgtgaagaagccgccacggtcggtgcgaattctgaacaattcaatttgggattttaagggtcgggaaaaggcccaaaaacaaaacggacaactgttttgttgaaagcgataaaaccacagaaactgaccgatcggctgtctttcgttggatttgtcgccatcggattctaaaacaaatcaaaaggaaatgggaaatcattatcaattttagctcaccgttctgccgtcttccgttccacaatgaaactttctaccgaattttcctcctccaattcgccgtcatcgcccaactcccaataaaggtccacacaggacgaggaaaagagttcggcacgtactctgtttttatgcatttagaagaaagatggaaaacgaatggcaaaagtgccaactttgtcggtgggacgggcacatccaacacacaaagatcgaagaaggtggagtcttggcccaactcgttggaagcatgtagccaaatctgtgcagcaatacgaagtgaca

SEQ ID NO: 5328 - DNA, 1352 bp, Heterodera glycines
gtgtccgagaagtgtgccgtacacagaaaactcttccccgcaaattttgaccagcttttcgtccgtgtagcggcggagcttcaaaagttcaaaggttttgtatatttgggccaaagcattgtgcccccccccccacctgtattttaggcgcaacttcgaacttgagcttggccggtgcactgcgttctccgctgtcctgaaaagtttttcccattttttcagtcgcatttttcgccatttgcggctgaccaatgtgacgtggtagtcgccgacatcgttctcgtcaaagttgtatatctccaggttagcgcgcagttcgtcaacataggcaaagcacttcttcgacatgagtcccactccgttgcggaaccaattggcccgctccgtcgtccgggacagttccgcgaacaggcacacgcgttcgccgtagtcgtgcactgttcggccctgcggggagaacataatgcgcgcgtcgggaggtcgcacggcaagttcagtctgcacacgatcttggccgccctccgtttcgcaagtgtacgtgcccgagtcctccttcatcgccccgtaaagcgtaaggtgacgcactttgcccacagagtctagcgcgacgcggttggttgcctcgttaattgtacgtttgttgcgggaccagcggacgttggcgtccggatgcgacacttcgcactcgagcgttatgtccttgccctcgaccaagtccatgcgttccgcgaatgccttggtgaagtgtgcttggatggcacccagcaaaagctcggcacggctttcgatggtgccgtgactgttgctgacttggcacgtgtacaccccctcgtctccgtcggccattcgatgaatggtcagtttgctcagataaccttcattgcttatcgacacgttgtcgttttctggcgttggcacaatttcctcgccgtttttaaaccaaagataggttggcgccggctcgccgacggcacaaacttcaagtcgaatttcgttgtttttcggaaccaaagcatcgcgcaaagtcttcgtcaagatgggcaggttcgagccagaaagcttcacagtgcgactttccgctgattttccaatttcctctccgtcggccgacttcataagaacgcgaattcggtacggcacgccctccttcaactcatcctcaatcacagccggtgatttactgtactgctccaacacctcgttccacacggaactgccctcggaacggtattgaataactgcgtgcgccccttgcgggatttgctgctgcaccgtttccgcggttgtccatcgaacgctcactgagtttccgctcagaatttcgacctccaggtgctgccatgtgcacatcg

SEQ ID NO: 5329 - DNA, 1606 bp, Heterodera glycines
  unsure (1)..(1606): unsure at all n locations
cgtcgactcgtgagttgcgnnccaatcgccaccttccatctgncagaaaacatcgtagccgacagcgggacttccgccagtgtcccagcactcgtcccactcgaggcgaacgctgcgctcgtagacatgagacacccgtggcgcggaatgtaccacgggagcggagaacggcatgccggtagtaattgaggccacttttgagaattcgccgaccccaaatcggttgacagccgccacgcggaacacgtagggatggtcgtagtccaattcctccacgaaggtttcgttggtgaactgtgacagttggccaactcgttgccacacccttcgctgtgcccctttcttctccaccacataacccgtgatgcgttcggaatcgtcgaaaagatcagtgccgggcggagggttccactgaaatgaggaaatctttcaaaagtttgccctcaagggaccgactttcaagaaacagtagtcgtgccccacatcggtcaccatcagcccggagggcgggtccggcacgtcgcgcacgtacacttcgtattcgacagcgtcctcgccgtactcgttgaacagcaccacccgataggtgcccctgtcctccttggtcagctctttgcgcgtcagcaggagcgcctcctcgagaacagtgaccgaagtgcgcagttcaggcgtgagcagttcgccgttcaggtacagatccacttccggttcgggcagtgatttgagacggatgttcagggaaaggttttcatttgagtccaaaacaatgcgttcgcctttctgctggtcgagactcggctttccatgaactgaaaaaggacagtaaggtcgaaatccctcccccaatcaatgaccctccaaaacggtggatgactccattctgtccactttcagcgtgtaacgaccgcccattcggtaggatattttgcgaatttccaaactaccttaaatgattttcgcatttatcaagcgtaaatgatgactgatcaccactaattagacctataattggtcaataatccaactgctaaactgtatttttgccttttgtttttataaaaaacacaatgccaaccgtaagcaaaacaaatgccgggttttcgtcgccatttgtacggatttcaacttacaaaggcatccctccttggagatgacgtgctccgtgcccaattcggtcagttctctgccgttatggtaccaagaaatctataaatgaatttcataaatggcttttcctgactaggaatgcaaattcactttttgcgcagcgtcgtgactgagtgtcgccgcgagggtaattgtctcgtcgcaatgggcaattgctgaaaatgaacgaacttatgtaagacagccatttgtaatgtcatcatccgttctacttttgcggggcaatttctcagcaaattccaccggcgtttcctccactgtcaaaacactttcgatcgtttggtcgtccaatgtgatctgaaaaacgcatttgatcacataagagccgccacaaaatttaacctgaactttcatgatgaagtccaacggcacaatctgtgagaattgcaaatacataattaattgttcacgacaattataatgaatccgagcgatcaga

SEQ ID NO: 5330 - DNA, 1456 bp, Heterodera glycines
  unsure (1)..(1456): unsure at all n locations
catcaattcttgnnttttattatttctttattntnaataaaaaactnaaatatcacaattaaaanccatatnaaaaatttnaaacccaaaatntnncnattccctccaaaactaattnttcancaaaatactnantnantttatacaaccatncataacatatacatctacttatataatnnaatacaacantttatnaacatatanntaatctnatatatcatatatcatccatcaatcacattattntttctgttcgggtggtcaaccccgagagatgaaagttcacaattgcatttattttcccttggcatttgtctctttcttttcctcttattttccccactctctaattgttgtgtcttcctttattaatgtaagacactattgatttatttggtccaatgcatgtccattcccctcattcattcggttgctttttatgcacttatttctcttcgcctaaatttttgttctcctccaatttatttattccgcctccgacttcgcccatttttatttaaaattgtttaatttatttgttcatcaaataaacattttattgtgtcggcttgaagaccgaacaattggcgacgcccgtcttaaataaagactcaacgacggatattttggcaatttcggacagattccgaattgctattcaactttcttcaaaaaagcaatagacccaataagggtgagcttccgccaggtgcggtttattcatcgaaaaaaaaccaagatacccaggtggttgcggtttccgccaggtgcggtttactcaacaaagacaaggaaattccccaaaagttgatcaacaaaaatggcgttaaatccgacaattgaccagctcgtgaaaatgctggcggatcaacagaaaatggtgcaggaccaatcacagcaaattgctcaactgattgcgatcggacaaaacgcaccaaatgcggcggcacagcccaatcaaggagcaaattcagtgccaatattgccggacatttcaccattcgagccaacggacgacaagagccgaatttcggaatggattgagcgcttcaaattcgcgttggattgcacagcaccaacggcggacgacgaagtcaaggtcaaatgtttgatgaataagctgagcgaatcggctttcagcgaatacagcagatcagttctgccgtcgtcggtcacagatttcagttttaaagtgacgacagaaaagcttgaaaagctgtttgccaaggctcagtccatattcatcgaccgctacgagtgtttaaaagcggtgagaggagaaggcgaacaattcaggcagttcattaatcggcacagaaaattgctgaccgattttaaattcgatgagctgacaaaagagcaatttaattggctcatgttattgatgggactcaaagcgccccacgaagctgcattgcgacagcgaatctgacaaattgtcagcagatggcgc

SEQ ID NO: 5331 - DNA, 5509 bp, Heterodera glycines
gggatccacagctgcgttgtccgcccgctcggcgggagggagtccgcagctgcgttgggagggggtccgtcgttgttgaaggtgcctgctctctcggcgggagggggtccgtcgttgttggaggtgcctgccctctcggcgggaggcagtccgcagctgcgttgggagggggggtccgtcgaatgtttttgtttggagggaggaggtccgtcgttgttggaggtgcttgccatctcggcgggaggggtccgtcgttgttggaggtgcccgtccgcacggcgtgagagagggtccgcccgaatgagggggtccgcagctgcgtttggaggggagtcgtcgaaggttttcgctcggcgggaaagggcctgtcgaagagggcggtacgcacctggccccattacattaagaaggcgtacgcatcggtacatttgggtggcggacgcgttgattgggatggcgtacgcgtggtaatactgtggcgtgcgcgtgctaatacggtaccattgggtgacgcgtatcgtttggcgtacgcgtggtaatacggtggcgtgcgcgtgctggtacggtaccattgggtgacgcgtacgtcgtttgacgtaggcgtggtaatacggtggcgtgcgcgtgctgatttttcgtacgatgcatctgccgtaggcatcgtacgcatgtatgataccgtaatgggattctgcgtaagaagcatttgccgtaggcattgtaggcatgtatgataccgtaaatgagattctgcgtaagatgcatctgccgaagacatcgtacgcatgtatgataccgtaatgcgctttgcgtacgatcaataaactcaatttattaattggcaaaggtccacttggcaattgtccaacccctccccaacatttggcaactgcccaatagcccccttggtaattttgtattttcaaatgccgacactaccatgccccccccatctttcgggaaaatcgataactaaattggcaaatgtccaatggttcgccccattttgcgcacgcgggcttctgcgtacgatgcatctgccgtggcaccattcgtatgtgagataccgtagtgggattctgcgtaagattcatctgccgtaggcatcgtacgcatgtatgataccgtaaatgggattctgcgtacaatacatctgccgtaggcatcgtacgcatgtatgataccatagttgttcataagattctgcgtaggatgcatctgtcttaggcatcgtacgcatatatgataccgtaatcaacgtatgcatcaagaacacgtatgtgttgatggacgtatgcacttctggagcgttgaatatcatgagtatgtggatgcgtacgcacgcatctaccgtataacattaatctaccatagtcatgtagacaacgtaggcatcaagaacacgtatgtgttgatggacgtacgcatttctggagcgttgaatatcgtgagtatgtggatgcgtacgcacgcatctaccgtatgtaactaaaagtattatactgtacgcattatggatttctgcgtaagcaattagaacctttctcatatagaatccggaagagacggcctgcaaaaagttttgttttgtaatcgattagtcattttttgttgccgcaggaaggtgtacaaggctatatcgattggttgattgtttataagaaggagggagttctcatttcttctcattcgttaattttttaatactaaatttcgtctcgctgtcctctatcaatattttaattaaaaaatattaagcattaaaaagcattaaatcaatgtcaactcaaccatctagctttttcaacgtcgccatgccgccccttggacatgtcgaacaacttgttcaacccatgtttatcaatgcggcacatcagcaaatgccggtatttttttattttttttttcataaaacaaattctgttttagtcaccattttgtgctgatggcacgcacaccattcaatttttgaatgggagcgtctctattgtgggccgcccgctgccgtctgttatttaaacagttttttctattcaattgattattcaggccgatttgtctcaccgtagtagcagtagatcaccgcccgcaccaacaaacaccagctggccctctccctgtgaccaatgttgtgctgcgcaacggcgacggtcaacgtgttgaagcttcgggttggcagcaccaggccagtgttctggcgtctttggacatcgggagtgcctactggttcaccaactgcactgcgcgggcccgataccagcaactggactgttggtatcgcattggcgtcgatggcaaaaatgccattgtcgtccctcacaccgccgctccacaggtaagtttttcaaacttttcttataacagaatattgtgttaagccgacggctccgcaaagtggtggactccaccattcaattgcctccattttgggagcacaggtgggcttaaatttattcaaaaattttttttaaatatggaataatttaaggcgccacatgttcagacgggtggaggccgtacgttcaatgaggcgcgtgcccctcccgaagcgagcccaattgaggaggacgcgaataacaatgtgagaaaatgatttttttttttgggttgtgtattttttttttgaataaaatttgctcagacaaatgatcatcgttttgggatcccggtgcttcatcaaagacgggcacctcaattggttggttattatgatttgctttttcttgaataattataccatggataaatttaaggtgactcgatcaattgaggactgtttcgtcattgaacgaacgacgccaatgcgcaacaccctccgcaacaccaggggcgaactttgcgagatccgcttcctgcctttggaggacgccgagcggcccgatctcgtgctggagacgctcattcagcatctgctcgaccgtgtgctggaaggtcacccgcctccgatgctcgttggacttcagcttcatccgcccggattcgatcgaccgtacgtcatccgactccgcccaccggagcaaaataatgcggcagcattgtcggcgcctattgagcgcctcaacgagcagtctgctgccggaatcgatctgctcgctgggactaccgtaaccaaagtgcttgctgtgtggcccctggagcctattcgtgctaatgctcagcgtggaggttgtgctattgtacctttaaatattgatttttctaatgaatttaggtggttgcgactttgacgctgaacaccatgtgtccaacaccgtgcggtcccttgtgcgcgtcgtcaacccaaacgaccgccattgtctggcgcgttccgtcctcctggggctctgtgaccgtgagacgcgacagccgaacggcggtggacgggacacatttgcagcgtacgctggacgacaagaccaacacggggcgcaggcggtggaccttttgaggaacgctggacttcccgtcgacaaacaaatgtacacgctggaggacgttgaacagcttcagcggtggatcatcaacgagcacggtgttggacaaattcggcttgtcgtgttcgagaaggagcaagagtatcggattgtcttcaaaggagaggggtgagtattttgtaatttttaattaatgtctaaaatattcttttaagtgtggctgcgcatttcaatttgtgcctcttgctggagcgtggtcactttaactacattggaagaattgaacaactgttcaaaatcgagaactactgtttcgactgtgaacgcagagcaacgactcgctatcatctggccggctgtaaagttgtgtgtcgtttgtgtcttcggtttggcgcagggtttccatgtcaaccggaacaggtaataattaaaaaataaataaataaaatgaaatatgcttttttttttagttgccaaatggtgggagcagttctcgtcgctgcaatgaatgtggctttgtatttccgaacgacggctgctacgactatcatcttgccaacatggctcccgctccgattgatggccgaggccaacgccaacggcagccaatttgtcaatggcgtcgtttctgtcgagcctgtggtcgtgtcgcttattttggcgtccatcaatgtgcaccactccgtcggcccgctggaccaattgactgtcgccgttgtcatgggcggcacacactggatgagccgtgcttcatccaaccgctccttgacaggcctgctcatcagaacaacaacaacaacaacgatgatgacgacgacgacgatgacgacgctgatgtcctcgacgatgatgaagcggatgacgaactcccacttcgtctttgcttcttcgacgctgaaacgtcccaggagcggcccctgcaattgaacaaccaaattgctcagaagcacgtaccgcttctcatcgttgctgaagtcatctgcgagccatgtcttcgagcgggaatcaacgtcaacgatggattcggaagaagagctcctgattgtgtttgtttgtgtcggatggtgcgaggtcaacaactgaggcagtggtcttctcccccgtttgtcaatggagcaggcgacaacactccgcccccagagggcgctccggcattcaatcagcgccgcttctactttcactcttttgacaacgaggccaacgatccgattgagcaatttttgctctttctgatgaagcacggctccaagaaggcacacacagtctgcatcgcgcataacggtggaaagtacgattttcatctcgtacttgaggcactccatcgccgcagcattccaccgaagcgactctgcacgacggggctaaaaatatattcaatgaagctgcgcggattaaatcaacgacgaattacattcaaggactccatcaactactttttctgtgaattggatgccttggttaagagctttgatctgccacaacatctggcaacggtgaagcccttcttcccgtacttgtacatacagcgacaacatctgctacaccgtctcaacggtcttccggcaatagaacactattcgcccgacacgatgaaggtcgaaaaacggaccaagttttcttcgatggcacggttacaacaacaacaacgccaactttcaactgcgtgatcaactcatcatgtactgtgtcaacgatgtggcaattcttcgtgaatctgtccttcgatttcgtcaactcatcggtgaacacacccaaggccttgaccccttcctctgcgcttcgacggccgccggcctagcgctcgccacgctccgccgctgcttcctccccgtcaaccgtttggtgcactctccagaaggcgggtacctccgtggacgacgagcttctgccgaatctcgtcgctacatccgcttctttgagttggaaaacgatggagcacaagtgcagtgcgctgactggtcagtgggggaggcgcacatcgaggattctgggtaccgtgtggacggcctttggcgccgtgacccgccccttcgtccaatggccatcgagtggatgggatgcttctatcacggtattttccaatcaataaagattta
